United States Patent Application Publication US 2024/0327476 A1 - sequence listing, part 65

SEQ ID NO: 123313 - DNA, 4371 bp, synthetic construct
  misc_feature 1..4371: note = Description of Artificial Sequence: Synthetic coding sequence
  source 1..4371: mol_type = other DNA
atgaggctgccgctgctcttagtgttcgctagcgtgatccccggcgccgtcttgctgctggacactagacaattcctcatttacaatgaggaccacaaaagatgtgtggacgcagtctctccttccgcagtccagactgccgcttgcaatcaagacgcggagtcccaaaaattcagatgggtctccgaatcccaaatcatgagcgtggcatttaagctgtgcctgggtgtaccgagcaaaactgactgggttgccattaccctgtatgcctgtgatagtaagagcgagttccagaagtgggagtgtaagaatgacacccttctcggcattaagggcgaggacttattcttcaattatggcaatcggcaagaaaagaacatcatgctgtataagggctcagggctgtggtccaggtggaagatctatggcaccacagataatctgtgctccagaggatacgaggcaatgtacacactgctgggcaacgccaatggcgccacgtgcgcatttccctttaaatttgagaacaaatggtatgcggattgtacatctgcagggcgctcagacggatggctgtggtgtggaaccactactgactacgacacggacaagctgtttggctactgtccactgaagtttgaaggctctgaatccctctggaacaaagatcccctcaccagtgtctcttaccagatcaacagtaagtcagcacttacctggcatcaggcccgcaagagctgccagcagcagaacgcagagctactgtcaatcactgagattcatgaacagacataccttaccgggctaacttcgagcctaacatcagggctctggattggacttaatagcctgtccttcaacagcggctggcaatggtccgaccgttcccccttccgctatctgaactggttgccaggatccccctctgctgagcccggaaagagttgcgtgagcctaaacccgggaaagaacgcaaaatgggaaaatctcgagtgcgtgcagaagttgggatacatttgtaagaagggcaacacaactcttaactcttttgtcatccccagcgagagtgatgttcccacgcactgtccctctcaatggtggccctacgcagggcattgttacaaaatccatagagatgaaaagaagatccagagggatgcccttacgacgtgtcgaaaggaaggtggcgaccttacaagtattcatacgatcgaggagctggacttcatcatcagccagctaggatacgagccaaacgatgagctgtggatcggactgaacgatatcaaaatccaaatgtacttcgaatggagcgatggaacccccgtcacctttaccaaatggttgcgcggagagccctcccatgagaacaaccgccaggaggattgcgtggtgatgaaaggtaaggacggctactgggccgatcgaggctgtgagtggccactagggtacatctgtaagatgaaatctaggagtcaggggccagagattgtcgaggtggagaaggggtgtcgaaagggctggaaaaaacaccacttctactgctatatgataggacatactctaagcactttcgctgaggcgaatcaaacttgcaacaacgagaatgcatacttgacgaccatcgaggaccggtatgagcaggcattcctcacttcctttgtcggcctcaggccggagaagtacttttggaccggtctgagcgacatccagaccaagggcacatttcagtggacaatcgaggaggaggtacggtttactcactggaatagcgacatgcctggtaggaagcccggctgcgtggccatgcggaccgggattgcaggcgggctgtgggatgtgctcaagtgcgacgagaaggccaaattcgtgtgcaaacattgggctgagggagtgacccaccctcctaaacccacaaccactcctgagccaaagtgtcccgaggactggggagcctcctcacgtacaagtctgtgtttcaagctttacgcaaaggggaagcacgaaaagaaaacatggtttgagtctagagatttctgccgcgcgctcggcggagatttagcttccatcaataacaaagaagagcagcagaccatttggcgcctcatcacagcgtctggtagctaccacaagctgttttggctaggcttaacatatggctccccgtcagaggggttcacttggtccgacggatcaccagtttcctacgagaattgggcctacggcgagcctaataattaccagaacgtggaatactgcggtgaactgaaaggggaccccaccatgtcttggaacgatatcaattgtgagcatcttaataattggatctgccagatccagaaaggacagaccccaaagccagagccaactcccgcgccgcaagacaacccccctgtcacagaagacgggtgggtcatctacaaggactatcaatactacttcagcaaggagaaggagaccatggataacgcaagggccttttgtaagcggaattttggcgacctagtatcaatccagtccgagagtgaaaagaaattcctctggaagtacgtgaataggaacgatgcccagtccgcttattttattggattacttatcagcctggataaaaaatttgcctggatggacgggtccaaagtggactatgtgagctgggctactggcgagccaaactttgcaaacgaagatgagaattgcgtcaccatgtattccaattccggtttttggaacgacataaactgtgggtacccaaatgccttcatttgccagcgacataactcctccataaacgccaccaccgtgatgcctaccatgccgtctgtgccctcgggctgtaaagagggctggaatttctatagcaacaagtgctttaagatcttcgggtttatggaagaagaaaggaaaaattggcaagaggctagaaaggcctgtattgggttcggcggaaatttagtctctatccagaatgaaaaagaacaagcctttctaacatatcatatgaaggacagtaccttctctgcatggaccggcctgaacgacgtcaattccgaacatacattcctctggactgatggacggggcgttcactacaccaactggggcaagggatatccaggggggcgccgctccagtctaagctacgaagatgccgactgtgtagtgataatcggaggagcgagcaacgaggccggtaagtggatggatgatacatgtgattccaagcgggggtacatttgtcagaccaggtccgatccttccttgaccaatccacctgccaccatccagacagatggcttcgtgaagtacggaaaatcatcctatagcctgatgaggcagaagttccaatggcacgaggctgagacttattgcaagctgcacaacagcttaattgcttcaatattggacccatacagcaatgcattcgcctggttacagatggaaacatctaacgaacgggtgtggattgcactgaactccaatctcactgataaccagtacacatggacagacaagtggagggtgcgctacaccaactgggcagccgatgagcctaagttaaagagcgcatgtgtctatcttgacttggacggctactggaaaactgcccactgcaatgagagcttttatttcctatgcaagcgatctgacgaaatcccagcgaccgagccccctcagctacctgggaggtgtcccgagagcgatcatacagcttggatcccctttcacggacactgttattacatcgaatcgtcgtacactagaaactggggacaggcttctctggagtgtctgcgcatgggcagttccctcgtgtcaatcgagtcggccgcagagtcctcgttcctgtcataccgtgtcgaacctcttaaaagtaagactaatttctggattggcttatttaggaacgtagagggcacctggctctggatcaataacagtccggtgtccttcgtgaactggaacactggagacccctcaggagaacgtaacgactgtgttgccctccatgcatccagtggcttctggagcaacattcattgcagctcctataagggctacatttgcaaacggcccaagataattgatgccaagcccactcacgagctattgaccactaaagccgatactcggaagatggatccttctaagccaagctccaacgttgccggagtggttatcattgtgatcttgctgattctgactggcgcaggtctggctgcttacttcttctacaagaaaagaagagtacatctcccgcaagaaggagccttcgagaatacactctattttaattcccagtcgagccccgggacatcagacatgaaggatttggttggcaacatcgagcagaacgaacactccgtcatctag

SEQ ID NO: 123314 - DNA, 4440 bp, synthetic construct
  misc_feature 1..4440: note = Description of Artificial Sequence: Synthetic coding sequence
  source 1..4440: mol_type = other DNA
atgggacccggccgaccagcgccagcgccttggccacggcacctgctgcgctgtgtgctgttgctgggctgcctacacctggggcgccccggcgcacctggcgacgcagctctgccagagcccaatgtgtttctgatattttcccatgggcttcaggggtgtctggaggcccagggtgggcaggtgagagtgaccccagcctgtaacacgagcctgccagctcagcgatggaaatgggttagccgcaacagactcttcaatctgggcacgatgcagtgtctgggcaccggctggcccggaacaaacacaactgcctccctgggaatgtatgagtgcgaccgggaagccttgaacctgcgttggcactgtaggacactgggggatcagctgtcgctgctgcttggcgccaggacctcaaacatctccaaaccaggaacactcgagcggggggaccagaccagatccgggcagtggcgcatctacggttctgaggaggacctgtgtgccctcccataccacgaggtgtatacaatccagggaaacagccacggaaaaccttgtaccatccctttcaaatatgacaatcagtggttccacgggtgcacaagcacaggacgcgaggatggacacctttggtgcgcgaccacacaggattacgggaaggacgagcgttggggattctgcccaataaagtccaacgattgcgaaactttctgggacaaggaccagctcaccgattcctgctaccaatttaatttccaatcaacattgtcatggcgagaggcctgggcaagctgcgaacagcagggcgcggacttactttccattacggagattcacgagcagacttacatcaacggactgctaacaggttactcttcgactttatggatcgggctgaacgacctggacacctctggcggttggcaatggtctgataactcccccctaaagtacctcaactgggagtctgaccaaccagacaaccccagtgaggagaattgcggcgtcatccggaccgagagcagcggcggatggcaaaacagagattgtagtatagcgttgccatatgtttgcaagaagaagcctaacgcaactgccgaacccaccccacccgacagatgggcaaatgtgaaggtggaatgtgagccttcttggcaacccttccagggacactgctatcgcttacaggctgagaaacggtcgtggcaggagagcaagaaagcgtgcctgcgcggagggggcgacctcgtgagtatccacagcatggcagagcttgagttcatcaccaaacagatcaaacaggaggtcgaagagctctggattggactgaatgacctcaaactgcaaatgaatttcgagtggtccgacgggagcctggtgtcctttactcattggcaccctttcgagcccaacaattttagggactcactggaagattgtgtgacgatctggggcccagagggacgctggaacgacagtccttgcaatcagtcactcccctccatttgcaagaaagccggccagctgagccagggcgccgccgaggaagaccatgggtgcaggaaagggtggacatggcactcgccctcgtgctattggctcggcgaagatcaggtgacttactccgaggcccggaggttgtgtacggaccacggtagccaactggtaactataaccaaccggttcgagcaggcttttgtgtcctctttaatttacaactgggagggcgagtatttttggacagccctccaggacctaaattccaccggaagttttttctggctgtcaggtgatgaggtcatgtacacacattggaaccgggaccagccaggttatagcagaggcgggtgcgtcgccctggctacgggttccgcaatgggcttgtgggaggttaaaaattgtacatctttccgcgcaaggtacatttgtcggcagagcctgggtacgccagtgacccctgaattaccgggacctgacccaaccccatcacttacagggagctgtccgcagggatgggcgagcgataccaaactgcgctactgctacaaagtgtttagctctgaacgcttgcaggacaagaagagctgggtgcaggcccagggcgcctgtcaggagctcggtgcacaactgctgagtctcgcaagctacgaagaggaacattttgtagccaatatgcttaacaaaatcttcggtgagagcgaacctgagatccacgagcagcattggttttggatcggcctgaacagaagggatccacgaggtgggcaaagctggagatggagcgacggcgttgggttctcttaccataatttcgacaggagccgtcacgacgacgatgatattagaggctgcgcagtgctcgatttggctagcctgcagtgggtggcaatgcaatgtgatactcagttggactggatttgcaagattccaagagggacagacgtgcgtgagcccgacgattccccacaagggcgtagagaatggctgcgatttcaagaagccgagtataagttctttgagcatcactccacctgggcccaggctcagcgtatctgtacgtggttccaggctgagctgacttcagtgcactcccaggccgagctagatttcttatctcacaacctccagaaattcagccgggcccaggaacagcactggtggattggcctgcacacttctgagtccgatggccgctttcggtggaccgatggcagcattatcaacttcatctcctgggctccaggcaagccgcggcctgtaggaaaagataaaaagtgtgtgtatatgactgcatcacgcgaggactggggtgatcagaggtgtttgaccgctctcccatacatttgcaagcggtcgaacgtcaccaaagaaacacagccaccagacctgccgaccacagcgcttggagggtgccctagcgattggattcagttcctgaataagtgctttcaggtccagggccaggaaccacagtcccgtgttaagtggagcgaggcacagttttcttgcgagcaacaggaggctcaactcgtaaccatcacaaaccccctggagcaagcattcatcaccgcttctctgcctaacgtcacattcgacttgtggataggacttcacgcaagccagagagactttcagtgggtagagcaggaacctctgatgtacgccaattgggcaccaggagagccctccgggccatcacctgcaccatccggaaacaagcccacaagctgcgcagtggtgctacactctccctctgctcatttcacaggccgatgggacgataggtcttgtaccgaggagacccacggttttatatgccagaaagggacagatccgtctctgtccccatcccccgccgctttgccacccgccccaggtacggagctttcctacctcaacgggaccttcagacttttacagaagccgctgcggtggcatgacgctctcttgctctgcgaatcccgaaatgccagtctagcttacgttcctgatccatatacacaggccttcctgacccaggccgcaagaggccttagaactcccctgtggatcggactcgcaggtgaggaggggagtagaaggtacagctgggtgtcagaggagcccctgaattatgttggctggcaggatggggagccacagcagccaggcggttgcacatatgtggatgtcgatggtgcatggaggacaactagctgcgataccaaattgcagggcgctgtttgcggagtgagctcaggtcctcctcccccaagacgtatctcctaccacggcagctgccctcagggcttggctgattctgcttggatcccctttcgggagcactgctacagctttcatatggaactgctcctgggacacaaggaggcaagacagaggtgtcagcgcgcaggcggcgcggttctttccattctggatgagatggagaacgttttcgtgtgggagcaccttcaatcctacgaaggtcagagccgaggcgcttggctgggcatgaatttcaacccaaagggtgggaccctagtctggcaagacaacactgccgtgaattactctaactggggaccgccaggactgggcccttctatgttgtcccataacagttgctactggattcagtcgaacagtggcctgtggcgcccgggggcgtgcactaacattaccatgggagtggtttgtaagctcccccgggcagagcaatcatccttctccccatcagcccttcccgagaatccagctgctctagtggtagttctaatggcggtcctgctgctgttagctctgctcacggctgccctgattctctacagacggagacaatcgattgagcgcggcgccttcgaaggggcacgctattctcgtagttcaagttctcccaccgaagccacagaaaagaatattcttgtgagcgacatggaaatgaacgaacagcaggagtag

SEQ ID NO: 123315 - DNA, 1038 bp, synthetic construct
  misc_feature 1..1038: note = Description of Artificial Sequence: Synthetic coding sequence
  source 1..1038: mol_type = other DNA
atgcccactgggcatctgggctcaccactcgctctggccctgctccctgtggccacaaaccggccggccgtacaatggtcgtgcactgctcctcagccaactagcctagccgctggcaccattggcgcagcccggcggcgacccatggcctcctccgcaaggagagctaggggctctcggcggtactcctgggtgagtgaggagcctcttaattatgtcgggtggcaagatggtgagccccagcagcctggaggctgcacatatgttgacgtggatggagcctggaggaccacctcatgcgacacaaagttgcagggcgcagtatgcggagtgtcatcaggcccccctcctcccagacgaatttcctaccatggatcttgtccccaagggctcgccgacagcgcctggattcccttccgggaacactgctacagtttccatatggaactcctgcttggccacaaagaagcaagacagaggtgccagagagctggtggtgccgtcctgtcaatcttggacgaaatggagaacgtgttcgtgtgggagcacctacaaagctacgagggtcagtcgagaggggcgtggctggggatgaacttcaatcccaaaggcggaactctggtgtggcaggacaacacggctgtgaactattctaactggggtccacctggtctgggaccaagcatgctgtcccataatagctgttactggatacagtcaaatagcgggctttggcggcctggggcctgtaccaacatcaccatgggagtggtctgtaagctgccacgggctgagcaatcatcatttagcccctccgctcttcccgaaaacccagccgctctggtcgtcgttcttatggctgtgcttctcttgttggccttgctcactgccgctctgattctatacaggaggcggcagtcaatagagagaggggcttttgagggggcacgatattcaaggagctcgtcaagtcccacagaggccaccgagaaaaacatattagttagcgatatggaaatgaacgaacaacaagagtag

SEQ ID NO: 123316 - DNA, 834 bp, synthetic construct
  misc_feature 1..834: note = Description of Artificial Sequence: Synthetic coding sequence
  source 1..834: mol_type = other DNA
atgttcccgttttactcatgttggcgcactggtttactgttacttctgctggcggtcgcagtgagagagagctggcagacagaggaaaaaacatgcgacctggtaggagagaaagggaaggaaagtgaaaaggagttagcccttgtaaagcgcttaaagccattgtttaacaagtccttcgaatccacggttggccagggctctgacacatatatttacatttttagagtctgcagggaagccggaaatcataccagtggagctggcctggttcagatcaacaagtccaatggaaaagaaacagttgtggggcgcttgaatgagacccacatctttaatggctctaactggatcatgttgatttataagggaggcgacgagtacgacaatcactgcggaaaagagcagcgccgagcagtggtcatgatctcgtgcaaccgccataccctggcagataattttaaccctgtgtcagaagagagaggaaaggtacaggactgcttttacctattcgaaatggatagttccctagcatgtagccctgagatcagccacttgtctgtcggcagtatcctgcttgtgactttcgccagcttagtagcagtatacgtggtcggtggctttttgtaccagcgcctggtggtcggtgcgaagggcatggaacagttcccacacttggcattttggcaggacctgggaaatctggtggcggatggatgtgactttgtctgccgaagcaagcctaggaatgtgcctgctgcttaccgaggtgtgggggatgaccagctcggggaggagtccgaagagagagacgatcacctcctgcccatgtag

SEQ ID NO: 123317 - DNA, 279 bp, synthetic construct
  misc_feature 1..279: note = Description of Artificial Sequence: Synthetic coding sequence
  source 1..279: mol_type = other DNA
atgttccccttttattcatgttggcgcactggcctgctccttctgctgttagccgtggcagtgcgtgaaagctggcagacagaggaaaagacttgcgacctggtgggggagaagggcaaggaatcagagaaagaattagctctggtaaagcgcctgaaacccttattcaataagtctttcgagagcaccgtgggccagggctcagacacatacatctatatttttcgagtatgtcgggaggctggaaatcacacctctggcgctggtcttgtccagtag

SEQ ID NO: 123318 - DNA, 330 bp, synthetic construct
  misc_feature 1..330: note = Description of Artificial Sequence: Synthetic coding sequence
  source 1..330: mol_type = other DNA
atgtttcctttctattcctgctggcgcactggcctgcttctcttgcttctggcggtggccgtgcgagaatcttggcagaccgaagagaagacatgcgatttggtcggcgagaagggcaaggagtccgagaaggagctggccctagtcaagcgactcaagcccctattcaacaagagctttgagagcactgtcggacagggatcagatacatacatctatatatttagagtctgtcgtgaagccgggaaccatactagcggagccggccttgttcagattaacaagtcaaacgggaaggagacagtggttggccgactgaatgaaacctag

SEQ ID NO: 123319 - DNA, 747 bp, synthetic construct
  misc_feature 1..747: note = Description of Artificial Sequence: Synthetic coding sequence
  source 1..747: mol_type = other DNA
atgtccctcttcccaagtttgcccctgctcctgctgtccatggttgctgcttcctattccgaaaccgtcacttgcgaagacgctcaaaagacttgtcctgcagtgatcgcatgcagtagtccaggcattaacggctttcctggtaaagatggccgggacggcaccaaaggggagaagggtgagcctggccaggggctgcggggactgcagggcccgcctggaaagctcggcccccccggtaaccctgggcctagtggctcccccgggcccaagggccaaaaaggcgaccctgggaaatcgcctgatggcgacagtagcctggctgcctcagaacgtaaggccctccagaccgagatggcccggattaaaaagtggctgacatttagcctaggaaagcaggtgggaaacaaattcttcctgactaatggagaaattatgaccttcgagaaggtcaaggccctttgtgttaagtttcaggcctccgtcgcaaccccgcggaacgcagcggaaaatggcgcaattcaaaaccttattaaggaggaggcctttctgggcattacggacgaaaaaactgagggccagttcgttgatttgacagggaaccggctgacttataccaattggaacgagggggaaccaaacaacgctggtagtgatgaagactgcgtgctgctcctcaaaaatggtcagtggaatgacgtaccatgctccacctcacacctggcagtctgtgagttccctatctag

SEQ ID NO: 123320 - DNA, 744 bp, synthetic construct
  misc_feature 1..744: note = Description of Artificial Sequence: Synthetic coding sequence
  source 1..744: mol_type = other DNA
atggctgcagaggccgatgggccgctgaaacgactgttagtgcccattctcctgcctgagaaatgctatgaccagctgttcgtgcagtgggatcttctgcatgtgccatgtctgaagatcctgctaagcaaagggctggggctcggtatcgtcgctgggtcccttctggttaaattaccgcaggtgttcaagatcttaggcgcaaaatcggcggaaggactgtccttgcagtccgtgatgcttgagttggtggccctgaccgggaccatggtctacagcattacaaacaacttccccttctcaagctggggcgaggctctcttcctgatgctgcagaccattacgatctgttttctcgtgatgcactacaggggccaaaccgtaaagggcgttgcatttctggcatgctatggactcgtgctgttggtactgctgtcaccgcttacaccactcaccgtcgtgaccttgctgcaggccagcaatgtgcccgccgttgtcgttggaagactgctgcaggctgccaccaactaccataacgggcacaccggccaactatccgcgatcaccgttttcttgctgttcggtgggtccctagcccgaatctttacttcaattcaggagaccggcgatccactcatggcaggcacgttcgtcgtgagttcactatgcaacggtcttatcgccgcccaactgttgttttactggaacgccaagcccccccataagcagaagaaagcacagtag

SEQ ID NO: 123321 - DNA, 381 bp, synthetic construct
  misc_feature 1..381: note = Description of Artificial Sequence: Synthetic coding sequence
  source 1..381: mol_type = other DNA
atggccgccgaggccgatggtcccctgaaaaggcttctggtgcctatcctcctgccagagaagtgctatgaccagctgtttgtgcagtgggacctgctgcacgtgccttgtctcaaaattctcctgtccaaaggtctcggcctgggcatcgtggccggaagcctgttagttaaacttccccaagtgttcaaaatcttgggggccaaatccgctgctggcttaaaaaaagaagatgaggcacggccagtacggagcgcatcaatgcgagtgagagggggtctcggagcatggggacaccaacagggtgaagggtgcatggagtgggagagccagggcgccggatccggatatcggtgggcagctgtaccaccaggcgcatag

SEQ ID NO: 123322 - DNA, 900 bp, synthetic construct
  misc_feature 1..900: note = Description of Artificial Sequence: Synthetic coding sequence
  source 1..900: mol_type = other DNA
atggctgccgaagctgatggacctcttaagaggctactcgtacccattttgctccctgagaagtgctacgaccaactgttcgttcagtgggacctattgcatgtcccatgtctgaagatcctgctgagcaaaggcttgggacttggcatagtagccggtagcctgttagtcaaattgccccaggtttttaaaatactcggcgccaaatcagccgaaggattaagcctccagtctgttatgctagagctggtggcattaactggaacaatggtatattctataaccaataactttccattctcaagttggggagaggccttatttctgatgctccagaccatcactatttgctttttggtcatgcactataggggacagactgtgaaaggagtagccttcctggcttgctatggcctcgtgttgctcgtcctcttatcaccactcacacccctcacggtggtgccgtgctccggactgcagtgcgcgtgttgcgggggcggcgaggcttcgccaggctcccaccagttgcctcaaagagctcatcgacctgccctgagccaccactcacttccagctgtctgggggctaccagggcccaatttgcacttccactcaggaaatcggcggtctcctgacggttgggatctctgtggcctcctgtcactgcagaggccgcaccgacgccccgcagccctgttgcttgagtgtaaggcctctccacaggccgagaaaggagccgtggagcccgccacaggcgtgataccttttcccctgattcatccaacatcaggcttcagcccatccgagcccgcctgctggtgcgacttactaatccttcacagcagtgcacttgctgatttcctttcccagggattcctcctcgtggagacgaacggctag

SEQ ID NO: 123323 - DNA, 636 bp, synthetic construct
  misc_feature 1..636: note = Description of Artificial Sequence: Synthetic coding sequence
  source 1..636: mol_type = other DNA
atggccgccgaggcagatggccctctgaaacgcctgcttgtgcctattctcctcccggaaaagtgctatgatcaactcttcgttcagtgggacttgctgcatgttccttgtttgaaaattttattgtccaagggactaggcttgggcatcgtggctggtagtttgttagttaaattgccacaagtgttcaagattctgggcgcgaagagtgcggaaggcctgagtttgcagtctgttatgctggaactcgtggcattgaccggaacgatggtctactcaattacaaataactttcctttttcctcatggggtgaggccctgttcctgatgctgcagactattaccatttgcttcctagtgatgcactatcgtgggcaaacagtgaagggagtcgccttcttagcgtgctacggactggtgctccttgtgctcctgagtccactcacccctctgaccgtggttaccttgcttcaggcatcaaacgtgcctgcggtcgtcgtggggcgactgctgcaggcagcaaccaataccacaaccggtacccaggccagcagccagccatcacagagcagctgctgcttgggcgcaccatggccggaaagtagtctgccgttccgaaagccagaaattccctag

SEQ ID NO: 123324 - DNA, 561 bp, synthetic construct
  misc_feature 1..561: note = Description of Artificial Sequence: Synthetic coding sequence
  source 1..561: mol_type = other DNA
atggcggccgaagcagatggacctttgaagcggcttctggtcccaatcttgctgcctgaaaaatgctatgatcagttgttcgtgcagtgggaccttctgcacgttccatgcttgaaaatcttgctgtcaaaaggtctgggactcggcatcgtcgctggatcattgcttgtgaaactgccccaggtttttaagattctgggagcaaagagtgccgagggtctttcattacagtctgtcatgttggaattagtggccctgacagggacaatggtgtactctatcactaacaacttcccctttagatgtagatttccaagactcctgaggcccggaccagcaggcgcgtcacttacttcagatgctctggattgtagccacccagctcctggcttacagtgtgcctgctgcggcgggggggaggcctcccccggcagccatcaacttccacagagagcacacagacccgcactcagccaccattctctgcccgctgtgtggggcctgccaggccccaacctgcacttccacagcggcgtgagtatcccgttttctcagctctag

SEQ ID NO: 123325 - DNA, 2826 bp, synthetic construct
  misc_feature 1..2826: note = Description of Artificial Sequence: Synthetic coding sequence
  source 1..2826: mol_type = other DNA
atggcggctgcacctgccctgaaacactggcggaccacactcgaacgggtcgaaaagtttgtttctcctctgtattttaccgattgtaatctcagaggtcgcctgtttggagcatcttgcccagtggctgtgctcagcagcttcttaactcccgagagattaccctaccaggaggctgtgcagcgagacttcagaccagcccaggtgggtgatagcttcgggcctacgtggtggacttgctggtttagggtggagctcacgatacctgaggcttgggtggggcaggaggtgcatctctgttgggaaagcgacggtgaagggttagtctggagagacggggaaccagtgcaaggactgacaaaagaaggcgagaaaacatcctacgttcttaccgatcggctaggcgagcgggatcccagaagtctcactttgtacgttgaggtggcatgcaacggactactcggcgctggcaagggctccatgattgctgcgcccgaccctgaaaagatgttccaattaagccgagcagagctggcagtgtttcaccgggacgtgcatatgcttctggtggatctcgaactccttctgggaatcgctaaagcgcaacagctggagtgggtcaaatcgaggtacccaggactgtactcccgaatccaagagtttgcttgtagaggacagttcgtccctgtgggcggtacttgggtggaaatggatggcaacttgccttcaggtgaggccatggttcggcagtttttgcagggtcagaatttcttcttacaggagtttggaaaaatgtgctctgagttctggcttcccgacacttttggttattctgctcagctgccacagattatgcatgggtgcggtattcgacgcttcttgacacaaaagctgagctggaacctagtcaactctttccctcatcacactttcttttgggagggtctggacggatccagagtgctggtacactttccccccggcgactcatacgggatgcaaggaagtgtggaggaggtgcttaaaacagtggctaacaacagagataagggtcgggccaaccattcagccttcctcttcgggttcggtgacggagggggtgggcctacccagactatgttggataggcttaaacggctatctaataccgatggcctccctcgagtgcagttatctagtcctcggcagttgttttcagcattggaatcggatagtgagcaactgtgcacatgggtgggcgagctgtttctggagctgcataacggcacatatactacacacgcccagattaaaaaggggaatcgggagtgcgagagaatacttcatgatgttgagctgctatcctcattggcccttgctagaagcgcgcagtttctttacccagccgcacagctgcaacacctatggagattgttgctgcttaatcagtttcacgatgtggtcaccggatcctgtattcagatggtcgcagaagaggctatgtgccactacgaggatataaggtcccatggtaatacccttctgagtgcagctgccgccgccctttgcgctggcgaaccagggccggagggactactgattgtcaacactttaccttggaaacgtatcgaggtgatggcactacctaagcccgggggagcgcattctctcgcacttgtcacggtaccttcaatgggctacgctccagtcccccctccaaccagcctgcagcccctgctcccacaacaacctgtgttcgtggtacaagagactgacggttccgtcaccctcgacaatggtataattagggttaagctggacccaacaggccggctaaccagcctggtgctggtggcatcaggtcgcgaggcaatcgctgaaggagcagttgggaaccagtttgtgcttttcgatgatgttcccctgtattgggacgcgtgggatgttatggactatcacctcgaaacaagaaagcctgttttaggacaggccggcacgcttgccgtggggacggagggcgggctgcggggatcagcttggttccttctccagatttccccgaattcaagactcagccaagaggtagtgctcgacgttgggtgtccttacgtgcgtttccacacggaagtgcactggcacgaagctcacaaattcctgaaagtggaatttcctgcaagggtgagaagctcgcaagccacgtacgagattcagttcggacatctccaacggcccactcactataatacatcgtgggattgggcccggttcgaagtgtgggcccaccggtggatggatcttagtgaacatggcttcggccttgcactcttgaatgactgcaagtacggcgccagtgtcagaggatcgatcctgagtctgtcccttctgagagcacccaaggccccagatgccacggctgatacgggcagacacgagttcacctacgccctaatgcctcacaagggttcatttcaggacgccggggtgatccaggccgcttatagcttgaattttcctcttctcgccctgcccgcaccctcccctgcaccagctacctcctggagtgccttctctgtttctagcccagccgtcgtcctggagaccgttaagcaggctgaatcttctccccagcgtagatctctggtactccgcctttacgaagcccacgggtcccacgttgactgctggttgcatctttctttgcctgtccaggaagcaatcttgtgtgacctgctggaacgtcctgaccctgccggtcatctgactctgagagacaacagactaaaactcaccttcagccccttccaagtgctgagcctgctgctggtgctccaacctccgccacattag

SEQ ID NO: 123326 - DNA, 3174 bp, synthetic construct
  misc_feature 1..3174: note = Description of Artificial Sequence: Synthetic coding sequence
  source 1..3174: mol_type = other DNA
atggcagccgcgcccgccttaaaacactggcgaacgactctggaaagggtagagaagttcgtcagtcccttgtactttaccgactgcaatcttagaggacggcttttcggcgcctcttgtcccgtcgcagtcctcagttcatttttgacccctgaaaggttgccataccaggaggccgttcagcgggatttcaggcccgctcaagtgggggacagcttcggtcctacttggtggacttgctggttccgggtggaactcaccattcccgaggcttgggttggccaggaggtacatctgtgctgggagtccgacggcgagggcctagtgtggcgcgacggggaacccgtacagggtcttaccaaggagggcgaaaagacttcatacgtccttacagataggctcggcgaaagggacccaaggagccttaccctgtacgtggaagtggcctgcaatggcttacttggcgccgggaaagggtccatgatagcagccccagacccggagaagatgttccaactgtcacgggctgaactcgccgtgttccaccgagacgtacatatgctcctggttgacctcgaactcttactgggtattgctaaagggctaggaaaggacaaccagaggtcattccaggctttatatactgccaatcagatggtgaacgtctgcgatcctgcccagccagagacctttcctgtcgctcaggctctggccagccgctttttcggtcaacatggcggtgagtcccaacacactatacacgctacagggcactgtcatattgatacagcatggttatggccgtttaaggaaaccgtaaggaaatgtgctcgctcctgggtgaccgctttacagcttatggaacggaacccggagtttatcttcgcctgtagtcaagcacaacaactggagtgggtaaagagtcggtaccccggactgtacagccggattcaggaatttgcttgcagagggcagtttgtgccggtgggtggaacgtgggtcgagatggacggaaatcttcctagcggggaagctatggtgcgacaatttctccagggacagaactttttcctgcaggagttcgggaaaatgtgctccgagttctggctgccagacacgttcggctattccgctcagcttccccagatcatgcatgggtgcggcataagacgatttttaacccagaagctcagttggaatctggtaaactcattccctcaccatacgtttttctgggaaggcttggacggttcccgagtgctggtacatttccctcccggtgactcctatgggatgcagggtagcgtggaggaggtgctgaaaactgtggctaataatagggataagggaagggccaatcactccgcatttctgttcggctttggtgatggcggcggagggccgacacagactatgctcgatcgcctgaaaaggctctcaaatacggacggactgcctagagtgcagctgtcatcacccaggcagctatttagcgccctggagtccgactccgagcagctgtgtacatgggtgggagaactctttttggagttacacaatggcacatataccacccacgctcagataaaaaagggaaaccgcgaatgtgagcgaatactgcacgatgtggaacttctgtctagcttagctttggcccggagcgcccagtttttgtatcccgcagcgcagcttcagcacctatggcgtctcctcctactaaatcagttccacgacgtcgtgactgggagttgcatccagatggtggccgaggaggcaatgtgtcactacgaggacattcgctctcacggcaatactctgctgtctgctgccgccgctgccctgtgtgcaggagaaccgggccctgaagggttgctgatagttaacacactgccctggaagcgtatcgaggtgatggccttaccaaagccaggtggggcacattcactgggcctgacacctagtcccggggactccgcccagcacggcttatgctcctgcagctcccctcacctcaccgcggccccggccgctccagctgcttgtgttcgtagcgctcgagcgccgaccgattccgcgtcccggccgccccccaccaaaactgacggctcagtcacactcgacaacggaatcattagagtgaagttggaccccacaggccggctaacgagccttgtactggttgcctcgggaagggaggcaatcgcagaaggagccgtcgggaaccagttcgtgctatttgatgatgtgccactctactgggatgcatgggacgtgatggattatcacctggagacccgcaagcccgtgctgggccaggcaggcaccttggccgtgggcacagaaggggggttacgggggtccgcttggtttctccttcagatctcacccaattcacggctgtctcaggaggtagtcctcgatgtgggatgcccttacgtgaggtttcataccgaggtgcactggcacgaagcccacaaattcctcaaggtagagtttccagcccgcgtgcgtagcagccaggccacatacgaaattcagtttggccatctgcagagaccaacacactacaacacgagttgggattgggccaggttcgaggtgtgggctcatcggtggatggacctcagtgaacacgggtttggcctggccctacttaacgattgtaaatacggagcatcagtgaggggcagtatactgtctttgtccctgttgcgtgcccctaaagcaccggacgcaactgccgatactggcagacacgaattcacctacgcattaatgccacacaaggggtccttccaggatgctggggttatccaggcggcttacagcctcaatttcccactgctggctttacctgctccatctcccgcgcctgccaccagctggagcgccttttctgtgtcttcgccggccgtagtcctcgagacagtgaagcaggctgagagtagtcctcaacggcggtccttggtgctgagattatacgaagcccacggcagccacgttgactgctggctgcacctttccctcccagtgcaggaggcaatattatgcgacctgttggagaggccagatcctgccggccacctcaccttgcgcgacaatagattgaagctgaccttcagtccattccaggtgttgagcctgcttcttgtgctgcagcccccaccccactag

SEQ ID NO: 123327 - DNA, 3054 bp, synthetic construct
  misc_feature 1..3054: note = Description of Artificial Sequence: Synthetic coding sequence
  source 1..3054: mol_type = other DNA
atggctgcagcccccgcgctgaaacattggagaactaccctcgagagagttgaaaagtttgtttctcccctgtacttcaccgactgtaacctgaggggccgtctcttcggggcaagttgtcccgtggccgtcctgagctcctttctcacacctgagcgactgccgtaccaggaggcagtccaaagggactttcggcctgctcaggtaggtgattccttcgggccaacatggtggacttgctggtttagagtggaactgaccatccctgaagcctgggttgggcaggaagtccatttgtgctgggaaagcgacggcgaagggctcgtgtggcgggatggagaacctgtgcagggtctgactaaggagggcgagaagactagctatgtattaaccgacagattaggagagcgcgatcctagaagcctgactctctatgtggaggttgcgtgtaacgggctgctgggggccgggaagggcagcatgattgccgcgcctgacccagagaaaatgtttcagctttccagagccgaattagccgtgtttcatcgcgacgtgcacatgctgctggttgacctagagctgctattgggtatcgctaagggtctggggaaggacaatcaaagatctttccaagcactgtacactgctaatcagatggtgaacgtgtgcgatcctgcccagccagaaaccttcccagtggctcaggcacttgccagccggttctttggccagcacggcggcgagagccagcataccattcacgctacgggccactgccacatcgacacagcgtggttatggccctttaaagagacggtccgcaaatgcgctcggagctgggtaaccgccctgcaattaatggagaggaaccctgaattcatctttgcctgtagccaggctcagcagctggagtgggtgaaaagtagatatcctggactgtactcacggattcaggaattcgcatgccggggtcagtttgttcccgtcggagggacttgggtggagatggacgggaatctgccaagtggcgaggccatggtgcgacaatttctccagggccagaatttttttctgcaggagtttggtaaaatgtgttctgaattctggttgccggatacttttggctatagtgctcagctgccccagattatgcatggctgcgggataaggaggtttcttacacagaagctgtcctggaacctggtcaactctttccctcaccacactttcttttgggaaggtctggatggctcaagggtactcgtccactttcctcctggggattcctacggaatgcagggctccgtcgaagaagtcctgaagacggtagcgaataaccgggacaaaggccgggctaatcactccgcatttctgtttggctttggcgatgggggcggcgggcctacgcagaccatgctggatcggctgaaacggctgagtaataccgatggcctgccccgggtacaactgtcttcacccagacagctattcagcgcgctggagtctgactctgagcagctgtgcacatgggtgggtgaattgtttctcgagcttcacaatggcacttatactactcacgcacaaattaagaagggcaacagagagtgtgagcggatcctgcacgacgtagaactgctttcgtccttagcattggctagatctgctcaatttctatatccagccgctcagctacagcacctatggcggcttctgttactgaaccagttccacgatgtggtgacgggctcatgtatacagatggtcgctgaggaggccatgtgtcattacgaagacattagatctcatggcaacacactcctcagtgcggccgctgccgcactctgtgcgggagagcctggacccgaaggactgctgatcgtcaatacactgccttggaaacggattgaggtcatggctctgcccaaacccggaggtgcccacagcctcgccttggtgacagtcccctccatgggttacgcgcccgtcccaccaccgaccagcttgcaacctctgctcccccagcagcccgtcttcgtcgtacaagaaactgatggctccgtgactctggacaacggtatcataagggttaagctagatcctacggggcgtctaacgtcactagtgcttgtggcctcaggccgtgaagccatagccgaaggagctgtggggaaccagttcgtgctcttcgatgacgtgccgttgtattgggatgcgtgggacgtgatggattaccacctggagactaggaagcctgtgctggggcaggccgggactctagctgttggaaccgagggcggtctcagaggatcagcctggttcctgctccagataagtccaaactcacgcctgagccaagaggtcgttctcgacgtggggtgtccatacgtgaggttccacaccgaggtccattggcatgaggcacacaagtttctgaaagtagaattccccgccagagtgcgatccagtcaggccacgtatgaaatccagttcggtcatctgcaaagaccaacccactataatacctcttgggactgggctcgttttgaagtgtgggcccaccggtggatggacctttctgaacacggcttcggcctagccctgctgaatgactgcaagtatggggctagcgtccgcggctccatactgtcgttaagcctattgcgtgcccctaaagcccccgatgccacagctgataccggacgacacgagtttacttacgccctgatgcctcacaaagccccttcacccgcaccagcgacctcatggtccgcttttagtgtttcaagcccggccgtcgttctggagacagtcaagcaagcagaatccagccctcagcggcgctcattagtgttacggctttacgaggcccatgggagccacgtggattgttggctgcacctctcccttccggtgcaggaggctatactgtgtgaccttcttgagagaccagaccccgccgggcacctgacacttagggataatcgcctgaaactcaccttctccccctttcaggtgctgagtctgctgctcgtgctccaacccccaccccactag

SEQ ID NO: 123328 - DNA, 1104 bp, synthetic construct
  misc_feature 1..1104: note = Description of Artificial Sequence: Synthetic coding sequence
  source 1..1104: mol_type = other DNA
atgcctgtgggaggtctgctgcctctgtttagttctcccgcgggtggagtattgggcggtgggctgggagggggcgggggaaggaaaggtagtggcccagcggcattgcgcctgactgaaaagttcgtgctcttgctggtgttctccgcgtttattacactctgttttggcgcaatcttctttttgcccgacagcagtaaattactgtcaggcgtgctgttccacagtagtcctgcactccagccggctgccgaccacaagcccggccctggggcccgcgcggaggacgctgcggaggggcgggctaggagaagggaagagggagcccccggtgaccccgaagccgccttggaggacaacttagcccgcattagggagaaccacgagcgcgcacttagagaggcgaaggagactctccagaaacttcccgaggaaattcagcgggacatcctgttggagaaaaagaaggtggcccaggatcaactccgtgataaagctccattcagagggctcccacccgtagatttcgttccccccatcggcgtcgaatcgcgcgagcccgccgacgccgcgatccgggaaaaacgagccaaaatcaaagaagaaattgaggctagaaagggacaggccaactgtcctggatccagctcatcttgcgaggttgaaatccagatgatgaagcacgcatggaacaactataaagggtatgcctggggcctgaatgaattaaagccaatctctaaaggcggacatagcagtagcctgttcgggaacatcaaaggagctacaatcgtcgacgcactggatacactgttcatcatggagatgaagcacgagttcgaggaggcaaagtcatgggtggaagaaaaccttgattttaatgttaacgcggagatatctgtatttgaggttaacatacggtttgtgggaggtctgctcagcgcctattaccttagcggggaagagatctttaggaagaaagcggtcgaattgggggtgaaactcctgcccgcattccatacgccaagcggcatcccttgggcccttctgaacatgaagcgttggatgtgcaacattccccgggccatggaagccaccatctag

SEQ ID NO: 123329 - DNA, 1962 bp, synthetic construct
  misc_feature 1..1962: note = Description of Artificial Sequence: Synthetic coding sequence
  source 1..1962: mol_type = other DNA
atgcctgtaggtggcctcctacccctgttctcctcacccgcggggggcgtcttgggcgggggcctgggggggggcggtggacggaaaggcagtggccctgcagccctccggctgacagaaaagtttgtgcttcttctggtattttcggcatttatcactctgtgtttcggcgcaatcttcttcctccctgacagctcgaaactcctgagcggagttttgttccattcaagtcccgccttacaacccgctgccgatcataagcctggccctggggcccgggccgaagacgccgctgaaggaagggcgcgacggagggaggagggggccccgggagacccggaggcagctttagaggacaatctggcgcgtatcagggaaaaccatgaaagagcattacgcgaggccaaggaaaccttgcaaaaactgccagaggaaattcagcgcgatatcttgcttgagaagaaaaaggttgcccaggaccaactccgggacaaggcaccctttagaggactgcctcctgttgactttgtgccgccaataggggttgaatccagagaaccggctgatgctgccatacgggaaaagcgcgctaagatcaaggagatgatgaaacacgcctggaataattataaggggtatgcctggggactgaatgaactcaagcctatatccaaaggaggccatagttcttcgctgttcggtaatatcaaaggcgccacgatcgtcgatgcgctggatacactattcatcatggaaatgaaacacgagtttgaagaggccaagtcgtgggtggaagagaatctggattttaatgtgaacgccgaaatcagtgtgttcgaagttaacatccgctttgtaggcggcctcctgtctgcatattatctgtctggggaggaaatctttaggaagaaggccgttgagctcggtgtcaagttattgccggcgttccataccccctcagggattccctgggccctattgaacatgaagtcaggaatagggcgcaactggccttgggctagcggaggaagtagcattcttgcggagttcggcactcttcacctggaatttatgcatctctcacacctgagcggaaatcccattttcgcagagaaagttatgaacatcaggaccgtcttaaacaaactcgaaaaaccccaaggactctaccccaactaccttaatccttcttcagggcagtggggccagcatcacgtgtcagtgggtggcctcggagatagtttctatgagtacctcctgaaggcatggctgatgagcgacaagaccgacttggaagcaaaaaaaatgtattttgacgcagttcaagccattgagactcaccttatccgcaagtcgagcagtggactcacgtacatcgccgagtggaaaggaggactcttagaacacaaaatggggcaccttacatgtttcgccggtgggatgttcgcactgggtgcggacgctgctccagaaggtatggcccaacattacttggagttgggcgctgagatagcccggacatgtcatgaaagttacaacaggacattcatgaagctcggcccagaagctttcaggttcgacggtggcgtagaagcgatcgctactcgccaaaacgaaaaatactatatcttaagacctgaagtgatggaaacgtacatgtatatgtggcgattgacacatgatccaaagtaccgcaagtgggcatgggaagctgtggaagcactggagaatcactgtcgcgtcaacgggggatactccggccttcgggacgtataccttttgcacgaaagttatgacgacgttcagcagtcatttttcttagcagagactctgaaatatttgtacttgatcttcagcgacgacgatttgctccccctcgagcattggatatttaattcagaagcacacctgctgcccatactgccgaaagacaagaaggaggtagaaattagagaggagtag

SEQ ID NO: 123330 - DNA, 579 bp, synthetic construct
  misc_feature 1..579: note = Description of Artificial Sequence: Synthetic coding sequence
  source 1..579: mol_type = other DNA
atgttcgctctgggggcagatggatctagagctgacaaggcaggtcattatctggagctgggtgccgaaatcgcccgaacttgtcacgagtcttacgatagaacagcactcaagctggggccagaaagtttcaagtttgacggcgctgtcgaggcagtggccgttagacaagcggaaaagtactacatactgcggccggaggtcattgaaacctactggtatctgtggcgatttacacatgatcccagataccgtcagtgggggtgggaggccgccttggcaatagagaagtattgtcgtgtgaacggtgggttcagcggcgtcaaagacgtctattcatcaacgcccacccatgatgacgtgcaacaaagtttctttttggctgaaactcttaagtacctttacctactattttctggcgatgatctgttgcctctcgaccactgggtgtttaacactgaagcccatccgctgcccgtgctgcatttggccaacaccacacttagtggcacgtctcaaggcatgagaagacagaatccatacttccaggtgttgtacctgtattatcctgacgactag

SEQ ID NO: 123331 - DNA, 1926 bp, synthetic construct
  misc_feature 1..1926: note = Description of Artificial Sequence: Synthetic coding sequence
  source 1..1926: mol_type = other DNA
atgacaaccccagcactgctcccactaagtggtcgccggattccacccctgaatttgggtccaccctcgtttccccatcacagagcgacactcaggctttccgagaagttcatactgttacttatactcagtgctttcatcactctgtgctttggcgccttctttttcttgcccgacagctcaaagcacaaaaggtttgacctcgggctggaggatgtgctcatcccgcatgtggacgccggaaaaggtgccaaaaacccaggcgtttttctcatccacggtcccgacgagcatcggcatcgcgaggaggaggagagacttagaaataagattagggcagaccatgagaaagcgttagaggaggccaaagaaaagctgcgcaagtcaagagaagagattagggcagagattcagactgagaagaataaagtggtgcaggagatgaaaattaaggaaaacaaacctctgccacccgtcccaatcccaaatttggttgggatccgggggggggaccccgaagacaatgacattcgcgagaagcgggaaaaaattaaagaaatgatgaaacacgcctgggataactatcgtacgtacggctggggtcacaatgaattaaggcccatcgctcggaaagggcactctcctaacatttttggctccagtcaaatgggagctactatagtagacgcacttgacacactctacataatgggtctgcacgatgagttcctggacggacaaaggtggatagaggataatcttgattttagtgtcaatagcgaggtttctgtgtttgaggttaatattcgattcatcgggggccttctggccgcttactacctctccggcgaagaaatttttaaaataaaggccgttcagctcgccgagaaactcctacccgctttcaatacccccactggcattccttgggcaatggtgaatctgaagtctggtgtgggaagaaactgggggtgggctagcgcagggagtagtattctcgcagagttcgggacactccatatggaatttatccacttgagctatctcaccggtgacctcacttactataaaaaagtcatgcatatcaggaagctgttgcaaaaaatggatcggcccaacggactctacccgaattatctaaacccccgaaccggaaggtggggtcagtaccacacaagtgtcggaggccttggtgattcattttatgagtacctgctcaaggcttggctgatgtccgacaaaaccgatcacgaggctagaaagatgtatgacgatgctattgaggctatcgagaaacatcttatcaagaagtctcggggtggccttacctttatcggtgaatggaaaaatgggcacctggagaagaaaatgggtcatctcgcctgttttgcaggcggtatgttcgcccttggcgccgacggatctcgggccgacaaagcagggcactacctcgagctgggtgcggaaatcgcgagaacatgccatgagtcctacgacagaacagccttgaagctcgggcctgaaagctttaagttcgacggggctgtggaggccgtggcagtgaggcaagctgagaagtactacatcctgagaccagaggtgatcgagacttattggtatctgtggcggttcacacacgatcccagatatagacagtgggggtgggaggcagcactggccattgaaaagtattgccgcgtaaacggtggtttctcgggcgtcaaggacgtctattcttctactccaacgcacgacgacgtacagcaatcattttttctcgccgagaccttgaaatatctgtacctactcttttctggcgatgatcttttgccacttgaccattgggtgttcaacaccgaagcacatcccctcccggttttgcatttggcgaacacaacattgtctggcaatcctgccgtgcggtag

SEQ ID NO: 123332 - DNA, 1128 bp, synthetic construct
  misc_feature 1..1128: note = Description of Artificial Sequence: Synthetic coding sequence
  source 1..1128: mol_type = other DNA
atgggcctccacgacgaatttttggacggacagagatggattgaagacaacctcgacttttctgtgaatagtgaagtgagcgttttcgaggtaaacatccgttttataggggggctcctggctgcgtattatctgtcaggagaagaaattttcaagatcaaggccgtacaactggccgagaagctgctgcctgcttttaacacaccaacaggaattccttgggccatggtcaacttgaagtccggtgtgggacggaactggggctgggcgtcagcagggagttctatcctcgctgaattcggcaccctgcatatggaattcatccaccttagctacctgaccggagatctcacatattacaagaaggttatgcacatacggaaactattgcagaaaatggaccgccctaacggcttatatccaaactatctgaatccacggaccggacgatggggccaatatcacacgtcagtcggtggactgggggattcattctacgagtaccttctgaaagcttggctgatgtccgacaagaccgatcatgaggctagaaagatgtacgacgatgctatcgaggctatagagaagcatctgattaagaagagtagagggggcttgacgttcatcggggagtggaagaatggccacttagaaaagaaaatggggcacctagcatgctttgcaggtgggatgttcgctctaggtgccgacggaagcagagctgacaaagccggccactatctagagctcggcgctgagattgccaggacatgccatgagagttatgaccgcacagccctcaaattgggcccagagtctttcaagttcgacggggccgttgaagcagtcgcagttcggcaggcagagaagtactacatcctccggcctgaagtaatcgagacatattggtacctgtggcggttcacacatgaccccagatacagacaatggggttgggaggccgcgttggccattgagaagtattgccgtgtgaacggcggcttttcaggcgtgaaggacgtctacagctcaacacctacccacgatgacgtgcaacaatccttttttctggcagaaaccttgaagctagcgagctaccacgaacgaactgtgtttccggccgggtag

SEQ ID NO: 123333 - DNA, 615 bp, synthetic construct
  misc_feature 1..615: note = Description of Artificial Sequence: Synthetic coding sequence
  source 1..615: mol_type = other DNA
tgaattaaaaagagtagaggcggtttaacttttattggcgagtggaagaacggccacctggaaaagaagatgggacacctcgcgtgtttcgccggcggcatgttcgctttaggggcagatggcagccgtgccgacaaagccgggcattatctggagcttggggccgagatcgctcggacttgtcacgagagctacgaccgtacggcccttaaactcgggccagaatcctttaagtttgatggagccgttgaagcagtcgccgttaggcaagctgaaaagtactacatactcagaccagaagtgattgaaacttactggtacctctggcggtttacacacgaccccaggtacaggcagtggggatgggaggcagcacttgccattgagaagtattgtagagtcaacggcggcttttcaggggtaaaagacgtctatagctccaccccaacccacgacgacgtgcagcagagcttttttctggccgaaaccctgaagtatttgtatcttctgttctctggagatgacctgctgccattggatcactgggtgttcaacacagaagctcaccctttgcctgtgctgcaccttgccaacaccaccctgagcgaatcttag

SEQ ID NO: 123334 - DNA, 294 bp, synthetic construct
  misc_feature 1..294: note = Description of Artificial Sequence: Synthetic coding sequence
  source 1..294: mol_type = other DNA
gagaaatactgtcgggtcaatggcggattcagcggcgtgaaggatgtttactctagtaccccaacccacgacgacgtccaacagtctttcttccttgccgagaccctgaagtacctctatctgctgttttctggggatgacctgctcccgctcgatcactgggtattcaacacggaagcccacccattgcccgtgttgcacctggccaatacaaccctgtctgggacgtcccaggggatgaggcgccaaaatccatacttccaagtgctgtacctctattaccccgacgattag

SEQ ID NO: 123335 - DNA, 1035 bp, synthetic construct
  misc_feature 1..1035: note = Description of Artificial Sequence: Synthetic coding sequence
  source 1..1035: mol_type = other DNA
taaatcagattcatcggcggccttctcgccgcctattacctgtccggcgaggagatctttaagattaaggctgtgcaactcgcagagaagcttctgcccgccttcaatacacccactggcatcccatgggccatggtgaatctgaagagtggggtcgggagaaactggggttgggccagcgccgggagctctatcttagcggagtttggaaccctgcacatggagtttatacacctgtcctacctgactggagacttaacctattataagaaggttatgcacattcgcaaacttctgcaaaagatggacagacctaatggcctgtacccaaactacctgaatcctaggactggtcgttggggtcaataccatacctcagttggcggtctcggcgattcattttatgagtatcttcttaaggcttggctgatgtctgataagactgatcacgaggccagaaaaatgtacgatgacgcaattgaggcaatcgagaagcacttaattaagaaatccagagggggcttaacctttattggggaatggaaaaatggtcacttagaaaaaaaaatggggcacctggcgtgtttcgccggcgggatgtttgccctgggagcggacggatctagggcagacaaggcaggccactatttagaacttggtgccgagattgcaagaacctgccatgagagttacgaccggactgctttgaagcttggaccagaatcgttcaaatttgatggggctgtcgaggcagtggctgtacgtcaggccgaaaagtactacatcctgcgccctgaggtaatcgaaacttactggtatctctggcgattcacccacgacccacgctacaggcagtggggctgggaggccgctctggccatcgaaaagtactgcagagtcaacggaggcttctcgggcgtcaaagacgtctacagcagtactcctacccacgatgatgtgcagcagagcttcttcctggctgaaactctgaaattagcaagctatcatgagaggacagtcttcccagcagggtag

SEQ ID NO: 123336 - DNA, 2100 bp, synthetic construct
  misc_feature 1..2100: note = Description of Artificial Sequence: Synthetic coding sequence
  source 1..2100: mol_type = other DNA
atggcagcttgcgaaggccgccgatctggcgctctaggctccagtcagtccgatttccttacacccccagttgggggtgcgccttgggcagtggctacaaccgttgtgatgtacccacctcctcctcctccccctcaccgggattttatctctgtcaccctgtcctttggcgagaactatgacaattccaagagctggcggagacgcagctgttggcgcaagtggaaacagttgtccaggctacaaaggaacatgattttgtttctgctggccttcctgctgttttgtgggctgttgttctacatcaacttagctgaccactggaaggcgctggctttccgattggaggaggaacagaagatgcgacccgagatagccggcctcaagcccgcgaatcctccggtgctccctgctccacagaaagccgatacggacccggagaacttacccgagatatcctcacaaaagacccagcgacacatccagcgcggacccccacatctgcaaattagacccccttctcaagatctgaaggatggcacccaggaggaggctactaagcgtcaagaggcgcctgttgaccctcgaccagaaggcgatccacagaggaccgtgatctcgtggcgcggggcggtaatcgaacccgagcaagggaccgaattgccctctcgccgcgctgaagtgcccaccaagcctcctctcccccctgcccgaacgcagggaacacctgtccacttgaactaccgccaaaaaggggtgattgacgtgttcctccatgcctggaaaggctaccgcaagtttgcatggggccacgacgagctcaaacctgtctctcggtcattttctgagtggttcgggttgggacttaccttaatcgacgcactagatactatgtggatcctgggactgcgcaaggaatttgaggaagcgaggaaatgggtgagtaaaaagcttcactttgagaaggatgttgatgttaacctattcgagtccaccatcaggatccttggcggactgttaagcgcctatcacctgtccggggattctttattccttcgtaaggccgaggactttggcaatcgcttaatgccagcgttcaggactccctcaaagatcccttatagtgatgtcaacatcgggacaggcgtcgcacaccccccacgttggacctctgactcaaccgttgctgaggtgacttccatccagttggaatttagagagttgagccgcctgaccggggacaaaaagtttcaggaagccgtggagaaggtcacacagcatatccatggtctgtctggaaagaaagacgggctggtcccaatgtttataaatacacattcaggactgtttacccatctgggagtgttcactttaggagctagggccgactcctactatgaatatctgcttaaacaatggattcagggcgggaagcaggagactcaactgttggaggattatgttgaggcaattgagggcgttcgcacccacttgctgagacacagcgagccatctaagctaactttcgtaggagaactggctcacgggcggttttccgccaaaatggaccacctcgtttgtttcctgcctggcacccttgcgctcggtgtgtaccacggactgcctgcctcccacatggaactggcacaagagctaatggaaacctgctatcagatgaaccggcagatggaaaccggcctttctcctgaaatcgtacatttcaacctttacccacagcctggtcgcagagatgtggaagtgaagccggcggaccgacataatcttttacgtccagaaaccgtggaatccctgttctacctgtacagagtaacaggagaccggaagtatcaggactggggatgggagattctccagagtttctcgagattcacgcgggtaccaagcggagggtattcctccattaacaacgtacaggatccccagaaaccggaaccaagagacaaaatggaaagtttcttcctgggtgaaacccttaaatatttgtttctgctgttctcggacgatcctaacttactttcgctggacgcatatgtgtttaacaccgaagcgcacccactgcctatttggactcctgcctag

SEQ ID NO: 123337 - DNA, 1209 bp, synthetic construct
  misc_feature 1..1209: note = Description of Artificial Sequence: Synthetic coding sequence
  source 1..1209: mol_type = other DNA
atgtggattctggggctacggaaggaattcgaggaggccagaaagtgggtctccaagaagctccatttcgaaaaagacgtagacgtgaacctatttgagagcacaatacggatacttggcggcctcttgtccgcttatcatctctcaggggacagccttttcttacgcaaagctgaagatttcggtaatcggttaatgcccgccttcaggaccccctccaagatcccatactcagatgttaatattgggacaggcgtcgcacacccgccccgctggactagtgatagcacagtagcagaggtaacttccatccagctggagtttagggagctctcacgccttaccggggacaagaaattccaggaggctgtggagaaagtaacacagcacatccacggtttgtcaggcaaaaaggatggtctggtccccatgttcataaatactcactcgggcctctttacacacttgggagtttttaccttaggagcaagggccgactcttactatgaatacttgctcaagcagtggatccaagggggcaaacaggaaacccagctgctagaagactacgtagaggcgattgagggggtacggacacacctgctgaggcatagtgaacccagtaagctcaccttcgttggcgaattggcgcatggccgtttttcagccaagatggatcacctggtgtgttttctgccaggaactcttgcactgggtgtgtatcacgggctgccggccagtcacatggagctggcccaggagctgatggaaacctgttatcagatgaatagacaaatggaaaccggcctgagtccagaaatcgtgcactttaatctgtacccacagccaggccggagagatgtggaagttaaacccgccgacagacataacttactgcgccccgagacagtggagagcctgttctacctgtaccgcgtgactggtgatagaaagtatcaggactggggttgggagatacttcagtccttctctaggtttacacgggtgccttccggcggctactcgtccatcaacaacgttcaggatccccagaagcccgagccacgagataagatggagtctttctttttgggagagacattaaagtatctgtttttactgttctccgatgaccccaacctcctatccttggacgcatatgtgtttaataccgaggcacaccctctgcctatttggacaccggcgtag

SEQ ID NO: 123338 - DNA, 2118 bp, synthetic construct
  misc_feature 1..2118: note = Description of Artificial Sequence: Synthetic coding sequence
  source 1..2118: mol_type = other DNA
tgaccatgggcagttgcgacaactgtcgtaatgtatccacctccccctcctccacctcatcgggacttcatctccgtaacccttagcttcggagaaaattacgacaacagtaaaagttggaggagacggagctgttggcgaaaatggaagcagctaagcaggctgcagaggaacatgatcttgtttctgctggctttcctgttattttgtgggttactgttttatataaatctcgctgaccattggaaggccctggcgttccgtctcgaggaggagcaaaaaatgaggcccgaaattgccgggttgaagcctgctaatccacctgttttgccagcgccacagaaggccgacaccgaccccgaaaatctccctgaaatctcctcgcaaaaaacccagagacatattcaacgagggccaccacaccttcagattaggcccccaagccaggaccttaaggacggcacacaagaggaagctaccaagagacaggaagcgcctgtcgacccaagacctgaaggagatccacagcgcacagtgatttcttggaggggtgcagtcatcgaacctgaacaaggaacggaactcccctccaggcgcgctgaggtgcccaccaaacctccccttcccccagcccgaacccagggaacccctgtgcacctgaattataggcagaagggagtgatcgacgtcttcctccatgcatggaaaggctaccgtaaatttgcttggggccacgatgagctgaagcccgtgtccagaagctttagtgagtggttcggattgggactgactcttatcgatgcacttgacaccatgtggatcttgggcctgcggaaagagttcgaggaagcccgcaagtgggtgtcaaagaagcttcactttgagaaggatgtagacgtgaacctgttcgagtctaccattcggatacttggcggactgctgtctgcttatcatctgtccggagactcgctattcctgcggaaagctgaagatttcggaaatagactgatgcccgctttccgcaccccaagtaaaatcccctattcagacgttaacattggcacaggagtggcccacccgccaaggtggacaagcgattcaactgtggcagaagtgacgtctatacaattggaattcagggagctatcgcgactgacgggcgataagaaattccaggaagcggttgagaaagttacccagcacatccatggactgagtggtaagaaggacgggctggtgcctatgttcatcaacactcactctggactgttcacacacttgggagtgttcaccctgggcgcacgtgccgactcgtattacgaatatctcctcaaacaatggatccagggggggaaacaggaaacacagctccttgaagactacgttgaggccattgagggcgtgagaacccatctgttgcggcacagcgaaccctccaagcttacttttgtcggcgaattggcccacggcagattcagcgccaaaatggatcatttggtttgcttcctgcctggaacacttgccctaggagtgtaccacggcttacctgcatcccacatggagctagcccaggagttaatggagacgtgttaccagatgaatcgtcagatggaaacgggattgtcaccagaaatagtgcatttcaatctgtacccgcagcctggacggcgagatgtagaggttaagccagctgataggcacaacttgttacgtcccgaaacagtggaaagcttattctacctgtatagagtgactggagatcgaaaatatcaggattgggggtgggaaatcctgcagtccttctccagatttacccgggtgagtacatgcccccggccagcatggtccagaccaccagggcatagacacggatgggccgtcgggctcaggctggctcccctgttggtggtggcggtaacctggattagagagggtagagcctgtcgctctctgggcgttgccaccctccagctggggggtcccggaatcccgataccgacggagctccacggttgcgggacacagagcacctggcgtgggtgggcgccgctcatatttatctcgcagggccttagcagggagggtctttgttgtggcccctccatccccccagtgtag

SEQ ID NO: 123339 - DNA, 3435 bp, synthetic construct
  misc_feature 1..3435: note = Description of Artificial Sequence: Synthetic coding sequence
  source 1..3435: mol_type = other DNA
atgaaacttagtaggcagttcaccgtgttcggaagcgcgatcttctgtgtggtgatcttctccttatacctcatgttggacagaggccacctggattatcccagaaacccgcgccgcgaagggagttttccgcagggccagttgtctatgctgcaggagaagattgatcatttggagaggctcctcgccgagaacaatgagatcatcagcaatataagggattccgtgatcaatctgtcagaatcagtggaggatgggcccaagtcaagccaaagcaacttctcccagggcgccggcagtcacctcttgccttcccaactatctttatcagttgataccgcggattgcctttttgcaagccaaagtggctcacataacagtgacgttcaaatgttagacgtttacagtctgatatcatttgacaaccccgatggcggcgtgtggaagcaggggttcgacattacttacgagagcaatgagtgggataccgaaccattgcaggtgtttgtcgtgcctcattctcacaacgaccccggatggctgaagacatttaacgattatttcagagacaagacacaatacatcttcaacaacatggtgctgaagctgaaagaagattcaagaagaaagtttatttggtccgagatttcttacctctccaagtggtgggatattatagacatccagaagaaggatgctgtgaagtccttgatagagaacgggcagctcgagatcgtcacaggcggttgggtcatgccagacgaagccacccctcattactttgctctgatagaccagctcatcgagggtcaccaatggctcgagaacaacataggtgtcaagccccgaagtggttgggctattgacccatttggtcacagtcccacaatggcatatctactaaatagagcaggcttaagccacatgctcatacagagagtgcattatgccgtgaaaaaacacttcgccctgcacaagaccttggagttcttttggcggcagaattgggacctgggcagcgtaactgatatactgtgtcacatgatgcccttctatagctatgatatcccccacacgtgtggacccgatcccaaaatttgttgtcagtttgacttcaagcgcctgcccggcggccgcttcggttgcccatggggcgtgccaccagaaaccatccatcctggcaacgtacaaagccgggccaggatgctgctcgaccaatatcggaagaagtctaagctatttcggactaaggtactgctcgctccgctgggggacgacttccgttactgtgagtacactgagtgggacttgcagtttaaaaattatcaacagctctttgattacatgaattcccagtcgaagttcaaggtgaaaatccagttcgggactttgagtgatttctttgacgccctcgacaaggcagatgagacccagcgcgataagggccagagcatgttcccagtactcagtggggactttttcacttatgctgacagagacgaccattactggagcggttatttcacttcacgccctttttataaacgtatggatcggataatggagtctcatctgcgcgctgctgagatcttatattacttcgccctccgtcaggcccacaagtacaagattaacaagtttctctcaagctctctgtacaccgctctgacggaagctcggaggaatttaggtctattccagcatcatgatgctatcactggaacagcaaaggactgggtggtggtcgattacgggacgcggctttttcacagtctgatggttctcgaaaaaatcattgggaacagcgccttcctcctgatactgaaggacaagttgacttatgacagctacagtcccgatacttttctggagatggacttgaagcagaaaagtcaagacagcttgccacaaaaaaacattattaggctatctgctgagccacggtacctggttgtgtataacccactggagcaggatcgtattagcctggttagcgtctacgtgtcttccccaaccgttcaggtcttctctgcttccgggaagcctgtcgaggtgcaggttagcgctgtgtgggacaccgcaaataccatctccgagacggcctacgagatctccttcagggcacacatccccccactaggcctgaaggtgtataaaattttggagagtgcaagctcaaacagccacctcgctgactatgttctctacaagaataaggttgaagacagtggcatattcaccattaagaacatgataaatacagaagagggcattacgctagaaaattccttcgtgctcctgagattcgatcagaccggactgatgaaacagatgatgacgaaagaagatggcaagcaccatgaagtcaacgtccagttcagttggtatgggacgacaataaaaagggataaatctggggcctatctgttcttgccggacggaaacgcgaagccatacgtgtataccacgccaccatttgtgagagtaacgcatggtcgcatttattcagaggtcacatgcttctttgaccatgtgacgcacagagttagactctatcatatccagggaatagaagggcagagcgtagaggttagcaatatcgtcgatattcggaaagtgtataaccgcgaaatcgctatgaagatttctagcgacatcaaaagccagaacagattctatacagatctaaatgggtaccagatccaaccgcgaatgactctgagtaagttaccgcttcaggcaaacgtgtacccaatgactacgatggcctatatccaggatgccaaacatcgactcaccctgttatcggcgcagtccctaggagtttccagcctcaactcaggacagatagaggttatcatggaccgaagactcatgcaggacgacaaccgagggctggaacagggtatccaggacaacaagattactgcgaatttgtttcgaatcttgcttgagaaacggagtgctgttaataccgaggaggagaagaaatccgtgtcctacccttcccttcttagtcacattacttctagcctgatgaatcacccggttatacccatggcaaacaaattcagtagccccacgctggagctccagggcgaattctcaccactgcaatctagcttgccctgtgacatccaccttgtgaaccttagaacaattcagagcaaggtgggtaatggtcattcaaacgaagccgcactgattctgcacaggaaggggttcgactgtcggttttcgtctaaaggcaccggcctgttttgtagtacgactcaaggaaaaatcttggtgcaaaaacttcttaacaaattcattgtcgagtccctgacacctagctctctctcgctgatgcatagccccccagggacacagaacatcagtgagatcaatttgagtcccatggagatctcaaccttccgcatccaactccggtag

SEQ ID NO: 123340 - DNA, 3453 bp, synthetic construct
  misc_feature 1..3453: note = Description of Artificial Sequence: Synthetic coding sequence
  source 1..3453: mol_type = other DNA
atgaaactgaaaaaacaggtgactgtgtgtggcgcggccattttttgcgtcgccgtgttctcattgtatctgatgctggacagagtccagcacgatcccacacgccatcagaacggaggtaactttcccagaagccagatcagcgtgctgcaaaacaggatcgagcagctggaacaactcctagaagagaaccacgagatcattagtcatattaaggacagcgtcctcgagttgaccgctaacgcagaaggacccccggccatgctaccgtattacaccgtgaacgggagctgggtcgtccctccagagccacgaccaagctttttctcgatctccccacaggattgccaatttgcattaggcggacgcggccagaagcccgaactgcagatgctgaccgttagcgaagagctgccctttgacaatgtggatgggggggtttggagacaaggttttgatatatcatatgacccccacgactgggacgcagaggatctacaagttttcgtggtccctcactcccataacgaccctggctggatcaagacctttgacaaatattataccgagcaaacccagcatatcctgaacagcatggtgtccaagctgcaagaagatcccaggcgtcgcttcctctgggcagaggtaagttttttcgccaaatggtgggacaatatcaacgtgcagaagagagctgcggtaagaagactagtcggaaatggccagctggagatcgccacgggggggtgggtgatgcccgacgaagcaaactcacactatttcgctctcatagaccagttaatcgaaggccaccagtggctggagagaaacttaggagcgacacctaggtctggctgggccgtggacccctttggctattcaagcacaatgccctatttgttgcggagagctaacctgacgtcaatgctgatccagagggtccactatgcaatcaagaagcatttcgccgctacacacagcctggagttcatgtggcgccagacgtgggacagcgatagtagcaccgacattttctgtcatatgatgccgttctactcttacgacgtcccccacacatgtggccctgatcccaagatttgctgtcagttcgatttcaagagattgccaggcggtcgcatcaattgtccatggaaagtcccaccaagggccatcactgaagctaacgtagctgagagggccgctctgttgcttgatcagtataggaaaaagtcacagctctttcgcagtaatgttctgctggtacccctcggggatgactttcgctacgacaagccacaagagtgggacgcccaattcttcaattatcaaagacttttcgacttttttaattctcgccccaacctgcacgtccaggcacaatttggaactttgtccgactactttgatgcactttataagcgcacaggggtggagcccggggcgcggccccctgggtttccagtgttgtccggcgacttcttttcatatgccgatagggaagatcactattggacaggatactatacaagcagaccattttacaagtccctagatcgggtgctcgaggctcatttaagaggtgccgaagtactctattctctcgccgcggctcacgcaaggagaagcggtttggcaggccggtaccctctctccgacttcaccctgctcaccgaggccaggcggacactgggcctgttccaacaccatgacgccatcaccggaacagccaaagaagctgttgtggtggattatggagtccgcctccttaggagcctggttaatctaaagcaggtcattattcacgccgcccactacctggtcttaggagacaaggagacttatcactttgacccagaagcccctttcctccaagtcgacgatacacgcctctctcacgacgccctcccagaacgaacggttattcagctggacagtagcccaagatttgtcgttttattcaacccattggagcaggagcgcttctccatggtaagcctgctggtcaactctccaagggtgagggtgctcagtgaggaaggtcagcccctggctgtccagatttctgcccattggagcagcgctaccgaggcagtcccagacgtttaccaggttagcgtgccagtgcgactccctgctttaggccttggggtccttcaacttcagctcggactcgacggtcacagaacactaccctcatcagtccgtatttacctccatggccgccaactctctgtgagccgccacgaggcatttccactcagggtgattgatagcggcacctctgactttgccttatcaaatcgctacatgcaggtctggttctccggtcttactggattgctgaagtctattcgacgtgtggacgaggagcacgagcaacaagtcgacatgcaagtcctcgtgtatggcacgcggacctcgaaagacaaatctggggcctatttgttcctcccagacggcgaagcaaagccctatgtccctaaggagccccctgtccttcgagtgacagaaggacccttttttagcgaggtggtggcttattatgaacatattcaccaggccgtgagactctataacctgccaggtgttgaagggctctcactcgacatttcttctctagtggatattagagattacgtgaataaggagctggccctgcacatccacactgatatcgatagtcagggcattttcttcaccgatttgaacgggttccaggtccagccaaggcggtacctgaagaagctgcctctacaggcaaacttttatcccatgccagtgatggcgtatattcaggacgcacagaagcgactgacgctgcataccgcccaagccctcggagtcagtagcctgaaggacggccagctggaagttatcctggatagaagactcatgcaggacgataataggggcctcggccaaggacttaaagataataaaagaacctgcaatcgcttccggttgctgctggagcgccggaccgtgggctcagaggtgcaggactctcatagtaccagctaccctagcctgctgagtcacctaacatccatgtacttaaatgcgcccgctttggccctacctgtggcacgtatgcaactccccggacccgggttaaggtccttccacccgctcgcatcatcgttgccgtgcgattttcatctgctgaacctgcgcacacttcaagcagaagaagacacgctccccagtgctgagacagctttaatcttgcaccgcaaagggttcgactgcgggctggaggccaaaaatttgggcttcaattgtaccacctcccaagggaaagtcgctctgggttctctgtttcatggacttgacgtcgtgttcttgcagcctaccagcctgactttactgtatcccctggcgtcccccagcaatagcaccgatgtctatctggaacctatggaaattgcaacatttcgcctgaggctgggatag

SEQ ID NO: 123341 - DNA, 1023 bp, synthetic construct
  misc_feature 1..1023: note = Description of Artificial Sequence: Synthetic coding sequence
  source 1..1023: mol_type = other DNA
atgcaggtgtggttttctggactcaccggactcctcaagccttacgtgcccaaagaacctcccgtgttgcgcgtgaccgaggggccattcttctctgaagttgtcgcatactatgagcacatacatcaagcggtcagactttataacctgccaggagtcgaagggctctccctcgatatcagctccctcgtggacatcagagactatgtgaacaaagagttggccctccatatccataccgacattgatagccagggtattttcttcactgacctgaacgggttccaagtgcagccaaggcggtacctgaagaagttgcccctgcaggctaacttctaccctatgcctgtgatggcctacatccaggacgcccaaaagcgtttgacgctccatactgcccaggccctgggcgtgtcttcactcaaagatggccagttggaagtgatactcgaccgccgcttgatgcaggatgataatcggggcctgggccagggcctgaaggataacaaacggacatgcaaccggtttagattgcttttggaaaggcgcactgtggggagtgaggtccaggactcccactcaacgtcgtacccaagtctactgagtcaccttacttcaatgtacctaaacgccccagcactggccctccctgtcgcccgaatgcagttacccggcccagggctgcggtcattccatcccctggcctcttcactcccctgtgatttccatctgctcaatctccgaaccctgcaggccgaagaagacacgttgccttctgccgagacggctctgatattacataggaagggatttgattgcggtttggaagcaaaaaacctcggatttaactgtactacatcacagggaaaggttgccctcggatctctgttccacgggcttgacgtggtcttcctccagcccacctccctaaccctgctctacccgcttgccagtcctagcaactcaacggacgtgtatcttgaacctatggagatcgctacctttcggctcagactcggctag

SEQ ID NO: 123342 - DNA, 1977 bp, synthetic construct
  misc_feature 1..1977: note = Description of Artificial Sequence: Synthetic coding sequence
  source 1..1977: mol_type = other DNA
atgacctccgacatgacaagccctagatcgggcatgccctcctcctccacaacaaatgggtctttaacctcctcgactgctggcctcacgtctatgtgtcggggcgccgaagtgctgtacagcttggcagccgcccacgccaggcgctctggtctggccgggagatacccactgtctgacttcaccctattaacggaggcaagacggaccctagggctgttccagcaccatgacgcaatcactgggactgcaaaagaggccgttgtggtggattacggtgtacgacttctccggtctctggttaacctgaaacaagttatcatccacgcggcacactaccttgtcctcggggacaaagaaacttatcacttcgacccagaagcaccattcttgcaggttgatgatacgaggttgagccacgacgcactgcctgagcgtactgtgatccagctggacagcagtcccagatttgtcgtgttattcaaccctttggaacaggaacgcttcagtatggtttcgctgctggtgaacagccctagagtgcgagttttgtccgaagagggtcaaccattggctgtccagatatccgcccattggagtagcgcaacagaggccgtcccggatgtgtatcaggtttccgtaccagtgcggctccctgcccttggactaggggtgctgcagctccagctcggactagatggtcaccgaacgcttcctagtagtgtgcgaatatatctgcacgggcgccagctcagcgtgagtcgccatgaggcatttccattgagggttattgattctggcacctccgatttcgctctgtctaaccgatacatgcaggtatggttctctggcctgacaggcttactgaagagtataagacgggtcgatgaggagcatgaacaacaagtggatatgcaggttctggtgtatgggacccgtaccagcaaagacaagtcaggtgcttacttgttccttccagatggcgaggcgaagccgtatgtcccaaaagagccccctgtactgagagtgacagagggcccattcttctctgaggttgtggcctactacgagcatattcaccaagcagtccgcctgtacaatcttccaggcgttgagggactgtcgctggatatctcttccctggtagacatccgggactatgtgaataaagagctggccctgcacatccatactgatatcgatagtcagggcatcttcttcaccgacctgaacggctttcaggttcagccccgacggtatctgaaaaaactacccctgcaggccaatttttatccaatgccagtgatggcatatatacaggatgctcagaagcgcctaacactgcacaccgcacaggctctcggggtgtctagtctcaaggacggacaattagaggtgatcctcgatcgtaggctgatgcaggacgacaacagaggccttggacagggattgaaggacaacaaaaggacgtgcaaccgcttccggctgctcctggagcggaggactgtgggatccgaggtgcaggacagccatagcaccagttacccatcactactctcccacctaacctctatgtacctgaacgcacctgctcttgcactgcctgtagcccgcatgcaattgcctgggcccggcttgcgttctttccaccctctagcatcctctctaccctgcgattttcacctgttgaatttgagaacccttcaagctgaggaggacactctgccttctgctgagacagccctgatcttgcacaggaaaggattcgactgtgggcttgaggctaagaatctagggttcaactgtacaactagccaaggcaaagtcgccttaggaagcctgtttcatgggctggacgttgtatttctccagccaacttcgctcacattactctatccactggcctctcccagtaactcaactgacgtgtacctggagcctatggagattgcgacctttcgcctcagattaggatag

SEQ ID NO: 123343 - DNA, 219 bp, synthetic construct
  misc_feature 1..219: note = Description of Artificial Sequence: Synthetic coding sequence
  source 1..219: mol_type = other DNA
atgaagctcaaaaagcaggtcaccgtatgtggagccgccatcttctgtgtcgctgtcttctctctgtacttgatgctcgatcgggtgcagcatgatcccacccgacaccagaatggaggaaacttccctcgaagccagatctccgtgctgcagaaccggattgaacaactggaacagctgctggaagagaatcacgagattatcagccacatcaaatag

SEQ ID NO: 123344 - DNA, 153 bp, synthetic construct
  misc_feature 1..153: note = Description of Artificial Sequence: Synthetic coding sequence
  source 1..153: mol_type = other DNA
atgaagctgaagaagcaggtcaccgtgtgcggggctgcaattttttgcgtcgctgtgttcagtttgtaccttatgcttgatagggtccagcacgatccgacccgccaccagaatggcgggaacttcccgcggagccagatttctgtgctttag

SEQ ID NO: 123345 - DNA, 3192 bp, synthetic construct
  misc_feature 1..3192: note = Description of Artificial Sequence: Synthetic coding sequence
  source 1..3192: mol_type = other DNA
atgctgccctactatactgttaacgggtcttgggtggtaccacccgagccccggccctccttcttcagtattagcccacaggactgtcagttcgccctagggggcagaggacagaaacccgaattacagatgctgactgtgtccgaagagctcccattcgacaatgtggatggtggtgtctggcgtcagggattcgatatcagctacgaccctcatgattgggatgcagaggacctgcaagtcttcgtggtaccacactcccacaatgatcccggttggatcaaaacctttgataagtactacacagagcagactcaacacattttgaactcaatggtgagcaagctgcaagaggatccccgtcggcggttcctgtgggcagaggtatcattcttcgctaaatggtgggacaacattaacgtccagaaacgcgctgcagtgcggaggcttgtaggcaacggtcagcttgagattgccaccggcgggtgggtcatgcctgatgaggcgaactcccattatttcgccctgatcgaccagctcatagaaggccaccagtggctcgaaagaaatctcggtgccaccccgcggtcggggtgggctgtcgacccctttggttacagtagtactatgccctatcttctgcgacgggccaaccttactagcatgcttattcaacgggttcactacgcaattaagaagcacttcgccgccacccacagcctggaattcatgtggcgacagacctgggacagtgactcctcaacggacattttctgtcatatgatgccattctatagttatgatgtgccccatacatgcggcccagatcccaaaatatgctgccaattcgattttaaaagactacctgggggcaggatcaactgcccttggaaggtgcctccacgcgccatcactgaggccaacgtcgcagagagggccgcactgcttctggatcagtaccgaaagaaaagtcagctgtttagaagcaatgtgctgttagtgccgctcggagacgatttccgatatgataagccacaggagtgggacgcccagttcttcaactatcagcggctgttcgatttctttaatagcaggcctaatctacatgtgcaagcgcaatttggtaccctttccgattatttcgacgccttgtacaaacgcacaggagttgaacccggtgcgagaccgcctgggtttcccgtgctgtctggagatttctttagttacgctgacagggaagaccattactggactggatattatacgtcacggcctttctacaagagcttggaccgcgttctggaagcacaccttagaggggctgaggttctctactctctggctgctgctcacgcaagacgatccggactagccgggagatatccactctccgatttcacgttgctcacagaagctcgaaggacacttgggctcttccagcatcacgacgccatcaccggaaccgcaaaggaggccgtcgtggtcgactacggcgttcggctccttcgctcgctggttaatctcaagcaagtgatcatccacgcagcgcattatctggtcctcggagacaaagaaacttaccatttcgaccctgaagcaccttttcttcaggtggatgatactagactctctcacgacgccttgccagagaggacagtgatccagcttgactcctctcctcggtttgtggtgttgtttaacccattagaacaggagcgcttcagcatggtctcactgcttgtaaattcaccgagagtgagggtgttgagcgaggagggccagcccttggctgtccaaatctctgcccactggagctcagccacagaagccgtgccagacgtgtaccaagtttcagtgcctgttagactgcctgctctgggtctgggggtactccagctacagctcggactcgacgggcacaggaccctgcctagctcagtgcgcatttaccttcacggacgccagctttctgtctccagacatgaagcatttccgttgagggtgattgattctggcaccagcgattttgctttgagtaaccggtatatgcaggtttggttttccgggctcaccggcttgcttaagtccatccgtagggttgatgaggaacatgagcagcaggtcgacatgcaggtgcttgtgtatggaactcggacatctaaggataagtcaggcgcctacctgtttctgccagatggagaagccaagccttatgtgccgaaagaacctccagtactgagggttactgaggggcccttcttcagtgaagttgtggcatattacgagcatatccatcaggctgtgagactgtacaatctacctggcgtagaaggcttaagccttgatatatcaagccttgtggatattcgtgactatgtaaacaaagaactggctctgcacatccatactgacattgactctcaaggcatatttttcactgacctgaacgggttccaggtgcagcctaggcgttacctgaaaaaactacctctgcaggcgaacttttacccgatgccagtgatggcttatatccaagatgcacagaaaaggctcactctgcacaccgctcaagctctgggtgtgtctagcctcaaagatggacaactggaagttattttggaccgaagattaatgcaagatgataacagaggactaggccaagggctgaaagataataaacgtacctgcaataggttccgcctgctgcttgagcggcggactgtgggcagcgaggtacaggactcccactcaaccagttatccaagcctgctttcacacttgacctcgatgtacctgaatgctcccgccttggcacttccagttgcgaggatgcagctccccggccccggactgcggtcatttcatccgctggccagtagtttaccttgcgattttcatctcctgaatctacgcacccttcaggctgaggaggatacattgccttctgcggaaaccgccttaatcctgcatagaaagggattcgactgcggactggaagcaaagaatcttgggttcaactgcaccacctctcagggcaaggtagcgcttgggtcattattccacggcctagacgttgtgtttctgcagccaacgtcactaacactgctgtaccccctggcttcaccatcaaacagtaccgacgtatatcttgagccaatggaaattgccaccttcagactacgtctagggtag

SEQ ID NO: 123346 - DNA, 231 bp, synthetic construct
  misc_feature 1..231: note = Description of Artificial Sequence: Synthetic coding sequence
  source 1..231: mol_type = other DNA
atgaaacttaagaaacaggttaccgtctgtggcgccgccatattctgcgtagcagtttttagtctttacctcatgttggaccgcgtgcaacacgacccgacccgccaccagaacggcggaaatttccctcggtcccagatcagtgtgctgcagaatagaattgagcagctggagcagctgctggaagagaaccatgagattatctcacacatcaaggacagcgtcctctag

SEQ ID NO: 123347 - DNA, 363 bp, synthetic construct
  misc_feature 1..363: note = Description of Artificial Sequence: Synthetic coding sequence
  source 1..363: mol_type = other DNA
atgaagctgaaaaaacaggtgactgtgtgcggcgcggctattttctgcgtagcagtcttttctctttatctaatgctagaccgggtgcagcacgaccccacaagacaccagaatggaggcaacttcccccggtctcagatctcagtgctgcaaaaccgcattgagcaactggagcaactgcttgaggagaatcatgagatcattagccacattaaggactcggtgctcgaactgactgcaaacgcggaaggccctccagccatgctgccctactacactgtcaacggctcttgggttgtgcctccagagccacgcccctcatttttcagcattagtccgcaggactgccagttcgctctatag

SEQ ID NO: 123348 - DNA, 3123 bp, synthetic construct
  misc_feature 1..3123: note = Description of Artificial Sequence: Synthetic coding sequence
  source 1..3123: mol_type = other DNA
atggcagccgcccctgcccttaagcattggcgcactacactggaacgcgtggaaaagtttgtcagccccctgtatttcaccgactgtaacttaaggggacggctttttggagccagttgccccgtagcggttctaagtagttttctaacgccagagaggctcccctatcaggaggccgtccagcgcgacttccgtcctgcccaagtcggggacagcttcggaccgacctggtggacctgttggtttcgcgtggaacttacaatcccagaagcttgggtaggccaagaggtgcacctgtgctgggaatccgatggagaagggctagtctggagagacggcgaacctgtacaaggactaacaaaggagggggagaagacatcctacgtcctgacggataggctgggggaacgggacccacggagtctcaccctatacgtagaagtggcttgtaatggtctgttgggcgctgggaaggggagtatgattgcagcccccgaccctgaaaaaatgtttcagctttcgagagccgagttggctgtgttccaccgagatgttcacatgctgctggttgatctggaactcctcctgggcatcgccaaaggacttggtaaggataaccagcgctcctttcaggcgctttacactgccaaccagatggtgaatgtatgcgatccagcccaacctgaaacattcccagtagctcaggccttagccagtcggttcttcgggcaacacgggggcgaaagccagcatactatacatgcaactgggcattgccacattgacactgcttggctgtggccctttaaagaaaccgttcgcaaatgcgccaggtcttgggttaccgcacttcagttaatggaacgtaatcctgaattcatttttgcctgttcacaagcccagcagctcgaatgggtcaagtcgcgctaccctggactgtacagccgtattcaggagtttgcatgccgcggccagttcgtgccagtggggggcacctgggttgagatggatgggaatctgcctagcggcgaggcaatggtcagacagtttctgcaggggcagaattttttcctgcaagagttcggtaagatgtgcagcgaattttggctgccagacaccttcggatatagtgctcagttgccccagattatgcacgggtgcgggatcaggcgctttctgacacagaagctgtcatggaatctcgtcaattctttcccacaccacacgtttttttgggagggcttggatgggtctagagtgctcgtccattttcctccaggagacagttacggaatgcaggggtccgtggaggaggttctgaagaccgtagcaaacaatagagacaaaggccgagccaaccatagcgcctttctcttcggtttcggggacggcggcgggggaccaacccaaacaatgctggatcgactgaagcgactctctaacacggatggattgccgagagtacagctgtcatccccaagacaacttttcagcgcgctcgagtccgacagcgagcagctctgcacatgggtgggggaattattccttgaattgcacaatggaacctacaccactcatgctcagattaagaaggggaaccgtgaatgcgagcggatcttacacgacgtggagttgctgagctcgttggctctggctcgatctgcccagttcctgtaccctgccgcccaactgcagcacctgtggaggttactgctgcttaatcagtttcacgatgtggttacagggagctgtatccagatggtggctgaggaggctatgtgccactatgaggacattagaagccacggaaatacactcctctcagccgcagcagcagcactgtgcgcaggagaaccaggacctgaaggccttttgattgttaacacccttccttggaagcgcatcgaggtgatggccctccctaaacccgggggcgcacatagcctggccctcgtaaccgtgccatctatgggctacgcgcctgtgccacccccgacttcattgcagccacttctgcctcagcaaccagtgttcgtagttcaagaaactgacgggagtgttaccttagacaacggcataatcagagtgaagctggaccctaccgggcggctcacgtccctggtgctggttgcaagtggacgtgaggctattgccgaaggcgccgtcggcaatcagttcgtcctgtttgacgacgtgcctttatattgggacgcatgggacgtaatggattatcacctagaaactaggaaacctgtactcggacaggctggcactttggctgtgggcacagagggtggactgagaggatctgcgtggtttttactgcagatctctcccaattccaggttgagccaggaggtggtcctggatgtaggctgcccttatgtgcggttccacaccgaggtccactggcacgaggcacacaagtttctcaaggttgaatttcctgccagagtacggtcctcccaggccacatatgaaattcaattcgggcacctccagaggcccacacactacaacacctcgtgggattgggccaggtttgaggtgtgggcccatagatggatggacctctccgaacacggcttcggtctggcactgctgaatgactgtaaatacggggcctccgttcggggaagtatcctgtcgctcagcctgttgagggcccccaaggcccccgatgccactgccgacacaggtcgacatgagtttacctacgctctcatgccacataagggatccttccaagacgcaggcgtgattcaggcagcatactcgctaaacttccctttgctcgcgctgcctgcccctagtccagcccctgcgacctcgtggtctgctttctccgtgagtagtcctgctgtggtgttggaaaccgtgaagcaagctgagtcctccccccaacgccgtagtctcgtgcttcgcttgtatgaagcgcacggcagtcacgtcgactgctggttacatttatccctccctgtacaggaagccattctgtgtgacctattggagcgtccagacccagcagggcacctcacgctccgcgataataggttaaagttaactttctctccttttcaggtgctgtctctattgctggtgctgcagccacctccccattag

SEQ ID NO: 123349 - DNA, 630 bp, synthetic construct
  misc_feature 1..630: note = Description of Artificial Sequence: Synthetic coding sequence
  source 1..630: mol_type = other DNA
atggctgccgctcccgccctgaaacattggcggaccactttggaacgtgtggagaaattcgtgagcccgctctacttcacagattgtaatttaagaggaagactgtttggagcctcctgccccgttgccgtgctgtcgtccttcctgaccccggagagactgccctaccaggaagcggttcagagggactttaggcctgcacaagttggtgattctttcggtccaacctggtggacttgctggttccgcgtcgaactgaccattccggaggcttgggtcggccaggaggtacacctgtgttgggagtccgacggggagggacttgtgtggcgggatggggaacctgtgcaaggcctgactaaggaaggtgagaagacaagctatgtcctgactgaccgtctgggcgagcgagacccacggtctctcactctgtacgtggaggtcgcatgcaacgggctgctgggtgccggcaaggggagcatgattgcggcaccggacccggagaaaatgttccagctgagcagagctgaactggccgtttttcatcgcgacgtgcatatgctattggtggatttggagctgctattgggcatcgccaaacccgggttcggaccgtctaagcgtctttag

SEQ ID NO: 123350 - DNA, 2910 bp, synthetic construct
  misc_feature 1..2910: note = Description of Artificial Sequence: Synthetic coding sequence
  source 1..2910: mol_type = other DNA
atggccgaggacgacccctaccttggtcgtcccgagcagatgttccatctggacccttcacttacacacactatcttcaacccagaggtcttccagcctcagatggcactccccacagccgatggaccttatctgcagattttggaacagccaaagcagagaggctttcgctttagatatgtctgtgagggacctagtcatggtgggttacccggcgcttcaagcgaaaagaacaagaagagttatccccaggttaaaatctgcaattacgttggccccgccaaagtcattgtacagctggtcacaaatggcaagaacatccatctccacgcccattccctggtgggaaagcattgcgaggacgggatctgcactgtgactgccggaccaaaagatatggtggtgggcttcgccaatttgggcatcctgcacgtcacgaagaaaaaggtcttcgagacattagaagcaagaatgactgaggcatgtatcaggggctacaaccctggccttctggtgcatccagacctcgcttacctgcaggcagaaggagggggagatcgccagctcggcgaccgcgaaaaagagctcatcaggcaggcggccctccagcagaccaaggagatggacctgagcgtcgtccgactgatgtttaccgcgttcttgcctgacagtacggggtcttttacccgtcgcctggagcctgtcgtatccgatgcaatttacgattccaaagcacccaacgcttccaatcttaaaatcgtgcgcatggataggacagctgggtgtgtaacaggcggcgaagagatctaccttctttgtgataaagtgcagaaggacgacattcagattagattttacgaggaggaagagaacggcggcgtatgggaagggttcggggacttttccccaaccgacgtgcaccgccagtttgctattgtcttcaagactcctaagtacaaggacatcaatatcacgaaaccagcgtctgtttttgttcagctccgccgaaaatccgacctcgaaaccagtgagcccaagcctttcttgtattacccagaaatcaaagacaaggaggaggtgcagcggaagcgacagaaactcatgcctaacttctcagattctttcggagggggatccggcgcgggggccggggggggggggatgttcggaagtggagggggtggcggggggactggttcaaccgggccaggttattcctttcctcactatggctttcccacctacggagggattacctttcatcccggcacaacaaagtcgaacgccggcatgaagcatggaacgatggatacggagagcaagaaggatcccgaaggatgtgacaagtcagatgataagaacacagttaacctgttcggaaaggtgatagaaacgacggaacaggaccaagagccaagtgaggcaactgtggggaatggcgaggtgactttgacatatgccaccggaactaaggaggaatctgccggggtgcaagataacctgttcttggaaaaagctatgcagctggccaagcgccacgccaatgctctgttcgactatgcagtgactggggatgtaaagatgttgctggcagtgcaacggcatctaacagcagtccaggacgaaaacggggatagcgtcctacacctggcaatcatccacctccatagccagctcgtgagggacttactggaggttaccagcggactcatctccgacgacataatcaatatgcggaatgacttgtatcagaccccgctgcacctggcggtgataactaaacaggaagatgtcgtggaagacctgctgagggccggcgccgacctaagcttgctggatcgcctgggaaattccgtgctgcatctggcagctaaggagggacatgacaaggtgctgagtatcctcctcaagcataaaaaggccgcattactgcttgatcacccaaacggggatggcttgaacgctatccacttggcaatgatgagtaacagtttgccctgtcttcttcttctggttgcagcaggggccgacgtcaacgcacaggagcaaaaatcggggcgcactgcgttgcatctggcggtggaacatgacaacatatcactggctggctgccttctcctcgagggggatgcccatgttgactctaccacttatgacgggactacccccctacacatcgccgctggccggggatccacgcgattggctgccctcctcaaggcggccggcgcggatccccttgtcgagaattttgagcctctttacgacctggatgattcttgggagaacgcgggagaggatgaaggtgtagtgcccgggacaacgcccctagacatggcaacatcctggcaagtgtttgacattctcaacggcaagccatacgagcccgaatttacatccgacgacctgttggctcagggcgacatgaagcaactcgccgaagacgtaaagctgcaattgtacaagctgctcgagatccctgacccagacaaaaattgggccaccctggcccagaaactcgggttaggtatccttaacaatgcctttaggctttctcctgccccatccaagaccttgatggataattatgaggtgtccggcggaactgtccgagaacttgtagaggccctacgccagatgggttatactgaagcaatcgaggtgattcaggccgccagcagcccggttaagacaaccagtcaggcgcattcattgccactgtctccggcctcaactcggcagcagatcgatgaactgagagactcggactccgtttgcgacagtggtgtcgagacaagcttcagaaagctgagcttcaccgagtcactcacatcaggggcatccctgctaacccttaacaagatgccccatgattacgggcaagagggccccttagagggcaaaatctag

SEQ ID NO: 123351 - DNA, 1389 bp, synthetic construct
  misc_feature 1..1389: note = Description of Artificial Sequence: Synthetic coding sequence
  source 1..1389: mol_type = other DNA
atggccaagttccgccgtcggacctgcatcatcttggcgctgttcatcctctttattttctcccttatgatgggacttaagatgctacgtccaaataccgcgactttcggcgcccctttcggactggatttgttgcccgagctgcaccagaggacgatccacttgggaaaaaatttcgactttcagaaatctgaccggataaattccgaaaccaacaccaaaaacctgaaatccgtggagattacaatgaagccaagtaaggcctcagagttgaatctggatgaactgccgcctctcaacaactatctccacgtcttctattactcgtggtatggaaaccctcagtttgacggaaagtatattcattggaatcacccagtgttagaacattgggatcccaggatcgccaagaactatccgcaggggagacataacccacctgacgacatcgggtcttccttctaccccgagctgggatcctacagctctagggacccgagtgtgattgaaacgcatatgcgacagatgcggtctgctagcatcggcgtactcgctctctcatggtatccgcctgacgttaacgacgaaaacggcgagccaaccgataatctggtgcccaccattctcgataaagcacacaaatacaacctaaaagtgaccttccatatcgaaccatattcaaatcgggacgatcaaaacatgtacaaaaatgtaaagtacataatcgacaaatacggcaaccacccggccttttaccgatataagacgaaaacgggaaacgcactgccaatgttctatgtttatgacagttatatcactaagccagaaaagtgggctaacctgttgacaacatccggcagccgctctatcaggaacagcccatacgatgggctgtttatagcactgttggtggaggagaagcacaaatacgacattctgcagtcgggctttgatgggatctacacatattttgccacaaacggatttacgtacggatcaagccatcaaaactgggctagtctgaaactgttttgtgacaagtacaacttgatctttatcccatctgttgggcccgggtacatagatacatcaattagaccctggaatactcagaataccagaaatcgaatcaacgggaagtactacgagatcggcttgtccgcagcacttcagacgcggccaagtcttatctccataacaagcttcaacgagtggcacgagggcacgcagatcgagaaagcagtaccaaagcgcacgagcaacacggtctatcttgattatcgaccccataagccggggctttacctcgagcttactcggaagtggtccgaaaagtatagcaaggaacgggctacctacgctctggacagacagctaccggtctcctag

SEQ ID NO: 123352 - DNA, 597 bp, synthetic construct
  misc_feature 1..597: note = Description of Artificial Sequence: Synthetic coding sequence
  source 1..597: mol_type = other DNA
atggctaaattccggaggaggacatgcattatcctcgccctgtttattctctttatcttctctcttatgatgggcctcaagatgctccggcccaatacagcaacttttggggccccttttggccttgaccttctccctgagctgcatcagcgtaccatccacttgggcaaaaattttgattttcagaagtccgaccggattaactcagagaccaataccaaaaacttaaaaagcgtggagattacgatgaagccgtctaaggccagcgagctcaatctggatgagcttcccccactaaacaattatctgcatgtgttctactattcttggtatgggaatccccaattcgacgggaaatacatccactggaatcaccctgtattagaacactgggatcccagaattgctaaaaactatcctcagggtcgacataaccctcctgacgacataggctccagtttttatccagaactcggttcttattcgagccgagatccatctgtgatcgagacccatatgcgacagatgaggtcagcgtccatcggcaattactgcatttacatctatgtgtgtctgtgcctctatatttgcatctag

SEQ ID NO: 123353 - DNA, 624 bp, synthetic construct
  misc_feature 1..624: note = Description of Artificial Sequence: Synthetic coding sequence
  source 1..624: mol_type = other DNA
atggccaaatttaggcggcgtacttgtataatcctagctttgtttattctgttcatcttcagcttaatgatgggtctaaaaatgctgcgcccaaatacggcgacttttggcgcgccttttgggttggatctgctccccgagctacaccagcgcaccattcatctgggcaagaattttgacttccagaagtccgatcgaattaactcagagacaaatactaaaaatcttaagtccgtcgagattactatgaagccttctaaagccagcgagctgaaccttgacgagctcccaccccttaacaattatctgcacgtgttttactatagctggtatggaaatcctcagttcgatggcaagtatatccactggaaccaccctgtgctcgagcattgggacccacgaatcgcgaagaactatccgcagggcagacacaacccacccgatgatattggctcaagcttttaccccgagctcgggtcctactcttccagggacccctccgtgattgaaacacacatgcgccagatgcggtcagcctccattggcaactactgtatttatatttgcgtgtttgtttcagtgtatatgcacataaacgattttctgtgtaactttacgagctag

SEQ ID NO: 123354 - DNA, 2379 bp, synthetic construct
  misc_feature 1..2379: note = Description of Artificial Sequence: Synthetic coding sequence
  source 1..2379: mol_type = other DNA
atgatcacagttaaccccgacggcaaaatcatggttcggcgctgtcttgtgaccttgaggccattccgtcttttcgtactggggattggcttttttactttgtgctttctgatgacatccctcgggggccaattttccgctcggagacttggagatagtccctttactatccgcactgaggtgatgggcgggcctgaaagtagaggcgtgctcaggaagatgtctgatctcctggagttaatggtgaaacgcatggacgccctggctcgccttgagaattctagcgaactccacagggcaggtggcgacctgcactttcctgccgacagaatgcccccaggtgcggggctaatggagcgaattcaggcaattgctcagaacgtgagcgatatagccgtgaaggtggaccagatcctgaggcatagtcttttgctccacagtaaggtatccgagggacgtcgagatcagtgcgaagcccccagtgaccccaagttccctgattgcagtggaaaagtggaatggatgcgcgcacgatggacttctgacccgtgttacgctttcttcggggtggacggaaccgagtgtagcttccttatctacttatccgaggttgaatggttctgccctcccctcccctggagaaatcaaacagcggcccagagagctcccaaacctctgcctaaggtgcaggccgttttccgctctaacctgagtcacctgttggatttgatgggctctggcaaagagagcctcatcttcatgaagaagcgcaccaagaggctgacggcgcagtgggcccttgctgcacaacgcctagcgcagaaattgggtgccacccagagggatcagaagcagatcttggtccacatcgggttccttactgaggagtcgggggacgtgttctctccccgcgtgctgaaagggggccctctgggcgagatggtccaatgggccgatatactaaccgccttatacgtgctaggacacggtctccgcgtgacagtgtccttaaaggagcttcaaagtaacctgggggtgcccccaggacgagggtcctgcccgctcaccatgcctctgccgtttgatctgatttataccgactaccacgggctgcagcagatgaaacgccacatgggcttatccttcaaaaaatacagatgtagaatccgagtgattgacacctttggaaccgaacccgcgtataatcacgaggagtacgccaccctgcatggatacagaacgaactggggttattggaatctcaaccccaaacagttcatgacaatgttccctcatactcccgataacagcttcatgggttttgtttccgaagagctgaacgagactgagaaaagactcatcaaaggggggaaagccagcaacatggctgtggtgtatggcaaagaagcatccatttggaaattgcagggaaaagaaaaatttctaggcatcctgaataagtatatggagatccacggaaccgtatactacgaatctcagcggcctccggaggtacctgccttcgtgaagaaccatggccttctgccccagccggagtttcaacagctgctacgaaaggctaagctgtttatcgggtttggattcccttatgaaggcccagctcccctcgaggcgatagccaatgggtgtatattcctccaatcccgattctcacctccccacagctccttaaaccacgagtttttccgaggaaaaccgacctcacgggaagttttctctcagcatccatacgcagaaaactttattggaaaaccacatgtttggactgtggactacaataatagcgaggagttcgaggccgccattaaagccattatgcgaacccaagtggacccttatctcccgtatgagtacacttgtgagggaatgctggaaagaatccatgcctacatccaacatcaggacttctgtagggctcctgaccccgctcttccggaagcccacgcaccacagagcccatttgtacttgcccctaacgctacccatttagagtgggcgagaaacactagcttggccccgggcgcgtggccacccgctcatgcactgcgggcttggctggcggtccctgggcgcgcctgtactgatacatgtctcgaccatggccttatttgcgagcctagcttctttccatttctaaatagccaggacgcctttctcaagctgcaagtcccctgtgattccaccgaatctgagatgaatcacctgtaccctgccttcgctcagcccgggcaagaatgttacttacagaaggagccgctgttgttcagttgcgccgggtcaaacacaaaatatagacgactttgcccctgcagggactttaggaaaggtcaggtcgcgctgtgtcaaggatgtctgtag

SEQ ID NO: 123355 - DNA, 1338 bp, synthetic construct
  misc_feature 1..1338: note = Description of Artificial Sequence: Synthetic coding sequence
  source 1..1338: mol_type = other DNA
atgttgaaaaagcaaagtgccggactcgtcctgtggggtgcaatcctgtttgtggcatggaacgctctgctcctgctgttcttctggacacggcccgccccgggaagaccaccttcagtctcagctctggacggtgatcctgcatccttgactagggaagtaatccgacttgctcaggatgcagaggtggaactagaacgccaaagaggcctcctgcagcagatcggcgatgccctctcaagtcagaggggtcgggttcctaccgccgcaccccctgctcagccaagggtgccagtcactccagcgcccgcagtgatacctattctggttattgcttgtgataggtccaccgttcgcagatgtctcgacaagttattgcactaccgaccctcagccgaactgtttccaataatcgtcagtcaggattgcggtcacgaggaaaccgcccaggctatcgctagctacggctctgccgtgacgcacatacgtcagcctgacctgtcgtcgatcgccgtgccaccagaccataggaaattccagggctactataagatagcgcgccactaccgatgggctctcggacaggtcttcagacagttcagattccccgcagccgtggtggtggaggatgacctggaagtggccccagatttttttgagtatttccgagccacataccctctactgaaagccgatccgagcttatggtgcgtgtctgcctggaacgacaacggtaaagaacagatggtagacgcaagccgcccagaactactgtaccgcactgacttctttccaggcctgggatggcttttgctagccgagttatgggccgaattggaaccaaagtggcccaaggctttttgggacgattggatgcgccgaccagaacagagacagggcagagcatgtattaggcccgaaatcagtcggactatgacgttcggtcgcaagggcgtgtcacacggccaattttttgatcaacacttgaaatttattaagttaaatcagcaattcgtgcactttacacagctagatctgtcctatcttcaaagggaagcatatgatcgagacttcttggcaagggtttacggagccccacaactccaggtggagaaagttcgcacaaacgatagaaaggagttaggcgaggtccgggtgcagtacactggcagggattctttcaaggcctttgctaaagcgctcggcgtcatggatgatctgaaaagtggtgtcccacgcgcggggtacagggggatcgttacgtttcaatttagaggacggcgtgttcatctggccccccccttgacgtgggagggttacgatccctcctggaactag

SEQ ID NO: 123356 - DNA, 1338 bp, synthetic construct
  misc_feature 1..1338: note = Description of Artificial Sequence: Synthetic coding sequence
  source 1..1338: mol_type = other DNA
atgctgaaaaaacagagtgccggtctcgtactatggggcgccattctcttcgtggcatggaacgccctgctgctgctgttcttctggaccaggccagcaccaggccgccccccttccgtgtccgctctggatggtgatcctgcttcacttactagagaggtgatccgattggcccaggacgctgaggtagagctggagcgtcagaggggcctgttacaacaaatcggagatgccttgagttcccagcgtggcagagtgcccaccgcagcccctcctgcgcaaccacgcgtgcctgtcacaccagcacctgctgttatcccgatactagttatcgcatgcgaccgcagtaccgtgcgcagatgcctggacaagcttctgcattatagaccatccgctgagttatttcctatcatcgtcagccaggattgtggccatgaagagactgcccaagctatagcgtcctacggttccgccgtcacacatattcgccagcccgatctttcatccattgccgtgccacctgatcacaggaagtttcagggatattataagatcgctaggcattacagatgggccttgggccaggttttccgtcaattccggtttccagccgccgtggtggttgaagacgatcttgaggtggctcccgacttcttcgagtattttcgagctacttacccactgttgaaggccgaccctagcctgtggtgtgtgagcgcatggaacgataatggaaaggagcagatggttgacgcctcccggccagagttattgtacagaacagatttctttcccgggctgggctggctgctgttggctgagctgtgggcggaattagagcccaagtggccaaaggccttttgggatgactggatgcgccgccctgaacagcgacagggcagggcctgcatcaggccagagatctcccggacgatgactttcggtaggaagggagtgtcacatgggcaatttttcgaccagcatctcaaattcatcaagcttaatcagcagttcgttcattttacccagttggacttaagctatctccagcgggaggcatacgatagagactttttagcgagggtctacggcgcccctcagctgcaggtggagaaagtccgtactaacgatcggaaagagctgggggaggtgagagtccaatacacaggtagagatagcttcaaagccttcgcaaaggcactcggggtcatggacgatctcaagagcggagtgcctcgggctggatatcggggcattgtcacgttccagttccggggccgccgggtgcatcttgctccacctttgacatgggaaggctatgatccttcttggaattag

SEQ ID NO: 123357 - DNA, 1338 bp, synthetic construct
  misc_feature 1..1338: note = Description of Artificial Sequence: Synthetic coding sequence
  source 1..1338: mol_type = other DNA
atgttaaagaagcagtccgccgggctggtactgtggggcgctattcttttcgttgcatggaacgctctcctcctcctcttcttttggacaagacccgcaccaggacgcccgccatctgtgtccgcgctggacggcgatccagcctccctcacaagggaggtcatacgtctggcacaggacgccgaggtggagctggagagacaaaggggactgttacaacagattggagatgctctgtcttcgcagagaggtcgcgttccgactgctgccccccccgctcagcccagggtgcccgtcacccccgccccggcagtgatccccattcttgtcatcgcgtgcgataggtccaccgtacggaggtgccttgataagctgctacactatcgccccagcgctgagttatttcccattatcgtgagtcaggactgtggccatgaagagacggcgcaagccatcgcttcatatggctcagcagtgacacatataagacagccagacctttcctccatcgccgtgcccccagaccatagaaaatttcaagggtattacaagatcgcaagacactataggtgggctctgggacaggtgtttcgccagtttaggttccccgcagccgtggtggtggaggacgatctggaggtggcccctgacttctttgagtatttcagggccacctatccattactgaaggccgatccatctttgtggtgcgtgtccgcttggaatgataacggtaaagaacagatggtagatgcatcccggccagaactgctatatcggaccgacttttttcctggattggggtggttacttttggcagagctgtgggctgagctggaacctaaatggcctaaagcattttgggatgactggatgaggcgccccgaacaacgccagggccgagcgtgtattcgccccgagatctcccgaacgatgacattcggcagaaaaggcgtgagccatgggcagttctttgaccagcatttgaaattcattaagctgaaccagcagttcgtccattttacgcagcttgacctgtcttacctgcagcgcgaggcatatgacagagactttctcgccagagtgtacggcgccccacaacttcaagtggaaaaagtgcgcaccaatgacagaaaggaactgggtgaggtcagggtccaatataccggccgtgacagtttcaaggcttttgccaaggcactcggcgtgatggacgatctgaagagcggagtgcctcgtgcaggctaccgtggcatcgtaaccttccaatttagggggcgccgtgtgcatctcgccccgcccctgacgtgggaaggctatgacccttcctggaattag

SEQ ID NO: 123358 - DNA, 1338 bp, synthetic construct
  misc_feature 1..1338: note = Description of Artificial Sequence: Synthetic coding sequence
  source 1..1338: mol_type = other DNA
atgctcaagaaacagtcagctggtctggtgctgtggggcgctatcctgttcgtcgcgtggaacgctctgctgctcttgtttttttggacccgcccggcccctgggcgaccgccctcagtcagtgccctggacggagaccccgcatccctgactcgagaggtgattagactggcacaggacgccgaggtagaattggaacgccagcgcggactgctccagcagatcggggatgcgctgtcttctcagagaggaagggtacctactgcagccccacccgctcagccaagggttcctgtgacacccgccccggccgtgatcccaatccttgtgatcgcttgtgaccggagtaccgttcggagatgcttggacaagctgctacactacagaccctctgctgagctgttcccgattatcgtgagccaggattgtgggcacgaggaaacagctcaagccatcgcctcgtatggcagcgcggtgacgcacattaggcagcctgatctgtctagcatagcagtgcctccagatcacaggaagttccaagggtattacaagatagccagacactacagatgggccctggggcaggtctttcgccagttcaggtttcctgctgctgtggtcgtcgaggacgatctagaggtggcccccgactttttcgagtacttccgggccacttatcccctgctcaaggcagatccatctctctggtgtgtgtcggcgtggaatgacaacgggaaggaacagatggtggatgcttcacgacctgagcttttgtacaggactgatttctttcctggcttgggttggctgctcctcgccgaattgtgggcggagttggagccgaagtggcctaaggcgttctgggacgattggatgcgtcgcccggagcagcggcagggtcgagcctgtatcaggcccgagatctcccggaccatgaccttcggacgaaagggtgtcagccatgggcagttttttgatcagcacctgaagtttattaagttgaatcaacagttcgtccatttcacccagctagatctaagctaccttcaacgcgaagcatatgatcgcgatttcctcgctagggtgtacggagcccctcagttacaggttgagaaagtcaggaccaatgatagaaaggaattgggcgaagttagagtccagtataccggtcgtgattcatttaaggcttttgcaaaagccctcggggtgatggatgatctgaaaagcggggtgcccagagccggatacaggggcatagtgaccttccagtttaggggcaggagagtccacctggctcctcctctgacatgggagggttatgacccaagttggaattag

SEQ ID NO: 123359 - DNA, 1338 bp, synthetic construct
  misc_feature 1..1338: note = Description of Artificial Sequence: Synthetic coding sequence
  source 1..1338: mol_type = other DNA
atgttgaagaaacagtccgcggggctagtgctgtggggtgcgatcctctttgtcgcatggaacgctctgcttcttttatttttctggaccaggcctgcgcctggacggcctccctctgtgtcggcactggacggagatcccgcttcgctgacccgcgaggtcataagactggcccaggatgcagaggtcgaattggaacggcaacgggggttgctccaacagatcggagacgctctatcgtctcagagagggcgggtgccgacagcagcacctccagcacagcctagggtccctgtgaccccagctcccgcagtgatccccattttggttattgcatgcgaccgatccactgtaagacgctgtctggacaagcttcttcactataggcctagcgccgagctgttccctatcattgtgagccaagattgtggccacgaggagacagcccaagctatcgcaagctatgggtctgccgtcactcatatccgccagccagatctgtcaagcattgccgtgccccccgatcatcggaaatttcaggggtattacaagattgccagacactaccggtgggccctcggccaagtgtttcggcagttcaggtttccagctgccgtggtggtcgaagacgaccttgaagtggctcctgacttttttgaatattttagagcaacctatcctttgctgaaagccgatccgtccctgtggtgcgtgagcgcctggaacgacaatggaaaggaacagatggtagacgcctccagacccgagctgctgtaccggacggatttcttccctggactgggatggctgcttctggctgaattgtgggccgagcttgaaccgaaatggccaaaagctttttgggatgactggatgcgccggccggaacagcgacagggccgtgcctgcatacgccccgagatcagcaggactatgacattcggccgcaaaggcgtgagccatggccagttctttgaccaacaccttaagtttataaaattgaaccagcagttcgttcattttacccagctcgacctgagctaccttcagcgcgaggcttacgacagggatttcctcgcgagagtctatggagctccccaacttcaggtcgagaaggtccgaacaaacgacagaaaagagctcggtgaagtccgagtgcaatacaccggacgagacagtttcaaagccttcgctaaagctctgggggtaatggacgacttaaaatctggtgttcctagggcgggctacagaggaatcgtaacctttcagtttagagggcgcagggtccacttagccccccctttgacatgggagggctacgatccgtcatggaattag

SEQ ID NO: 123360 - DNA, 909 bp, synthetic construct
  misc_feature 1..909: note = Description of Artificial Sequence: Synthetic coding sequence
  source 1..909: mol_type = other DNA
atgctgaaaaagcagtccgctggactggtcctatggggagctatattatttgtcgcctggaacgccctgctgttgttattcttctggactcgtccggcgcccgggcggccacccagcgtcagcgcactggacggcgacccagcatctctgaccagggtctttaggcagtttcggtttcctgctgccgttgtcgtcgaagatgacctcgaggtggcccccgacttcttcgagtatttccgggccacgtacccactgctgaaagctgaccccagcctgtggtgtgtatctgcttggaatgataacgggaaggaacagatggtggacgcctctcgaccagagttgctgtataggactgatttcttcccaggactgggctggctcctactggctgaactctgggccgaattagagcccaagtggccgaaagctttttgggatgactggatgcgtaggccagaacagagacagggccgggcatgcatccgccctgaaatctccagaaccatgacattcggtcgaaagggggttagtcacggccagttcttcgaccagcacctaaagttcatcaaattgaaccagcagttcgtccactttactcagttagatctgagctatctccagagggaggcctatgatcgggatttcctagcccgggtctatggtgcacctcagttgcaggtggagaaggtgcgcacaaatgaccggaaggagttaggcgaagtgcgagtgcagtataccgggcgggatagtttcaaagccttcgccaaggccctcggagtgatggatgacctgaagagcggggtgccccgggccggatatcgcggaatagtgaccttccaattccgcggtcgccgtgtccacctggccccccccttaacttgggagggctacgacccatcctggaactag

SEQ ID NO: 123361 - DNA, 312 bp, synthetic construct
  misc_feature 1..312: note = Description of Artificial Sequence: Synthetic coding sequence
  source 1..312: mol_type = other DNA
atgttaaaaaagcagtccgccgggttggtgctttggggcgctattctgtttgtcgcttggaacgctctcctcctgctcttcttttggactcgtccggcccctggacgaccgccctcggtgagcgctttagatggcgaccccgcctcattaacccgcgaggtgattcggctcgcacaggatgctgaagtcgagctcgagagacagcgagggctcctccagcagataggcgacgccctctcatcccagagagggagggtgccaaccgccgcaccacctgcgcaacccagggtgcccgttactccggcaccctag

SEQ ID NO: 123362 - DNA, 600 bp, synthetic construct
  misc_feature 1..600: note = Description of Artificial Sequence: Synthetic coding sequence
  source 1..600: mol_type = other DNA
atgttgaagaaacaatcggcagggttagtgttatggggggctatactgtttgtggcttggaacgcactgctacttctttttttttggaccaggcctgcaccggggcggcctccttctgtcagtgctctggatggcgacccagcgagccttacccgtgaagtgattaggctggcccaagatgccgaggtcgaattggagagacagcgtgggctgcttcaacagatcggagatgccttgtcttcccagcgcggtagagtgcccaccgccgcaccccccgcccagcccagggtgcccgttacccctgcccctgccgtcatccctattctcgttatcgcatgcgaccggtcaacagttaggaggtgtttggacaagttactccattaccgcccatcagccgaactgttcccaattatcgtgtcccaggactgtggccatgaggaaacagcccaggccattgcctcttacggttccgcagtcacgcacatccgccagccagacctgtcctccatcgccgttcctcccgaccatcggaagttccagggatactacaagatcgcccggcactaccggtgggcactcgggcaagtgttccggcagtag

SEQ ID NO: 123363 - DNA, 336 bp, synthetic construct
  misc_feature 1..336: note = Description of Artificial Sequence: Synthetic coding sequence
  source 1..336: mol_type = other DNA
atgctgaagaaacagagtgccggcctcgtgttatggggggccattctgttcgttgcctggaacgccctgctattgctctttttctggaccagacctgcccctgggcgtcccccatccgtctcggccctggacggagaccccgcttcgctcactcgcgaagtcatcaggctggcccaagacgccgaagtggaactggaacgccaaaggggattactgcagcagattggtgatgcactgtctagccagagaggaagagttcctaccgcagcaccacccgcccaacctcgagttccggttacacctgccccagctgtgattccaattttggtcatttag

SEQ ID NO: 123364 - DNA, 465 bp, synthetic construct
  misc_feature 1..465: note = Description of Artificial Sequence: Synthetic coding sequence
  source 1..465: mol_type = other DNA
atgctgaagaaacagtcagccggccttgtgctgtggggcgccattttattcgttgcctggaatgccctgctacttctgttcttttggactcgtccagcacccgggcggccaccgtccgttagcgctctggacggcgacccagcttctttaactcgtgaagtgatcaggttggcccaggacgcagaggttgaactcgagcgtcagcgaggtctgctacagcagataggagacgccctttcctcccagagggggcgcgtgcccaccgctgccccgcccgcccagccccgcgtgccagtgactccagctcctgccgtgatcccgatcctggtaattgcctgcgaccgatcaacagtccggcgctgtctcgacaaactcctacattatcgccctagcgccgagctcttccctattatcgtgtcccaggactgtggacatgaggagaccgcccaggcaattgcctcatag

SEQ ID NO: 123365 - DNA, 105 bp, synthetic construct
  misc_feature 1..105: note = Description of Artificial Sequence: Synthetic coding sequence
  source 1..105: mol_type = other DNA
atgctgaagaagcagagcgcagggctggtcttatggggcgctatcctctttgtcgcttggaacgcactcctgctgctttttttctggacaagacctgccccctag

SEQ ID NO: 123366 - DNA, 348 bp, synthetic construct
  misc_feature 1..348: note = Description of Artificial Sequence: Synthetic coding sequence
  source 1..348: mol_type = other DNA
atgctaaagaaacagtccgccgggctggttctctggggagccatcctctttgtcgcatggaatgcgttgctgctacttttcttctggacacgacctgcccctggcagacccccgtcagtgtcagccctagacggagatcccgcgtccctgaccagagaagtgatccgattggcccaggatgctgaggtcgaactcgagagacaacgcgggctactgcagcaaattggggacgcactgagcagccagcgcggaagggtccccaccgccgcgcctcccgctcaaccaagagtcccggtgactccagccccagccgttatccctatcctagtaatcgcatgcgacagatag

SEQ ID NO: 123367 - DNA, 288 bp, synthetic construct
  misc_feature 1..288: note = Description of Artificial Sequence: Synthetic coding sequence
  source 1..288: mol_type = other DNA
atgcttaaaaagcaaagcgctggtttagttttgtggggcgcgattttatttgtggcttggaatgctttgctgcttttgttcttttggacgcgccccgccccaggccgtcccccctcagtgtctgcattggacggggaccccgcttcactgaccagggaggtgattaggctggcacaggacgctgaagtggagctcgagagacaaagaggtctgttgcagcagataggcgacgcgctgagcagtcaaagaggacgcgttcccaccgctgcaccgccggctcagccttag

SEQ ID NO: 123368 - DNA, 384 bp, synthetic construct
  misc_feature 1..384: note = Description of Artificial Sequence: Synthetic coding sequence
  source 1..384: mol_type = other DNA
atgctcaaaaagcaatctgctgggctggttttgtggggcgcaattctgtttgtcgcgtggaacgcccttctgctcctgtttttttggactcgtcccgctcctggaagacccccctctgtgagcgctctggacggcgacccggcgagtctgacacgcgaagtcattagacttgcacaggatgccgaagtcgagctggagagacagcgcggattgctgcaacagattggggacgccctcagctcacaacgcggcagggtgccgactgcagcacccccggcccaaccccgcgtgcccgtgacccccgcgcccgccgtgatacctatcctcgtgatcgcgtgcgaccgttccacggtgcggcggtgtctggataagctgctgcactag

SEQ ID NO: 123369 - DNA, 318 bp, synthetic construct
  misc_feature 1..318: note = Description of Artificial Sequence: Synthetic coding sequence
  source 1..318: mol_type = other DNA
atgctgaagaaacagtccgccgggttagtgttatggggggccattctgttcgtcgcctggaatgcccttttactgttgtttttttggactagacccgcccccggaaggcccccctcggttagtgcgctggacggggaccctgcgagcctcacccgggaagtgattagactcgctcaggatgcagaagtggaactggaaagacagcgggggctccttcaacagatcggagacgcattatcaagccagaggggccgggttccaactgcagcaccccctgctcaaccaagggtgcccgttactcctgcgccggctgtttag

SEQ ID NO: 123370 - DNA, 1608 bp, synthetic construct
  misc_feature 1..1608: note = Description of Artificial Sequence: Synthetic coding sequence
  source 1..1608: mol_type = other DNA
atgaggttgcgaaatggcactgtggcaactgcgctggctttcatcacctcctttcttacactctcctggtacacaacttggcaaaacggaaaggaaaagctcatcgcctaccagagggaatttcttgccctaaaagagcgattgaggatcgccgaacacagaatatcccagcggagctccgagttaaatacaatagtccagcagttcaagcgcgtgggagcagagactaacgggtctaaagacgctctgaacaaattcagcgataacacgctgaaactccttaaagagctgaccagcaaaaagtccctgcaggtgcccagtatatattatcacttgcctcacctgctcaaaaacgaagggtcattgcagcccgcggtacagataggaaacgggagaacgggggtcagcatcgtgatgggcattcctactgtaaagagagaggttaaatcgtatctcattgagacccttcactcgcttatagataatttatatccagaggagaagttggactgtgtgatagtcgtttttataggagaaaccgatattgattacgtgcatggagttgtggcaaatctagaaaaagagttttccaaggaaataagcagcggcttggtcgaggtgatttctccccccgaaagctattaccccgaccttacgaatttgaaggagacgttcggcgacagcaaagaaagggtacggtggaggactaagcagaatctggattattgttttctgatgatgtacgcccaggagaaaggcatctattatattcagctagaagatgatattattgtgaagcagaattacttcaacaccatcaagaattttgcgctccagctgtccagcgaggaatggatgatactggaattttcccagttaggtttcatcgggaagatgttccaggcccctgacctcacgcttatcgtggaattcatcttcatgttctataaagagaaaccaatcgattggctactggaccacatcttatgggtgaaagtctgtaatccagaaaaagatgcaaaacactgtgatcggcagaaagccaacctacgtatacgcttcagaccatccctatttcagcacgtcggattgcattcaagtctgagcgggaagatccaaaagctgaccgataaggattatatgaaacccctcctgctcaaaatacacgtaaacccacctgccgaggttagcacttctctgaaggtttatcaaggacacacactggaaaagacctatatgggtgaggatttcttctgggcgattacaccgattgcaggagattatatcttgttcaagttcgacaaacccgtgaatgtggaatcctacctgttccattctgggaatcaggagcacccgggagacatccttctcaacacgactgtggaggtgttacctttcaaaagcgagggcctcgagatatccaaagaaaccaaagataaaaggctggaggacgggtactttcgtatcgggaagttcgagaatggcgtggccgaaggaatggtagatccctcccttaaccccatctctgccttccggctgtccgtcatccaaaattccgccgtatgggcgattttgaatgagatacacatcaagaaggcgacaaattag

SEQ ID NO: 123371 - DNA, 1608 bp, synthetic construct
  misc_feature 1..1608: note = Description of Artificial Sequence: Synthetic coding sequence
  source 1..1608: mol_type = other DNA
atgcgacttagaaacggtaccgttgcaactgccctcgccttcataactagcttcctcaccctgagttggtataccacgtggcagaatggtaaggagaagctcattgcataccagcgcgagtttctggctctgaaggagcgcctgagaattgctgagcatagaatctcgcagcggagtagcgagctgaacacgatcgtacagcaatttaagagggtgggcgccgaaaccaatggttcaaaggacgcattaaacaaattttccgacaatacactaaaactcctcaaggagttgacctcaaaaaagtcactgcaggtgccatccatatattatcacctgcctcacctcctgaagaacgaggggagcctacagccagccgttcagattgggaatggcaggaccggcgtctctatcgtgatggggatccccactgtcaagcgggaagtcaaatcttaccttatagaaaccctacactccctcatcgataacctttatccagaggagaaactcgactgcgtgatcgtcgtattcattggcgaaaccgacattgactacgttcatggagtcgtcgcaaacttggaaaaagagttttccaaggagatctcatccggactcgtcgaggtgatcagcccccctgagtcatattacccagacctaacaaatctgaaggagacttttggggactccaaagaacgtgtgcgctggaggacaaaacagaatcttgactactgtttcctgatgatgtatgcacaagaaaaaggaatctactacatccaacttgaggacgacattattgttaagcagaactacttcaacacaattaagaatttcgctctacagctcagcagcgaggagtggatgatcctggaattcagtcagctcggcttcattggcaaaatgttccaggcacccgatctgaccctgatcgtggagtttattttcatgttttacaaagaaaaacctatcgactggctgctcgatcatatcctgtgggtgaaagtttgtaacccggaaaaggacgcaaagcactgtgacagacagaaagccaatctgcgaatcagattcaggcctagcctgttccagcacgtgggcctccactcctcactgagtggtaaaatacagaagcttactgataaagactacatgaaaccccttctgttaaagatccacgttaatcctcccgcggaagtttcaactagcttgaaggtgtaccagggacacaccctggaaaagacttatatgggcgaggatttcttctgggccatcacgccaatagccggagactacatactttttaaatttgataaacctgtgaacgtggagtcctacctcttccatagcggtaatcaggaacatcccggcgacatccttttgaataccacagtcgaagttctaccttttaagtctgagggacttgaaatatccaaggagactaaagacaagagactcgaggacgggtatttccggatcgggaaattcgaaaatggcgttgccgagggaatggtcgacccatccctaaacccaatttctgctttccgtctgtccgtgattcagaattccgccgtctgggccatactgaacgaaattcacattaagaaggccacgaattag

SEQ ID NO: 123372 - DNA, 1608 bp, synthetic construct
  misc_feature 1..1608: note = Description of Artificial Sequence: Synthetic coding sequence
  source 1..1608: mol_type = other DNA
atgcggcttaggaacgggacagtagctacagctctggcttttattacctctttcctgacactctcatggtataccacctggcagaatggaaaggagaaattaatagcttatcagcgcgagtttttagcgctaaaggagaggctgagaatcgcggagcacaggatttctcaacggagcagtgagttgaacaccattgtgcagcagttcaagagagtgggagctgaaactaacggcagcaaggacgccctaaataagtttagcgacaacaccctgaaattgttaaaggaattgacctctaagaagtcacttcaggttccatctatatattaccatttaccccacctgttaaagaacgaaggaagcttgcagcctgccgtccagatcggaaacggcaggactggagtttccattgtcatgggcatacccacagttaagagggaagtgaagtcctatctgatcgagactctgcactctctgatcgacaatctgtaccctgaggagaagctggattgcgtgatcgtggtgttcatcggcgagaccgacattgattatgtgcatggagtcgtggccaacctggagaaagaattcagcaaagaaatctcttctggactcgtcgaagttattagcccccctgagtcctactacccggatcttactaacttgaaagaaacctttggagacagcaaagaacgggtgcgctggcggactaaacagaatctggactactgtttcctaatgatgtatgcacaggaaaaaggcatctattacatacagcttgaggatgatatcatagtgaagcagaattactttaacaccataaaaaactttgcccttcagctgagtagtgaagaatggatgatccttgagttctctcagctgggtttcatcgggaagatgttccaggcccccgacctgacactgatcgtggaatttatattcatgttctacaaggagaagcctatcgactggctgttggatcatatactttgggtcaaagtctgtaacccagagaaagatgctaagcactgtgacaggcagaaagcaaaccttaggatcagattcaggcctagtctcttccaacacgtaggacttcatagctctctcagtggcaaaattcagaagcttacagataaggattacatgaaaccgctcctgctcaagattcacgtgaacccaccagccgaggtgagcacaagtcttaaagtgtatcaaggccacactcttgaaaagacctacatgggtgaagacttcttttgggctatcactcccatagcaggcgattatattctgtttaaattcgacaagccagtgaatgtggaatcctatttgtttcactctggtaatcaagagcacccaggcgacattttgctgaacaccacagttgaggttttgccttttaagagtgaaggcctggaaatcagcaaggagacaaaagataagcgactggaagacggatactttaggatcggtaagttcgagaacggcgtggcagagggtatggttgatcccagtctgaaccctatcagcgccttcagactgtctgtaattcagaacagtgcggtctgggccatactcaacgaaatccacatcaagaaagccaccaactag

SEQ ID NO: 123373 - DNA, 1272 bp, synthetic construct
  misc_feature 1..1272: note = Description of Artificial Sequence: Synthetic coding sequence
  source 1..1272: mol_type = other DNA
atgaattattcaatcacagttagcattgtgatgggcataccgaccgtcaagcgggaagttaaaagctatctgattgaaacactccattcactgattgataacctctacccagaggaaaaacttgactgtgtcatcgtggtattcattggagagacagacatcgattatgtacacggcgttgtggcaaacttggaaaaagaattctctaaagaaatcagcagcgggttggtggaggtgatatcacccccagaaagctactacccggacctcacaaacctgaaggagacattcggagacagcaaagagagagtgagatggagaaccaagcagaaccttgattattgcttcttgatgatgtacgcacaggagaaaggcatttactatatccagctcgaagacgatatcattgtcaagcagaattacttcaacactatcaagaacttcgcattacagctgagctctgaagagtggatgattttggagttttcccagcttggctttattggaaaaatgtttcaagcccccgaccttacactcatcgtggaattcatctttatgttctataaagagaaacctatagattggctgttagatcacatactgtgggtgaaggtgtgtaaccctgagaaagatgctaaacactgcgaccgtcagaaggccaacctccgcatacggttccggccgtctctcttccaacacgtcggactacactccagtctgtccggaaaaattcagaagctcacggataaagattacatgaaacctctgcttctgaagatccacgtgaatccgcccgctgaggttagcacaagcctaaaagtataccagggacacactttggagaaaacatatatgggcgaggactttttctgggctataacacccattgctggagactacattctttttaagttcgataagcccgtgaatgtagagagttacttatttcattcagggaatcaggagcacccaggggacatactgctcaatacaacagtggaggtattgccgtttaaatctgaagggctggaaatatccaaggagaccaaagacaagaggctggaggatggctacttcaggatcggtaaatttgaaaatggagttgccgagggtatggtcgacccttccttaaacccaatcagcgctttcagactgtctgtgatccagaacagcgccgtctgggcaatccttaatgaacagcgcgtgttctctggctggtggcagaaaagtagagacaaggctgagggtcctcaggcacccttattgttttag

SEQ ID NO: 123374 - DNA, 1647 bp, synthetic construct
  misc_feature 1..1647: note = Description of Artificial Sequence: Synthetic coding sequence
  source 1..1647: mol_type = other DNA
atgcgtctgaggaacggaacgttccttactctgctgctcttctgcctgtgtgctttcctttcactttcatggtacgccgctttgtccggacaaaaaggtgacgttgtggatgtatatcagagggagttcctggcactgcgggacagactgcacgccgctgagcaggagtccttaaagcgatcaaaggagctgaatttggtcctggatgaaatcaagagagctgtgtctgagcgtcaggcactccgagatggggatggcaatcgcacctggggccgactgaccgaagatccccggctgaaaccctggaacgggtctcataggcacgtgcttcacctgcctactgtcttccatcatctgccccatcttttggccaaggagagttcactacagccagcagtgcgcgtaggtcaaggccggacaggggtgtccgtggtgatgggcatccctagtgtgcggagggaggttcactcttatctgaccgatacgctccacagcctcatctctgagctgtcaccacaagaaaaggaggactcagtgatcgttgtcttaatcgccgaaacagacagccagtacacgtctgcagtcaccgaaaatattaaagccttgtttccgacggaaattcattcaggtctactcgaggtcatcagtcctagtccacatttttatcctgacttcagcagactgagagaatcctttggggatcctaaggaaagggtccggtggcggacaaagcagaacttagactactgcttccttatgatgtatgcgcaatcgaaagggatttactatgtgcagctggaagacgacatcgtggcaaaaccaaactacctaagcaccatgaaaaacttcgcactgcagcaaccttcagaagattggatgatcctggagtttagtcagctcggattcataggcaagatgttcaagtctctggacctgagcctgattgtcgaattcattttaatgttctaccgcgataaaccgattgattggttgctggatcacatcctatgggtcaaagtgtgtaatcccgagaaggatgccaagcactgcgaccggcagaaggcaaacctgaggatcagattcaagcccagtctgttccagcacgtggggacccattcttctctggccgggaagatacaaaagttaaaagacaaagacttcggaaagcaggcgctgaggaaggaacatgtgaaccctcccgccgaggtgagtacgtcactcaaaacctatcagcactttaccctagagaaagcctatctgcgtgaagattttttctgggcctttacaccagccgcaggagacttcatcaggttccggttctttcagcctctgcgtctggagcgcttctttttccggagcggcaatattgagcatccggaggataaattgttcaacacgagtgttgaggtgctcccttttgataatccacagtcggacaaggaggccttgcaggagggacgaaccgcaaccctgcgctaccctcgctcccccgacggttatctacagatcggcagtttctataagggcgtggcagagggagaggtagacccggcatttggacctttagaagcccttcggctctccatacagaccgatagtccagtttgggttattctttctgagattttcttaaagaaagctgactag

SEQ ID NO: 123375 - DNA, 1692 bp, synthetic construct
  misc_feature 1..1692: note = Description of Artificial Sequence: Synthetic coding sequence
  source 1..1692: mol_type = other DNA
atgtctcgtgtagcagggacccggacagacgtgaatgagcttcttcagagatggacacccagatgtgtgcggtggcacactggcggcgcccggcgggtggccctagaccgccccctagtgacagcatgtctgccccccgccggcgacgttgtggacgtctaccaacgcgaattcctcgccttgagggaccgcctgcacgctgcggaacaagaatctctaaaaagatctaaagagctgaatctggtcctggatgagatcaaaagagcagtcagtgagcgtcaggctcttcgtgacggcgacggcaatcgaacctgggggcgcttgactgaagatccaagactcaagccttggaatggcagtcaccggcacgtgctccacctgcctacggtgtttcaccacctgccccacctcctagccaaggaatcctccttacagccagcagttagggtgggccaggggcgaaccggcgtctcagtggtaatggggatccctagcgtgagaagagaggtgcattcttacctgacagatacattacattccctgattagcgagctttcacctcaggaaaaagaagactctgtgatagttgtgctgattgctgagacagacagccagtataccagcgccgtcacggagaacattaaggcactgtttcccaccgaaatccactctgggctgctggaggtcatcagcccatccccacatttttatcctgatttcagcaggctgagggaaagttttggagatccaaaggagagagtgaggtggagaacgaagcagaacctggactactgctttctgatgatgtatgctcagtctaaaggaatctattacgtgcagctagaggatgatatagtggccaagccaaactatctctctacaatgaaaaatttcgcactccagcagccttctgaggactggatgatcctagagttctcgcagctgggattcatcggtaagatgtttaaatcactcgacttaagtctgatcgtagaattcattttaatgttctaccgtgacaaacccattgattggctgttagaccacatcctctgggtcaaggtatgtaatcccgaaaaggacgccaaacactgcgatagacagaaagccaatctaagaatccgattcaaaccaagtctattccagcacgtgggcacccactctagcctagctggcaaaatccagaagttgaaagataaagatttcggaaaacaggcgctccggaaggaacacgttaacccccccgcagaggtgtccacatctttgaagacctatcaacactttaccctggagaaggcatatttacgggaagactttttctgggccttcactccggctgccggggacttcatcagattccgtttcttccaacctctgcggctggaaagatttttcttcagatcagggaacatcgaacatcccgaagataagctcttcaacacgtcagtggaggtgcttccatttgacaaccctcagtcggataaagaggccctacaagaaggacgtacggctacactcagataccctcggtcccccgatggatatttacagattgggtctttttataaaggagtggccgagggcgaggtggaccctgccttcggccctcttgaggcgttgcgactaagcattcagacagatagcccagtctgggtcattctgtctgaaattttcctgaaaaaggctgactag

SEQ ID NO: 123376 - DNA, 1344 bp, synthetic construct
  misc_feature 1..1344: note = Description of Artificial Sequence: Synthetic coding sequence
  source 1..1344: mol_type = other DNA
atgagatttaggatctataagcggaaagtactgattttgacactcgtggtggcggcctgcggctttgttctctggtcttctaatggaagacagaggaagaacgaggctcttgccccccccctactggatgccgagccagccaggggggcgggtggacggggaggggaccacccttcagttgccgtcgggatccgcagagtttccaatgtctccgccgccagtctggttcctgccgttcctcagcctgaagctgataaccttacccttagatacaggtccttggtctaccaactgaattttgatcagaccttgcgaaacgtcgacaaggccggcacctgggctccaagagagctggtactcgtcgtccaggtccacaaccgaccagagtatctgagattgctcctggactctctcagaaaagcccaggggatcgataacgtgctcgttatcttctcacacgatttctggtctaccgagataaatcaactgattgccggcgtgaatttctgccctgtccttcaggtgtttttccctttttccatccagctgtacccaaacgagttccctggttctgacccacgggattgcccaagagacttacccaagaacgcggcacttaagctcgggtgtattaacgctgaataccccgattcatttggccactaccgcgaggctaagtttagtcaaacaaaacatcattggtggtggaaactccactttgtctgggagcgggtcaaaatcctcagggactatgcagggctgatactgttcctggaggaggaccactacctcgccccagatttctatcacgttttcaaaaagatgtggaaactgaaacaacaggagtgtccagaatgcgatgtactcagtctgggcacttacagtgcgtctagaagtttctatggtatggcagataaggtggatgttaagacttggaagtctactgagcataatatgggcctggcactgacccggaacgcataccagaagcttattgagtgcactgacaccttctgtacatatgatgactacaattgggattggacactccagtaccttacagtgtcatgcctgccaaagttctggaaagttctggtcccccagatccccagaattttccatgccggagattgtggcatgcaccacaaaaagacctgcaggccctcgacgcagagcgctcagattgaaagtctcttgaacaacaataagcagtacatgtttcctgagactctcaccatctccgaaaagttcacagtcgtggccatatctccgccccgaaaaaatgggggatggggcgatattagagatcacgaattgtgtaagtcctatcgccgactgcaatag

SEQ ID NO: 123377 - DNA, 1362 bp, synthetic construct
  misc_feature 1..1362: note = Description of Artificial Sequence: Synthetic coding sequence
  source 1..1362: mol_type = other DNA
atggagcgcacagagacaatgcggttccgtatttataagcgaaaggtcctgatattgaccttggtggtggcagcttgcggatttgtcctctggtctagtaacggcaggcagcgtaagaatgaggcccttgcaccccctctcctggatgcagagcctgccaggggggccggtggcaggggaggtgaccacccaagcgttgccgtaggcattcggagggtgagcaatgtgtcggccgcaagcctggttccagccgttccacaaccggaggccgataatttaaccctgcgctatagatctctggtgtaccagctcaacttcgatcagacccttcgaaatgttgacaaagcgggcacctgggctccccgcgagttggtgttggttgttcaggtacacaaccggccagagtacctgcgtttactcctggattctctacgcaaagctcagggtatcgacaatgtcctggtgatcttctcacatgatttctggtcaactgagatcaaccaactcatcgctggggtgaatttctgccccgtcctacaagtgttctttccttttagcatacagttgtaccctaacgagtttccgggaagcgaccctagagactgtcctagagacctccccaaaaacgcggctcttaagctgggatgcatcaatgcggaataccccgattcctttggacattaccgcgaggcgaaattctcccaaactaagcaccattggtggtggaagctgcacttcgtgtgggaacgcgtgaaaattctgcgggactatgcagggctcattctgtttctagaggaagaccactacctggccccagacttctatcacgtctttaaaaagatgtggaaattgaagcagcaggaatgcccggagtgtgatgttctgtctcttggaacctactccgcatccagaagcttttatggcatggcagacaaagtagatgtaaagacctggaaatctaccgagcacaatatgggcctggcgctgacacgcaacgcctatcagaagctgatagagtgcactgatacgttctgtacatacgacgactacaattgggattggacattgcagtatcttacggtttcctgtctgcccaaattctggaaagtgttggtgccacagatacctagaattttccacgccggagattgtgggatgcaccataaaaaaacttgtcggccttctacccagagcgcacagatcgagtccctcctgaataacaacaaacagtacatgttcccagaaacactgacaatttccgaaaaattcacagtcgtcgccattagccccccaaggaaaaacggcggttggggcgatataagagatcatgaactttgtaagtcttacagaagattgcaatag

SEQ ID NO: 123378 - DNA, 2373 bp, synthetic construct
  misc_feature 1..2373: note = Description of Artificial Sequence: Synthetic coding sequence
  source 1..2373: mol_type = other DNA
atgatcaccgtgaaccctgatgggaagataatggtcaggagatgcttagttaccctgagacctttccgtctgtttgtactgggcatagggtttttcaccctgtgtttcctgatgactagccttgggggacaattcagtgctcgccggctaggggactctccattcactattcgaaccgaggtcatgggcggccctgaatccaggggcgtcctgagaaagatgtcagacctgctagagcttatggtgaaacgcatggacgccctggcccgactggagaattcctcagaactgcaccgagctggaggcgatctgcacttccccgcggacagaatgcccccaggcgctgggctaatggaacgcatacaagccatagctcagaatgtatctgatatagcagtgaaggtggatcaaatcctcagacacagtctgttattacacagtaaggtgtctgaagggcgcagagaccaatgcgaggcccccagcgatccaaaattcccagattgctccggcaaggttgagtggatgcgggcccgctggacaagcgacccatgctatgctttttttggcgtggatggaactgagtgttcttttctcatttacctctctgaagtcgagtggttctgccctcccttaccatggcgcaaccagacggcggctcagcgagctccaaagccactgccgaaggttcaggcagtgttccgcagcaacttgtcccaccttctggatcttatgggctccggtaaggaatctctaatcttcatgaagaagcggactaaacgactgacagcccagtgggctcttgctgcccagaggctggcccagaaactcggagcaacccagcgcgaccagaagcagatcttggtgcatatagggtttctcactgaggagagcggcgatgtcttcagcccacgcgtgctgaaggggggcccgctgggtgaaatggtccagtgggccgacattctcacagcattgtatgtcctaggccatgggctccgcgtcactgtgagcttgaaagagctgcagtctaaccttggggttcctccaggccgcggctcatgccccttgactatgccgttgccttttgatctgatatataccgactatcacggattacagcagatgaaacgacacatgggcctgagcttcaaaaaataccgctgcagaatccgtgtcattgacaccttcggcaccgaacccgcatataaccacgaggaatacgctacgctccacggttatcgcacgaactgggggtactggaatctcaatcctaagcagttcatgactatgttcccacacactccagataactctttcatggggttcgtgtcagaggaactcaacgagacagagaagagactgatcaagggcggaaaggcctccaacatggctgtggtttacggaaaagaggcttccatctggaagggcaaggaaaagtttttgggcatccttaacaagtacatggagattcatggtacggtgtattatgagtcccagcgtccgccagaggtgcccgccttcgtcaaaaaccacggactgctccctcagccggaatttcagcaattactgagaaaagctaagctgttcatcgggttcggctttccatatgagggccccgccccacttgaagccatcgctaatggttgcatctttcttcagagccggttcagccctccgcacagcagtctgaatcacgagttcttccgcggtaaacccacctcgagagaggtgttctctcaacatccttacgcggagaatttcataggtaagcctcatgtatggactgtcgactacaacaactctgaggaatttgaggctgcaatcaaagctataatgcggacgcaggtggacccttacctgccctacgagtacacctgcgagggtatgttagagcggatacacgcctatatccagcaccaggacttttgtagggcccctgaccccgccttgcccgaggcccacgcacctcagtcacccttcgtcttggcgcccaacgccacacatttagaatgggctcgcaacacatctctggcacctggagcctggcccccagctcacgctctgagagcttggctagctgtgccaggcagggcctgtaccgacacatgccttgaccacggccttatatgcgaaccttctttctttccttttcttaattctcaggatgcctttttgaaactgcaggttccatgtgactccacagaaagtgaaatgaaccacctttacccagcatttgcacagccaggacaggagtgttacctgcagaaggaaccccttttgttttcctgtgctggatccaatactaaatatcgcaggctgtgtccttgtagagatttccgcaaaggtcaagtggccttgtgtcaggggtgcctgtag

SEQ ID NO: 123379 - DNA, 1185 bp, synthetic construct
  misc_feature 1..1185: note = Description of Artificial Sequence: Synthetic coding sequence
  source 1..1185: mol_type = other DNA
atgatcaccgtgaaccctgacggcaaaattatggtcaggagatgcttggttacccttcggcccttccgactgttcgttctcgggattggattcttcactctgtgctttctgatgacgtctctcggagggcagttttccgcacgacggttgggggattccccctttacaattaggacggaggtgatggggggtcctgagagtagaggtgtacttagaaagatgtctgatctattggagctgatggtaaagaggatggacgcgctggcccgtctcgagaatagtagtgaactacacagagccggcggagatctgcacttcccagcggaccgaatgccccccggagctggcttgatggaacgaattcaggctatcgctcagaacgtgtctgatatcgctgtcaaggtggatcagatccttaggcactctctgctcctgcactccaaagtgagcgaaggacgccgggaccaatgcgaagcgccttcagacccaaaattcccagactgcagcgggaaagtggaatggatgagagcaaggtggacgtccgatccatgttacgcgttctttggcgtggacgggaccgagtgttcttttctgatctacctcagcgaggtcgagtggttttgtccaccactgccctggcgaaaccaaacagccgcacagcgcgcccctaagccccttcctaaggtgcaagccgtgtttagaagcaacctgtcacacctgttggatcttatgggaagcggcaaagaatccctcatctttatgaaaaaaagaacgaaacgcctcacagcccagtgggccctggctgcgcagcgtttggcacaaaaactgggggccactcagcgcgaccagaagcagatcctggtccacattggcttcctgaccgaggaaagcggagacgttttctctccccgggtgctgaaaggtggcccattgggggagatggtccagtgggcagacatactgaccgctctttatgtgctcggccacggactcagggtaactgtgagtttgaaagaactgcagcggcaacgtcgcctgcgatcaagccaagagcaggccagatgcggtgtgatgggagcctgcgagaaaatgctcttggagggggatgtcgcgagcaatactctccttatcgagaagcccagcaaaaaagaaaccgagaaatgcccaaaaaatttagtgacctag

SEQ ID NO: 123380 - DNA, 2406 bp, synthetic construct
  misc_feature 1..2406: note = Description of Artificial Sequence: Synthetic coding sequence
  source 1..2406: mol_type = other DNA
atgcatagcttcgtgaaacatctttgcagtcgatatgttgtggagcgacaggggacgatggctctgccagccttacttacacgtttgctgcccctccgccggctgttcgttctcggcataggattctttacactttgctttctgatgactagcctgggcggacagttctctgccaggcgtctgggcgacagtccctttaccatccgcacggaggtcatgggtgggccagagtctcggggagttctccgaaagatgtctgatctgctcgagctgatggttaagcgcatggacgcccttgcccgattagagaatagttcagagttgcatcgcgccggtggggacctccacttcccagcagaccggatgcctcctggcgccggcttgatggaacgtatccaggcaatcgcccagaacgtgagcgatatcgctgttaaagtggatcaaatattacggcacagcttgctgctgcacagcaaggtgtcagagggccggcgagatcagtgtgaagcaccctctgatcccaaatttccagactgcagcgggaaggtcgaatggatgcgtgcccggtggacaagcgacccatgttacgcattttttggggtagatggaaccgagtgctctttcctgatatatctctctgaagtggagtggttctgcccacctctcccttggaggaatcagaccgcagcacagcgagctcccaaaccactgcctaaggtgcaggccgtgttccggagcaacctttcccatttgcttgaccttatgggcagcggcaaggaatctctaatctttatgaagaaacggacaaaacgcctaacagcacagtgggccctcgccgcccagcgcctcgcacaaaaactgggggccactcagagggatcagaaacagatccttgtgcacattgggttcctgaccgaggagtctggggacgtgttctcccctcgcgtgctaaagggcggtcccctgggggagatggttcagtgggccgacatattaactgcactatacgtgctcgggcacggcctccgtgtgactgtgtccctaaaagagcttcaatctaacttgggggtgccccctggcaggggctcatgccctctcacaatgccactgcctttcgatctgatctacaccgactaccacggcttacagcagatgaagagacatatggggctatccttcaagaaataccgctgccgaattagagttattgatactttcgggacggagccagcctataaccacgaggagtatgcaactctgcacgggtatagaacgaattgggggtactggaatttgaaccccaagcaatttatgactatgtttccccataccccagataatagctttatgggctttgtttcagaagagttgaacgaaacagagaagcgcctgatcaaggggggtaaggctagtaatatggcagtagtttatgggaaagaagccagcatttggaaaggaaaagaaaagttccttggcatcctgaacaagtatatggagatccacggtaccgtgtactacgagtctcaaaggccacccgaagtccccgcttttgttaagaaccacggacttctgccacaacctgagttccagcaacttcttcggaaggctaagctctttatcggattcggtttcccgtacgaaggccctgccccccttgaggcaattgcaaacggatgcatctttttacagtccaggttcagtcctccccactcctccctcaaccatgagttttttcgtggcaagccgaccagcagggaggtgttctcccagcacccttacgcagagaactttatcggcaaaccccacgtgtggacagtcgactataacaattctgaggaattcgaagcagcgatcaaagctatcatgcgtactcaggtggatccttatctcccctatgaatatacctgcgagggaatgctagagcgcatccatgcttatatacagcatcaggacttctgccgagctccggatccagccttgccagaagcacacgcgccccaatcgcccttcgtgctcgcacccaacgccacacacctggaatgggctcgaaacacctctcttgcccctggggcctggcctcctgcacacgccctgagagcatggctcgcagtgcccgggagagcatgtaccgatacctgcctcgatcacgggctcatctgcgagccttcattctttccctttcttaatagtcaggatgcttttctgaaactccaggtcccctgtgattcaactgagtccgagatgaaccacctctaccccgcctttgctcagccgggacaagaatgctacctgcagaaggaaccactgctcttcagctgcgcgggtagcaacactaagtaccggcgtctctgtccctgcagggactttaggaagggtcaggtcgctctctgtcaaggctgtctgtag

SEQ ID NO: 123381 - DNA, 1602 bp, synthetic construct
  misc_feature 1..1602: note = Description of Artificial Sequence: Synthetic coding sequence
  source 1..1602: mol_type = other DNA
atgaagatgcggcgctataaacttttcctgatgttctgtatggccgggctgtgcttgataagcttccttcacttctttaagactctgagctacgttacgttcccgagagagctggcgagtctgtctccgaatctggtgagctcttttttttggaacaatgctcctgtcaccccccaggcgtctccagagccaggagggccggatttgctgcggacccccctgtactctcacagtcccctgcttcagccactccctccctcaaaggccgctgaggagttgcatagggtggatctagtcctgccggaggacacaacagagtattttgttcgtaccaaggccggcggagtgtgcttcaagccgggaacgaaaatgttggaacgtccccccccaggacggccggaggaaaagcccgaaggagctaacgggagctcagccagaagaccaccccgctacctgcttagtgcgcgtgaacgtaccggcgggagaggcgcacgtcgcaaatgggtcgaatgcgtgtgtttacccggttggcatgggccttcctgtggagttcctactgtcgtgcagtacagtaacctacccaccaaagaaaggctggtgccacgagaggtaccccgacgtgtaatcaacgccataaacgtcaaccacgaattcgacttgttagacgtgcggttccacgagctgggggatgtggtcgatgctttcgtcgtttgtgagagtaatttcaccgcatacggggagcctcgacctctgaagttccgcgaaatgctgaccaacggtaccttcgagtatattcggcataaggtgctatacgttttcttggaccacttcccaccgggtggccggcaagacggttggatcgccgacgattatctcaggacgttcctcacacaggacggagtgtcgcgtcttagaaacctcaggcctgacgacgtcttcattatcgatgacgcggacgaaatccccgccagggacggtgtgttgttcctgaaactgtacgatgggtggacagagccctttgcttttcatatgcgtaaatccctgtacggattcttctggaagcaacctggcacgctggaggtggttagtggctgtaccgtcgacatgctacaggccgtttacgggctggatggcatccggctccgacggcgacagtactataccatgccaaactttcgccagtacgagaataggaccgggcacattctggtgcagtggtccctcggaagccccctccattttgctggatggcactgctcctggtgcttcactccggagggcatctatttcaaactggtatcagcccaaaatggcgatttccctcgttggggggattacgaagataagcgggatcttaattatatccggggtctgattcgaaccggagggtggttcgatggaacccagcaggagtacccccctgcagatccttcagagcacatgtatgcgcctaaatatcttctcaagaactacgatcgatttcattatctgttggacaatccttatcaggagccacggagtacagcggctggaggatggcgacatagagggccggaagggaggccacctgcgcgaggtaaattggacgaggcagaagtctag

SEQ ID NO: 123382 - DNA, 327 bp, synthetic construct
  misc_feature 1..327: note = Description of Artificial Sequence: Synthetic coding sequence
  source 1..327: mol_type = other DNA
atggagtcttgtagttgccaccccggatctggcgtgcaatggagagaccacggctctctccaactcccccctcccggctttaaaatgaagatgcgaagatacaagttatttttaatgttctgcatggccgggctttgtctcattagctttctgcacttcttcaagaccctctcatatgttacattcccccgcgagctggcctccttgtcacccaacctcgtcagctctttcttctggaacaacgccccagtgactccccaggcgagtcccgaacccgggggccctgatttgttgaggacacctctgtacagccactccccgctgtag

SEQ ID NO: 123383 - DNA, 486 bp, synthetic construct
  misc_feature 1..486: note = Description of Artificial Sequence: Synthetic coding sequence
  source 1..486: mol_type = other DNA
atgaagatgagaagatacaagctcttcctgatgttttgcatggcagggctatgcctcattagcttccttcacttctttaagactctctcatacgtcacattcccccgggagctggcctctttaagccctaaccttgtcagttcattcttttggaataacgcccctgtgaccccccaggctagccctgagcccgggggccctgacttactgcggactcccctgtactcacacagccctctcctccagcctctgccgccttctaaggccgccgaggagctgcacagggtggacctggtcctgcccgaggatacaacagagtattttgttagaactaaggctgggggagtttgtttcaaaccaggcacgaagatgttggagagaccgcccccagggcggcctgaggagaaacctgagggagctaacgggtcaagtgcccgcaggccacctcggtatctcctgagcgctcgggaaaggaccgggggatag

SEQ ID NO: 123384 - DNA, 1044 bp, synthetic construct
  misc_feature 1..1044: note = Description of Artificial Sequence: Synthetic coding sequence
  source 1..1044: mol_type = other DNA
atggtgagcagccaaaaactggaaaagccaatagagatgggttcttctgaacccctacccatcgctgacggcgacagaaggcggaagaagaaacgacgtggacgggcaaccgattccctcccaggcaagttcgaggatatgtacaagctgacatctgaactgcttggagagggcgcatacgccaaggtgcagggcgctgtctcgttgcagaatggtaaagagtatgctgtgaaaatcatcgaaaaacaagcaggccattctcgctcccgcgtattcagggaagtcgagactctgtatcaatgccagggtaacaagaacattctggaactgatcgaattctttgaggacgatacaaggttctacctggtgttcgaaaaactgcagggcggatcaattttggctcacatccaaaaacagaagcattttaatgagcgggaggcctcaagagtggtgcgcgatgtggccgccgctctcgattttcttcatacaaaggggattgcccatcgcgacctgaaacctgagaatatcctgtgcgagagccctgaaaaagtgagcccggttaagatttgtgacttcgacttgggcagcgggatgaagcttaacaattcctgtaccccaattacaactcctgagctcaccaccccttgcggatctgctgagtacatggccccagaggtggtcgaggtgtttacagatcaggccacgttctatgataaaaggtgtgatctgtggagcctgggagttgttctttacatcatgctcagcggctatccaccgtttgtcgggcactgcggggcagactgcggatgggaccggggagaagtctgtcgggtctgtcagaataagctgttcgaatccatacaagaggggaagtatgaattcccagacaaggattgggctcacatcagttcagaggcaaaggacctgataagcaagcttctggtccgagacgccaagcaacgcctctctgcagcacaggtgctgcagcacccctgggtgcaaggtgaacagcaacacaacggccctgacgctcttcgcagctag

SEQ ID NO: 123385 - DNA, 990 bp, synthetic construct
  misc_feature 1..990: note = Description of Artificial Sequence: Synthetic coding sequence
  source 1..990: mol_type = other DNA
atggcaaaaagcatgcctagcaaatccagccgcaacaagcagggaacagttggcgtgggatgcttcgaaagatggaggcggtgtatctcagttcgcgaaacttcctctatcctcgcccacatccagaaacaaaaacacttcaacgaacgcgaggcttccagggtggtgcgagacgtcgcagcagccctggactttttgcacaccaagggaatcgcccacagagacctcaaacctgagaacatcctctgcgagtcacccgaaaaggtcagcccagtaaaaatatgtgattttgatctgggttccggtatgaagttgaataatagctgtactcccattaccacccccgaattaacaacaccgtgcggcagcgccgaatacatggcccccgaggtcgtcgaggtgttcactgaccaggcgacattttatgacaagcgatgcgacctgtggtcactgggcgtggtcttatacattatgttgagcggataccccccgtttgtgggtcactgtggcgccgactgtggctgggatcgaggcgaagtgtgtcgcgtgtgtcagaataagctgtttgaatccatccaggaaggcaagtacgaatttcctgataaagattgggcccacatcagcagcgaagccaaggatttgatcagcaagttgctggtgagagacgccaaacaacgcctaagcgcagcgcaagtgttacagcacccctgggtccagggacaggccccggagaagggattgccgacaccacaagtccttcagagaaatagctccactatggatttgactctgttcgctgctgaggcaatcgcccttaatcgtcagttgagtcagcacgaagagaacgagctggcggaagagccagaggccctggctgatggcctgtgttccatgaagttgagcccgccctgtaaaagtcggttggctagaaggagggccctggctcaggccggtcggggtgaagaccgttctcctccgactgccctgtag

SEQ ID NO: 123386 - DNA, 1275 bp, synthetic construct
  misc_feature 1..1275: note = Description of Artificial Sequence: Synthetic coding sequence
  source 1..1275: mol_type = other DNA
atggtttcatcacagaagctggaaaagcccatcgagatgggttcatccgaaccactccccatcgccgatggagacagaaggcggaaaaaaaaaagaagagggcgcgccacggacagcctccctggcaagttcgaagacatgtacaaactcacgtctgagcttctcggagaaggcgcatatgctaaagtgcagggtgctgtcagtctccagaatggaaaggaatacgctgtaaagatcattgagaagcaagccggccacagcaggagtcgagtattccgcgaagtcgaaacactgtatcagtgccagggcaacaaaaatatcttggagctgatcgaattcttcgaagatgatacacgcttttacctggtcttcgagaaactccaaggagggtccattctagcccacatccagaaacagaagcacttcaatgaaagagaagcgtcccgggtggtgcgggatgttgctgccgcgctggactttctccacaccaagggcatcgcccatcgcgatctgaagccagagaacattttatgcgagagcccggaaaaagtgtcacctgtgaaaatatgcgacttcgatttgggcagtgggatgaaacttaataacagctgtacgcccattaccacccccgagctcactacaccctgcggtagcgccgagtatatggctccagaggttgtcgaagtgtttaccgatcaggctacattctatgataagaggtgcgatctttggtctttgggggtagtcttgtatatcatgttgtccgggtacccaccattcgtgggtcactgtggagcagattgtggttgggatcgtggcgaggtctgtagagtctgccagaataagctttttgagtctatccaggaaggtaagtatgagttccctgacaaagactgggcacacataagctccgaagccaaagatctgatcagcaaactcttagtcagagatgccaagcagcgtctctcagccgcacaggtattgcagcacccctgggttcagggtcaggcccctgagaaggggttacctacgccccaggtgctgcagcgtaactcgagtacaatggacttaacgttattcgctgccgaagcaattgccctgaaccgccagctttcccagcacgaggagaatgagcttgctgaagaaccagaggccctggccgatgggctctgctccatgaaactctccccaccgtgcaaaagtaggctagcacgccggcgggcgctggctcaggccggccgaggagaagaccgctcgcctcctacagcattatag

SEQ ID NO: 123387 - DNA, 1398 bp, synthetic construct
  misc_feature 1..1398: note = Description of Artificial Sequence: Synthetic coding sequence
  source 1..1398: mol_type = other DNA
atggtgtcgtcacagaaactagagaaacccatcgagatgggaagtagtgagccactccccattgctgatggcgataggcggcgaaagaagaagcgacgtggacgcgcaacagacagtctccctggcaaattcgaggatatgtacaagctgacttcagagttgctgggggaaggcgcttatgcaaaggtgcagggcgctgtcagtttgcagaatggaaaggaatacgctgtgaagataattgagaagcaagccggtcacagtcggagcagagtgttccgcgaggtggaaactctgtaccagtgccagggcaataaaaacattctggagctgatcgaattctttgaggatgatacgaggttctatctggtgtttgagaagctgcagggcggctcaattctggcacacatacagaaacaaaaacactttaatgaacgagaggcttctagggtggtcagagatgttgctgcagctctggactttctgcacaccaaagacaaagtaagcctgtgtcacctgggttggtcagccatggccccatctgggctgacagccgcccccacttctttgggctcttccgatcctcccaccagcgcctctcaggtcgctggcaccacaggaatcgcccatagggacctgaagcccgagaatattctgtgtgaaagccccgagaaggtttcccctgtgaagatttgtgatttcgatctcggctccggtatgaagttgaacaactcttgcactcccatcactaccccagaattaactaccccttgcggcagcgccgaatatatggcgcccgaagtggtggaagttttcaccgatcaggctacgttttatgacaaaaggtgcgatctctggagcctgggcgtggtgctgtacatcatgttgtccggctacccaccatttgtggggcattgtggggccgactgtggatgggataggggggaggtctgcagagtgtgtcaaaataagctatttgagtcaatccaggaagggaaatacgaattccctgataaagattgggctcatataagttccgaagctaaggacttgatttccaagctgcttgtgagggatgcaaagcagcggctaagcgccgcccaggtgttacagcacccatgggtgcagggacaggctccggagaagggcctccctacaccccaggtcctacagcgaaatagctctaccatggacttgacattgtttgccgccgaggctattgctctgaatcgccagctcagtcagcatgaagagaacgagctcgccgaggagcccgaggcactggccgacggtctgtgtagtatgaaattgagccccccttgcaaatctcggctggcacgtcggcgagcattggcacaggccggccggggcgaagacagatcgcctcccacagccctttag

SEQ ID NO: 123388 - DNA, 1044 bp, synthetic construct
  misc_feature 1..1044: note = Description of Artificial Sequence: Synthetic coding sequence
  source 1..1044: mol_type = other DNA
atggttagttctcagaaactggagaaacctatagagatggggagcagtgaaccgctccccatcgccgatggagaccggaggcggaaaaaaaaacgtcgtggcagggctactgacagcctgcccggaaaattcgaagacatgtacaagctgactagtgaactgttgggcgaaggggcttacgctaaagtgcaaggagcagtgagcctccagaatgggaaagagtatgccgttaagatcatcgagaaacaggccgggcattcaagatccagagtcttccgagaggtggaaacactgtaccagtgtcaaggaaataaaaatattcttgagcttattgagtttttcgaagacgatacccgcttctatttggtatttgagaaactacagggtggctccatcctcgcccatattcagaagcagaagcatttcaatgaacgcgaagcctctcgcgtcgtaagggatgtggctgccgcccttgacttcctgcatacaaaaggtattgcacacagagatctaaaacctgagaacatactttgtgagagtccggagaaggtgtctcctgtcaagatctgcgatttcgacttaggtagtggtatgaagctgaataacagttgtacccccatcacaactccagagctcaccaccccctgcggcagcgccgaatatatggctccggaggtggtggaagttttcaccgaccaggcgacattttacgataagcgctgcgacctctggagtttgggcgtggtgttatatataatgctttctggatacccaccatttgttggtcattgtggcgcggactgtggctgggatagaggggaagtctgtagagtgtgccagaacaaattattcgagtctatccaggaggggaagtacgagtttcccgataaggattgggctcatatcagttccgaggctaaggacctaatctcgaagctcctggtgcgggatgctaaacagcgcctgtctgccgctcaggtcctacagcacccttgggtgcagggcgaacagcaacataatggccccgatgccctgcgttcatag

SEQ ID NO: 123389 - DNA, 537 bp, synthetic construct
  misc_feature 1..537: note = Description of Artificial Sequence: Synthetic coding sequence
  source 1..537: mol_type = other DNA
atggtctcaagccagaaactggaaaaacctattgaaatgggatccagcgagccactgcctattgctgacggtgatcgacgcagaaaaaagaaacgaagaggccgcgcaacggactctctgcccggaaagttcgaggacatgtacaagcttaccagcgagcttctcggtgagggcgcctatgcaaaagtccagggcgccgtttccctgcagaatggcaaagaatacgcggtaaaaatcattgagaagcaggctgggcattctcggagccgtgtgtttagggaggttgagacgctgtatcagtgccagggcaataagaatattcttgaactaatcgagtttttcgaagacgacacaagattctaccttgtttttgagaaactccagggcggcagcatcctcgcccacattcagaagcagaaacatttcaatgaacgggaggcctcacgagtcgtcagagatgttgcggcggcgcttgactttttgcacacgaagggtatcgcacaccgggacctgaaaccggaaaatatcctctgctag

SEQ ID NO: 123390 - DNA, 306 bp, synthetic construct
  misc_feature 1..306: note = Description of Artificial Sequence: Synthetic coding sequence
  source 1..306: mol_type = other DNA
atggtgtccagccagaagctggaaaagcctatcgagatggggtcatctgaacctctccctatcgcggatggcgacagaaggcggaaaaagaagaggaggggtagggccacagactctctgccaggcaaatttgaagacatgtacaagttgacgagtgagcttctgggcgagggggcctacgcaaaggtacaaggtgccgtgtcactacagaacggcaaggagtatgccgtgaaaatcattgagaagcaagcaggacattcaagaagcagagtgtttcgcgaggtggagaccctgtaccagtgctag

SEQ ID NO: 123391 - DNA, 303 bp, synthetic construct
  misc_feature 1..303: note = Description of Artificial Sequence: Synthetic coding sequence
  source 1..303: mol_type = other DNA
atggtgtcctcccagaaactcgagaagccaattgaaatggggtcctctgagccgctgcccatcgctgatggggaccgccggcggaaaaagaagaggagaggacgcgcaactgattcactgcccgggaagtttgaagacatgtataagctgacaagtgagctgctgggcgaaggcgcctatgcaaaagtccaaggggctgtgagcctccagaatggcaaagaatacgctgtaaagataatcgagaagcaggctggacactctaggtcacgcgtcttccgagaggtcgaaacactctatcagtag

SEQ ID NO: 123392 - DNA, 402 bp, synthetic construct
  misc_feature 1..402: note = Description of Artificial Sequence: Synthetic coding sequence
  source 1..402: mol_type = other DNA
atggtaagctcccagaagctggaaaagcctatcgagatgggttcgtctgagcccttgcccatcgcagacggggatcgaaggcggaagaaaaagaggaggggtcgcgcgacagactcgcttcccggaaaatttgaggatatgtacaaactcacctctgaactactgggggaaggcgcctatgccaaggtccaaggcgccgtaagtttgcagaacggtaaggaatacgccgtgaaaattatcgagaagcaggcaggccacagcaggtctcgggtgttccgggaggttgaaaccctctaccagtgccagggaaataagaacatcctggagttaattgagttcttcgaagacgacacccgtttttacctggttttcgagaagctccaggggggcacgtaccgttag

SEQ ID NO: 123393 - DNA, 1398 bp, synthetic construct
  misc_feature 1..1398: note = Description of Artificial Sequence: Synthetic coding sequence
  source 1..1398: mol_type = other DNA
atggtgcagaaaaaaccagcggagctccagggcttccaccgtagttttaaggggcagaacccctttgagctcgccttttcgttggaccagccggatcacggcgacagcgatttcggcctccagtgttccgcccgccctgatatgcctgcttcccaaccgatagatatccctgacgccaagaagcgaggtaagaaaaagaaacggggccgagccactgactccttcagcggacgcttcgaagacgtttatcagctgcaggaggatgtgctgggcgaaggcgcgcacgctagagtccaaacatgcatcaacttaattactagccaggaatacgcggtaaagatcatcgagaagcagcccggtcacatacgctccagggtctttagagaagttgagatgctatatcaatgtcagggccaccgtaacgtcctggagctgatagaattctttgaagaggaggaccgcttctatctagtgttcgagaaaatgagaggcggtagcatcctaagtcacatccataagagacggcattttaatgaattggaagctagcgtcgttgttcaagacgtcgcgtccgccctagacttcctccacaacaaaggcatcgctcatcgggacttgaagcccgagaacatcctttgcgaacacccaaaccaggtgtcgcccgtgaaaatatgcgactttgacctcggttctggaataaagcttaatggggactgtagtccaatttcaacaccagagcttctgaccccttgcggaagcgccgagtacatggcccctgaagttgtcgaagcgttttccgaagaagcttccatctatgacaaaagatgcgacttgtggtctctgggagtcatcctctacattctactgtccggttaccccccatttgttggcagatgtggatcagactgtggctgggaccgcggcgaagcctgccccgcatgtcagaatatgcttttcgaatctatccaggaaggcaagtatgagtttcctgataaggattgggctcacatctcttgtgcagctaaggatctgatttcaaaactgctcgtgagggacgccaagcagcgtctgagcgccgcacaagttcttcagcacccctgggtccagggctgcgcacccgagaataccctgccaacccccatggtcctccaacggaacagttgcgcgaaagatctgacgtcatttgctgccgaggccattgctatgaataggcagctggctcagcacgacgaagatctggcagaagaagaggctgcagggcagggacaacctgtgctagtccgtgcgaccagcagatgcctgcagctgtctccccccagccagagcaagctcgcgcaacgtcggcagcgcgccagcctgtcatccgctcctgtagttttagttggtgatcacgcatag

SEQ ID NO: 123394 - DNA, 1245 bp, synthetic construct
  misc_feature 1..1245: note = Description of Artificial Sequence: Synthetic coding sequence
  source 1..1245: mol_type = other DNA
atggtccagaagaaacctgccgaactgcaggggttccacaggtcattcaaggggcagaatccattcgagctggctttctcactcgaccagccggatcacggcgacagcgactttggcctacaatgctcggcgaggccggatatgcccgcctcccagcccattgacatccccgacgccaagaaaagaggtaagaagaaaaagcgggggagagccacagattctttcagcggacgcttcgaggatgtgtatcagctccaagaggacgttcttggagaaggagctcacgccagagtacagacgtgtatcaacttgattactagtcaagagtatgctgtaaagatcatagagaagcaaccgggacacattagatcacgggtgtttcgggaagtggaaatgctgtaccaatgccagggtcacagaaacgtcctagaattaattgagttcttcgaagaagaagatcggttctatctggtcttcgagaagatgcgagggggctccatactaagccatattcataaacgcagacacttcaacgagctcgaggcttctgtagtcgtgcaggatgtcgccagtgctttggattttctgcacaacaagggaatagctcatagagacttaaagcccgagaatatcttatgtgagcacccaaaccaggtgtcccctgtcaagatctgtgactttgatttgggtagtggtattaagctgaacggtgactgctctcctatttccacaccggagctactcacaccctgcggaagtgctgagtacatggctcctgaagtggttgaagcatttagtgaggaggcaagtatttatgacaagcgctgcgacctttggtcacttggagtcatcctttatattctgctgtccggctacccaccgtttgtggggcgatgtggaagcgactgcggttgggatagaggcgaggcgtgtcctgcgtgccagaacatgctgtttgagtccatccaggagggaaagtacgaatttcctgataaggactgggcacacatttcgtgcgccgctaaggatctcatatctaagctgctagtccgagacgccaaacagcggctgagcgcagctcaggtgctgcagcacccctgggtgcagggctgtgcccccgaaaacactctgcccacgcccatggttctccagagatgggattcccacttcttgctgccgccacatccttgtaggatacacgtgcggccaggcggcctggttagaacggtcaccgtaaatgaatag

SEQ ID NO: 123395 - DNA, 1005 bp, synthetic construct
  misc_feature 1..1005: note = Description of Artificial Sequence: Synthetic coding sequence
  source 1..1005: mol_type = other DNA
atgctgtaccagtgtcaaggccatcgcaatgtccttgagcttatcgagtttttcgaagaagaggatcgtttttacctagtgtttgagaagatgcgcggaggctccatcctcagccacattcataagcggcgccactttaatgaactcgaggcgagcgtggtggttcaggacgtcgcctccgctctcgatttcttacataacaagggaatcgcacaccgagatcttaagcccgaaaatattctgtgcgaacaccctaaccaagtgagtccggtgaagatttgtgactttgatcttggctcagggattaaacttaatggagattgttctcccatttccacgcctgaactccttaccccttgcggatctgcagagtacatggcaccggaagtggtcgaggccttctcagaagaggctagtatttacgacaagcggtgtgatctctggagcctgggcgtaatcctgtacatattattgtcgggctatcctccatttgtggggcgctgcggttccgactgcgggtgggacagaggcgaggcttgtcctgcctgccagaacatgctctttgagtccatacaggaaggtaaatacgagttcccagacaaagactgggcacacattagttgtgccgcgaaagatttgatttctaagctgctggtgagggacgctaagcagcggttgtcagctgctcaggtactgcagcacccctgggtgcaggggtgtgctccagaaaacacgctgcccacccctatggttcttcaaagaaattcttgcgcgaaagatctgacgtcttttgcggccgaagccattgcaatgaaccgccaactggctcagcacgacgaggacctcgcagaggaagaagcagctgggcagggacagccagtactggtgcgcgcaacatctcggtgcttgcaattatctcctcctagccagtccaaacttgcccagcgacggcagcgtgctagcctctccagtgcgcccgtggtcctcgtgggagaccacgcttag

SEQ ID NO: 123396 - DNA, 1218 bp, synthetic construct
  misc_feature 1..1218: note = Description of Artificial Sequence: Synthetic coding sequence
  source 1..1218: mol_type = other DNA
atgcccgcctcacagccaattgatattccggacgccaaaaaacgggggaagaagaaaaagcgcggtcgggcgacagattccttcagcggccgattcgaagatgtttatcagctgcaggaggacgttctgggggaaggtgctcatgcccgggtgcagacatgtattaacctcatcacatctcaggagtacgccgtcaaaataatcgagaagcagcctggccatattcgcagccgcgtgtttagggaagtcgaaatgctgtaccagtgtcagggccataggaatgtcctagagttaatagaaaagatgaggggtggcagcatactttcccacattcataaaaggaggcattttaatgagctggaggccagtgtcgtggtccaagacgtggccagcgctctggattttttgcacaacaaagggatcgctcacagggatctaaaacccgagaatattttgtgtgaacaccccaaccaggtcagcccggtgaaaatatgtgactttgatctggggtctggtatcaaactgaatggagactgtagtccaatatctacccctgaattgctcaccccctgcggatcggccgaatatatggcccctgaggtggttgaagctttttcggaagaggcctcaatttacgacaaaagatgcgatctatggtctcttggcgtgatcttatatattctcctgtccggatatcccccattcgtgggacgctgcggctcggactgtggctgggatcggggcgaggcatgcccggcctgccagaatatgctgtttgagagcattcaagagggcaaatatgaattccctgacaaagactgggcccacattagttgcgctgcaaaagacctcatcagcaagctgttagtgagggatgccaagcagagactctcagccgcacaggtcctgcagcacccttgggtccaggggtgtgctcctgaaaataccctaccgaccccgatggtcctgcaacgaaatagctgtgccaaagatctcacttcttttgcagctgaagccatcgccatgaacagacagctggcccaacatgacgaggatctggcagaagaagaggcggccggacagggccagcctgtgctcgtcagggcaacctcccggtgcttgcagttatctcccccttcacagagcaaacttgctcagcggagacagcgagcttctctttcctccgccccagttgttcttgtgggcgaccacgcctag

SEQ ID NO: 123397 - DNA, 2388 bp, synthetic construct
  misc_feature 1..2388: note = Description of Artificial Sequence: Synthetic coding sequence
  source 1..2388: mol_type = other DNA
atgtctgctcggacacctctccctaccgtcaatgagcgcgacactgaaaatcatacttcggttgacggctatacagagccccacatacaaccaaccaagagctcctctagacagaacatccccagatgtcggaacagcattactagtgccacggacgagcaacctcatatcggaaattatcggcttcagaaaactatcggcaaaggaaatttcgcaaaggtgaaactagccagacacgttctcacaggcagagaagtggccgtgaagattatcgacaagacccagctgaatcccacatccctgcaaaaattatttcgcgaggtgaggatcatgaaaatcctgaaccatccaaatatcgtgaaattgtttgaggtcattgaaacagagaaaaccctgtacctagtaatggaatacgcgagcgggggagaggttttcgactacctcgttgctcatggacgaatgaaggagaaggaggctagagcaaagttcagacagattgtgagcgccgttcaatactgtcaccagaagtatatcgtccatagggatcttaaagcagaaaatctgctgttagacggcgacatgaacattaaaattgccgacttcggatttagcaatgagtttaccgttggcaataaattggacacattctgtgggtccccaccttacgccgctcccgagctgtttcaggggaagaaatatgacggacccgaggttgatgtgtggtctctgggagtcattctgtacacactcgtgtcgggatctctgcctttcgatggacagaacttgaaggaactacgtgagcgggtgctcagaggtaaatacagaataccattttacatgtcgaccgattgtgagaatcttctgaaaaagttactcgtgttaaatccgatcaagcgaggatccttggagcaaatcatgaaagataggtggatgaacgtgggtcatgaagaagaggagctgaaaccatatacagaaccggatcctgacttcaatgacacaaagcggattgatattatggtaacaatgggttttgcccgggacgaaataaatgatgctctgattaatcagaaatacgacgaggttatggcgacatacatcctgctgggcagaaaaccccctgaatttgaaggcggagaatccctgagctctggcaacttgtgccagcgatctcgcccgtcctccgacctcaataactccaccctccagagtcctgctcacctgaaggtgcagcgaagtatctcagctaaccaaaagcaacggcggttttctgatcatgctggaccgtccatccccccagcagtttcgtatactaagcgtcctcaggccaattctgtcgagtccgagcaaaaagaggagtgggacaaggacgtggctaggaaactggggtcgacgacagtgggcagcaaaagtgagatgacagcctctccgctggtgggccccgagagaaagaaaagctccaccattccatctaataatgtgtactcaggcgggagtatggcgcgcaggaatacatatgtctgcgaacggaccactgataggtacgtggcgttacagaatgggaaggattcatctttgactgagatgtccgtgtcttctataagctcagccgggagttcagtggcgtcagcggtacctagcgcaagacccagacaccagaaatctatgtcaacttcggggcaccctattaaagtgacactcccaaccatcaaagatggctctgaggcataccgccccggcacgacgcaaagagtacccgccgcctcacccagtgcacactcgatctcaacagctacacccgatcggacccgattcccacgggggtcttcctcacgctctacgtttcacggagaacagttacgggagaggcgcagcgtggcttataacgggcccccagcaagccccagccatgagacgggagcctttgctcatgcccggagagggaccagcaccggaatcatctcaaaaattacatctaaattcgtgcgccgtgaccctagcgagggggaggcgtcaggccgtactgacacgtcacgctccactagtggcgagcccaaggagagggacaaggaagagggaaaggatagcaagccaagatctctccgcttcacatggagcatgaagacaacatcttccatggacccaaacgatatgatgcgagaaatccgtaaggtgctggatgccaataattgcgattatgagcaaaaggaacgtttcctcctcttctgcgtgcatggggatgctcggcaagacagcctcgtgcaatgggaaatggaggtgtgtaaactgccaaggctctctttgaacggtgtgagattcaagagaataagtggcacttccatcgcttttaagaacatcgcatccaagatcgccaacgaactgaagctgtag

SEQ ID NO: 123398 - DNA, 2277 bp, synthetic construct
  misc_feature 1..2277: note = Description of Artificial Sequence: Synthetic coding sequence
  source 1..2277: mol_type = other DNA
atgtccgcccgaacgccccttcctaccgtgaacgagcgagacacagaaaaccacacttctgtggatggctacactgaaccacacatccagccaaccaaatcttcatcacgacagaatattcctcgatgcagaaactcaattaccagcgccaccgacgaacagccccatattggtaattataggctgcagaaaaccatcggcaaaggcaatttcgccaaggtgaaactcgccaggcacgttctgacaggccgcgaagtcgccgtaaaaataattgataaaacacagctgaatccaacctctctgcaaaaattatttcgcgaagtgcgcattatgaaaattctcaaccatcccaacatcggagaggtgtttgattatctggtagcacatggaagaatgaaggaaaaagaggctcgggctaagttccgacagatcgttagcgctgtacagtattgccatcaaaaatacattgtccaccgcgatctgaaagccgaaaaccttctgctggatggggacatgaacatcaaaattgccgacttcggcttcagcaatgagttcacagtgggtaataaacttgacaccttttgtggctccccaccttacgccgctcccgaactgtttcagggcaaaaaatacgacggacctgaggtagacgtgtggtcactcggggtgattctatacacattggtgtccgggtcgctgccttttgacgggcaaaatctcaaggaactccgggaacgtgtgctgaggggcaagtatagaatacccttctacatgtcaaccgattgcgaaaatctgcttaagaagctgcttgtcttaaatcccatcaagagggggtccctggaacagatcatgaaggaccggtggatgaacgtgggacatgaagaggaagagctcaaaccttataccgagcccgatccggattttaacgacaccaagcgaatcgatatcatggtaactatgggattcgcccgggacgaaatcaacgacgctcttatcaatcaaaaatatgatgaagtcatggctacatatatcctgctcggaaggaaaccacctgaatttgaaggaggagaaagcctcagcagcggcaacttgtgtcagagaagccgccctagctccgatctgaataatagcaccttgcagagtcctgcacacctgaaagtccagcgctcaatctcggcgaaccaaaagcaacggagatttagcgatcacgcaggcccatcaataccccccgccgtatcctacaccaaaaggcctcaggctaactcagtggaaagcgagcagaaggaggagtgggacaaggatgtggctcggaaattagggagcactacagtgggctccaagagcgaaatgactgcaagcccattggtggggccggagaggaagaagagttccactatccctagtaataacgtctattctggaggctccatggctcgcaggaacacctatgtttgcgagcgcacgacggaccgttatgtagctctgcaaaacggtaaagattccagcttaaccgagatgtcagtatccagcatcagctcggccggctcttccgtggcgagtgccgtgccttccgctcgaccaaggcaccagaaatcaatgtcgacaagtggtcacccaatcaaggttacattgcctaccattaaggatggcagcgaggcctaccggcctggcacaacgcagagagtgcctgccgccagtccatctgcccactctatatctacagccacccctgatagaacacgattcccccggggaagcagctcgcgtagtacctttcacggagaacagcttcgagagaggcggtcagtggcttataatggtccacccgcaagtccctcccacgagaccggggcttttgctcacgctcgcaggggcactagcaccggcatcatctcaaaaatcaccagcaagtttgtccgccgcagcaccagcggcgagcctaaggagagggacaaggaggagggcaaggactcaaaaccccgctctttgcggttcacatggtcaatgaaaaccacaagcagcatggaccctaacgacatgatgcgggaaatcaggaaagtccttgacgccaataactgcgactacgagcagaaagagcgctttctgttgttctgcgtgcacggagacgctagacaggactctctggtgcaatgggagatggaggtctgtaaacttccacggttaagtttgaacggagtgagatttaaacgcatcagcggtacaagcattgccttcaaaaacatagcgtccaaaatcgcaaatgaacttaagttgtag

SEQ ID NO: 123399 - DNA, 1938 bp, synthetic construct
  misc_feature 1..1938: note = Description of Artificial Sequence: Synthetic coding sequence
  source 1..1938: mol_type = other DNA
atggagtacgcatccggcggggaggtgttcgattatctagttgcccacggaaggatgaaggaaaaggaagctcgggctaagtttcgccagatcgtgtccgccgttcagtactgccatcagaagtatatcgtgcacagagatctgaaggccgaaaatttgctccttgatggagatatgaacatcaaaatcgctgacttcggatttagtaatgagttcacagtcggaaacaagttggacactttctgtgggtcccccccttatgctgctcccgaactgttccaggggaaaaagtatgatggacccgaggttgacgtatggtctctcggagtgattctctatactctcgtgtccggatcccttccattcgatggacagaatctgaaggaattgcgtgaacgggtgctacgggggaagtaccggatccccttttatatgtccacagactgtgagaacttgctgaaaaaacttctggtgctcaatccaatcaagcgcggttcactggagcaaattatgaaggaccgttggatgaacgtgggccacgaagaagaggaattgaaaccctacaccgagccagaccctgatttcaacgacacaaaacgcatagacataatggttacaatgggcttcgccagggacgagattaacgatgctctgatcaaccagaagtacgacgaagtgatggcaacatacattctcctaggccgcaagccccctgagttcgaggggggcgaaagcttgagtagcgggaacctctgtcagagaagccgtccaagtagtgacttaaataacagcactttgcagtcccccgcgcatctgaaggtacagcggtctatctctgccaaccagaagcaaagaagattttcagaccatgctgggcctagtatcccaccagctgtaagctacaccaagcggcctcaggccaactccgttgagtccgaacaaaaagaagagtgggacaaggacgtggcccggaaactcggctcgactacagtcggctcaaaatctgagatgaccgcttctcccctggtcggtcccgaaaggaagaagagcagtaccattccaagcaacaatgtctactctggtggcagcatggcccgaaggaatacctatgtatgcgaacggaccactgacagatatgtggccctccagaacgggaaggacagttccctcacggaaatgtcagtgtcctctatctcctcagccggaagttccgtcgcttctgcagttccttccgcccggcccagacaccagaaatcgatgtctacatctggccaccccataaaggtcaccctgccgactatcaaggatggatctgaggcatacagaccagggacaacccaaagggtgcccgctgccagcccaagtgctcatagcatatccacagccaccccggacagaacccggtttcctagagggagttcaagtcgcagtaccttccacggcgaacaactaagggagcgacggagtgtggcatataacgggccgccagcctctccctcacatgagacaggagcatttgctcatgccagaaggggcacctcaacaggtataatctctaagattacatccaagttcgtgagaagatcaactagtggggagcctaaggagagggacaaggaggaggggaaggattctaaaccccgatcgctgcgttttacctggtccatgaaaaccacgtctagcatggatccaaatgatatgatgcgcgagatcagaaaggttctagatgccaacaattgcgattacgagcaaaaagagcgtttcctgctcttctgcgtgcacggcgacgccaggcaggatagtcttgtccagtgggagatggaggtgtgcaagctgccacgattatctctcaacggggttcgatttaagcgcatcagtggcacatctatagcctttaagaacatcgcttcgaaaatcgcgaacgaactgaaactctag

SEQ ID NO: 123400 - DNA, 2340 bp, synthetic construct
  misc_feature 1..2340: note = Description of Artificial Sequence: Synthetic coding sequence
  source 1..2340: mol_type = other DNA
atgagctctgcacgcactccactgcctaccttgaacgagcgcgacacggagcaaccgacgctggggcatcttgattcaaaaccgagctccaagtctaacatgataagaggtcggaactctgctactagcgcagatgagcaaccccacatcggaaactatcggctcttgaaaacgatcggaaagggaaattttgcgaaagtgaagctggcaaggcacatccttaccgggaaggaagtggccgtgaagatcatcgacaagacacagctcaactcatcatcactacagaaactatttcgcgaggtgcgcatcatgaaagttctgaaccatccgaatattgttaagctctttgaggtaatagagactgagaaaacactctacctggtgatggaatatgcctcggggggcgaagtctttgactatctcgttgcacatggcaggatgaaagagaaagaagcacgcgccaagtttaggcaaattgtcagcgcagttcaatattgtcaccagaagttcatagtgcaccgcgatctcaaagccgagaatcttttgcttgacgccgacatgaacattaagatcgctgatttcgggttctctaacgaatttacattcgggaataaacttgatacgttttgtggctccccgccatatgctgctccagaactgttccaggggaagaagtacgatggacccgaagttgacgtgtggtccctaggggttatcctgtacacattagtctcagggtccctccctttcgacggccagaaccttaaagaactcagggaacgggttttgagaggaaaatatcggatccctttttacatgtcaaccgattgcgagaatctgctgaaaaaattcttaattcttaaccctagcaagcgtggaacacttgagcaaattatgaaggatcgctggatgaatgttggacatgaagatgacgagctgaaaccatatgttgagcccctccccgattacaaggatccacgacggactgagctcatggtctcaatgggttatactcgcgaagagatccaagattccctggtggggcagcgttataatgaagtgatggcgacttacctgcttctgggctacaagtcctctgagctcgagggcgataccattaccctcaagccacgcccttcggctgaccttactaattccagtgccccttctccctcccataaggtccagaggtcggtgtcagctaatcccaagcagcgacgcttcagcgatcaggccgctggcccagctattcctacttccaattcttattctaaaaaaacacagagtaacaatgccgagaataagagacctgaggaagacagagaatccggccgtaaggcttctagcacagctaaagtgcctgctagccccctgccgggactggagcgcaagaagacaaccccaactccgtctaccaactcggtcctctctacctccacaaatcgctcgcgaaactctccattgctggagagggccagtcttggccaggccagcatacagaatggtaaagactccctgactatgccaggctctcgggcgagcacagccagcgccagtgccgctgtgtctgctgcccggcctaggcagcatcagaaatccatgtcggcttccgttcatccaaataaagcctcggggctgccaccaaccgaatctaattgcgaggtgccacgaccgtccactgctccccagagggttccagtagcctcaccaagcgcccataatatttcctcatccgggggggccccagatcgtacaaacttcccaaggggcgtgtcctcacggtctactttccacgccggacagttgcggcaggttcgggatcagcagaacctgccctatggcgtgactccggccagcccatccggccactcacaagggcgccggggagcatcggggtcgattttctcaaagttcaccagcaaattcgtgcgtcgaaacttgaatgagcccgaatccaaagatagggtggagactctccggccccacgtagtgggttctggcggaaacgacaaagaaaaagaagaattcagagaagcaaagccgcggagcctgcggttcacctggtccatgaagactaccagcagtatggaacccaacgagatgatgcgcgaaattaggaaggtgcttgacgcaaatagttgccagagtgaactgcacgagaaatatatgctgttatgcatgcatgggacccctggccacgaagacttcgtccagtgggagatggaagtgtgcaaactcccacgcctctccctgaacggcgtcaggtttaagcggatttcaggcacctctatggcctttaagaatatcgccagtaagatcgctaatgaactgaagctgtag

SEQ ID NO: 123401 - DNA, 2130 bp, synthetic construct
  misc_feature 1..2130: note = Description of Artificial Sequence: Synthetic coding sequence
  source 1..2130: mol_type = other DNA
atgagctctgctaggactccccttcccacactgaatgagcgggacaccgagcagccgacactaggccacctggatagcaaacctagctctaaaagcaatatgattcgaggtcggaatagcgcaacctccgcagatgaacagccacacataggaaactataggctcctgaagaccatagggaaaggcaattttgccaaggtgaaactcgcaagacatattcttactgggaaagaggtcgctgtgaaaattatcgacaaaacgcagctgaattcatcttccctccagaagctgtttagagaagtcagaatcatgaaggtgttgaaccatccaaatatcgttaagttgtttgaggtcatcgagacagagaagacactttatttggtcatggagtatgcatctggcggagaggttttcgactaccttgtggcacatgggcggatgaaagaaaaagaagcgagagccaaattcagacagatcgtatctgcagtccagtattgtcatcagaaattcatagtccaccgggacctaaaagcagagaacttgctgttagatgcagacatgaatattaagatcgcagacttcggtttctcaaatgagtttacattcggtaacaagcttgacactttctgtggctctcccccatatgcagcaccggagttattccagggcaaaaagtacgatggaccagaagtggatgtgtggtcacttggtgtgattctgtacacgctcgtgtccggctctcttccatttgatggccagaatcttaaagaattgcgggagagggttctgaggggtaagtaccgcataccattctacatgagcacagactgtgagaatctgctgaagaaattcctgatcttaaatcccagcaaacgaggtactcttgagcagatcatgaaggatcgctggatgaatgttggccatgaagatgacgagcttaaaccatacgtcgagcctctgcccgattataaggaccctagaaggactgaactcatggttagtatggggtatacaagagaagagattcaagatagtctggtgggacagaggtacaatgaggtgatggctacttatctcctgctgggctataaaagttcagagttggaaggcgacaccataactctgaaaccccgtccatctgctgacctgactaactcaagtgccccctccccctcacacaaagttcaaagatcggtctcagcaaaccctaaacaaaggagatttagtgaccaggccggcccagctattcctacctcaaattcgtattccaaaaaaacccagtcaaacaacgccgagaacaaacggccggaggaagacagggaatccggacgcaaagcaagcagcaccgcaaaggtgccggcctctcctctgccaggcctggagaggaagaaaacgactccaacacccagtaccaactccgtactgtctacaagcactaatcgaagcaggaactctccgctgctggaacgagcaagtttgggtcaggcctcaattcagaacggaaaagattccaccgccccgcagagggtacctgttgcctctccttctgcccacaatatctctagcagcggcggagcccccgaccgtaccaattttcccaggggcgtgtccagccgctctacctttcacgctggtcagctgaggcaagtgcgcgatcagcagaatcttccttatggggtcacgcccgctagcccaagcgggcattcccagggacgaagaggagcatctggcagcatattcagtaagttcaccagtaaattcgttaggcggcctcacgtggtcggctctgggggcaatgataaagaaaaggaagagtttagagaggccaagccacgatctttgcgcttcacctggtcaatgaaaaccacttctagcatggaacctaacgaaatgatgcgtgagattaggaaagttctggacgccaactcctgccagtctgaattgcatgagaagtatatgttgctctgtatgcatggtacgcctggtcacgaggactttgtccagtgggaaatggaggtttgtaaactccctcgtctgtctctgaacggggtgaggttcaagcgcatctcagggacctccatggcttttaaaaatatcgcatctaaaatagcaaacgagctcaagctatag

SEQ ID NO: 123402 - DNA, 2160 bp, synthetic construct
  misc_feature 1..2160: note = Description of Artificial Sequence: Synthetic coding sequence
  source 1..2160: mol_type = other DNA
atgtctagcgcccgaacaccattgcctactctcaacgaaagggacactgagcagccaaccctgggacacctcgactccaagccatccagcaagagtaatatgattagaggcaggaacagtgctactagtgccgacgagcagcctcatatcgggaactatcgcttattgaagacgatcggtaaagggaatttcgccaaagtgaagctagctcgtcacatactgaccggcaaagaggtggccgtcaaaataatcgacaagactcagctaaacagttcatctttacagaagttattccgcgaggtgcgtatcatgaaggtccttaatcatccaaatattgtgaaactctttgaagtgattgaaactgagaagactttatatctggtgatggagtacgctagcgggggagaagtctttgattacctggtggcccatggcagaatgaaagagaaggaggcgcgcgctaagtttcgtcagatcgtttccgccgtccagtactgtcatcagaagttcatcgtccatagggacctcaaggcagagaacctgcttctggacgccgacatgaacatcaagatcgcagacttcggtttctccaatgagttcaccttcgggaacaaacttgacactttctgcggcagcccaccatacgccgcccctgagctgttccaggggaaaaagtatgacggtccagaggtcgacgtatggagtctgggcgtcatcctgtataccttagtgtcggggagcctgcctttcgatggtcagaacctgaaggagttaagagagcgggtattacgcggcaagtacaggatccctttttacatgagcaccgactgtgaaaacctcctgaagaaattcctcatcctcaatccctcgaaacgtggtaccttggaacagattatgaaggatcgctggatgaatgtgggacacgaggacgatgaactgaagccctatgtcgagccgctgcctgattataaagaccccagaaggaccgagctgatggtgtctatgggatatactcgggaggagattcaggacagcttggttggccagagatacaacgaggtgatggccacatatctcctgctggggtacaagtcatctgagctggaaggcgacactatcaccctcaaaccccggccgagcgccgacctcacaaacagcagcgccccttctccctcccataaggtgcagcgcagtgtgagcgcgaaccccaaacagcggagattctctgaccaggctgctggacccgccatcccgaccagcaattcttattccaaaaagactcaaagcaataatgctgagaacaaacgcccagaggaggatagagaatccggacgcaaggcaagctctaccgcgaaagtacctgcttctcccttacccggactggagcgcaaaaaaacaactcccaccccctcaacaaacagcgttcttagtacgagcacaaatagatccaggaattcccccctcttagagcgggcctccctgggccaggctagcatacagaacggaaaagacagtacagctccccaacgggtccccgtggctagcccatccgcacataatatctcctcgtcggggggtgctcctgaccgcactaattttccgcggggtgtatctagcagatctacttttcacgctggacaactacggcaggtccgagaccaacaaaacctgccatatggcgtcactccagcttctccatccggtcactctcagggccgccgaggagcctcaggatccattttttcaaaattcacctccaaatttgtgagacgaaatctgagcttcagattcgcacgcaggccacatgtggttggctctgggggcaacgataaagagaaagaggagttcagagaggctaaacccagatcactacggttcacttggtccatgaagactacctctagtatggaacccaatgaaatgatgagggagatccggaaggtgctcgatgcgaactcatgtcagtcagagctccacgaaaagtacatgctgctttgcatgcacggaacaccaggacacgaagacttcgtccaatgggagatggaggtctgtaagctcccacgactgagcctgaacggagtccgatttaaacgcatatcaggcacctcgatggcatttaaaaacattgcttctaagatagccaacgagctcaaactttag

SEQ ID NO: 123403 - DNA, 2322 bp, synthetic construct
  misc_feature 1..2322: note = Description of Artificial Sequence: Synthetic coding sequence
  source 1..2322: mol_type = other DNA
atgtcaagcgcaaggacaccactgccaactctgaacgagagagatactgaacagcccactctcggtcacctggactccaaaccatcctctaaaagcaatatgataagaggtcgtaactcggctacatcagccgacgagcagcctcatataggaaactaccgcctactcaagacaataggaaaggggaacttcgcaaaagtcaagctagccaggcatattctgactgggaaggaggtggcggtcaaaataattgacaaaacacagctcaattccagtagtctgcagaagctgttccgagaggtccgtatcatgaaagttctaaatcacccgaatatagtgaagctcttcgaggtgatcgaaactgaaaagacgctgtacttggttatggagtatgcctctggcggggaagtgtttgactaccttgttgctcatggacgaatgaaggagaaggaagctagggcaaagttcagacagatcgtgtccgccgtccagtactgccaccagaagtttatcgtccacagggatttaaaggcagaaaacctgcttctggacgcagatatgaatatcaaaatcgccgattttggattctccaatgagtttacgttcggaaataaactggacaccttctgtggaagtcctccgtatgcagcccctgaactctttcaaggtaagaaatatgacggtcccgaggtcgacgtctggtcacttggtgtgatcctctacacgctggtttcgggttcactccctttcgacggccagaatttaaaggagctgagagagcgagtcctccgaggaaaatatcgtatcccgttttatatgtccacggactgcgagaacttgctgaagaagtttcttatcctcaacccgtcaaaacggggcactctggagcagatcatgaaagataggtggatgaatgtgggccacgaagatgatgagctcaagccatacgtggagccgctccccgactacaaagatcccagacggaccgaactcatggtgtccatgggctataccagagaggaaatacaggactccctcgttgggcagagatacaatgaggtgatggcgacctacctgctcctggggtataagtcctccgagctcgaaggggacacaatcaccctcaaaccaagaccaagtgcagacctgaccaactcgtcagccccgtcgccatcccacaaagtccagcggtctgtgagcgcgaaccccaaacagcggcggtttagcgaccaggccgctggtcctgcaattcccacttctaatagctattccaagaaaacgcagtcgaacaatgcagaaaataagcggccagaagaggaccgagagtctggccgcaaggcctccagcacagcgaaagtacccgcctctcccctgcccggactggagcgtaaaaaaacaacaccgacaccatccactaactctgtgctgagtacctctaccaacaggagccggaattctccgctgctggagcgagccagcctcggacaagcttctatccagaatgggaaagatagtttgactatgccggggagtagagctagcacagcctccgcgtctgctgctgtgtcagctgcacgaccaagacagcatcagaaaagcatgtcagcttcagtccaccctaacaaggccagcgggctgccaccaaccgagtctaattgcgaggtgccgcgccctagtaccgcccctcaaagagtgcctgtggccagtccaagcgctcacaacataagctcatccggaggggcacctgaccgcaccaacttcccaaggggtgtttcaagtcgcagtacctttcacgcgggtcagctcagacaggtgcgcgaccaacaaaatctcccttacggggttacgcccgctagtccttctggacatagccagggccgtcgaggcgcctccgggtcaatttttagtaaattcactagcaaattcgttcgacgaaaccttagctttcggttcgctcggagacctcacgtggtggggagcgggggaaacgataaggaaaaagaggagtttcgcgaggcaaagcctcggtccctgcgttttacttggtccatgaagacgacctcgtcaatggaacccaacgagatgatgcgcgaaatccggaaggtactggacgctaatagctgtcagagcgaactccatgaaaaatatatgctcctatgcatgcacggcacccccgggcacgaagatttcgtgcaatgggagatggaggtctgcaagttgcctaggctgagtctgaacggagtgagattcaaaaggatctcggggacttctatggccttcaagaacatcgcgagtaaaattgctaacgagctgaaactttag

SEQ ID NO: 123404 - DNA, 2076 bp, synthetic construct
  misc_feature 1..2076: note = Description of Artificial Sequence: Synthetic coding sequence
  source 1..2076: mol_type = other DNA
atgatcaggggtcgtaatagtgccacgagtgccgatgagcagcctcacatagggaattatcgacttctcaagacgattggcaagggcaatttcgctaaagtgaagctggctagacacatattgaccggcaaggaagtggctgtcaaaatcattgataaaacacaactcaactcctcatccctacaaaagttatttcgtgaggtgcgaattatgaaagtgctcaaccaccccaacatagtcaaactgttcgaagtaattgagacggaaaagacactttatctggttatggaatacgcctccggtggggaagtctttgattatttagtagcccacggtcgaatgaaagagaaagaagcaagggctaaatttcgccagattgtttccgccgtccagtattgtcaccagaagtttattgtgcacagagatctcaaggctgagaacctgctcctggacgccgacatgaatatcaaaatagccgattttggattttctaacgagtttacctttggaaacaagctagacactttttgcggctcccctccatacgcggctcccgagctattccaaggcaagaaatacgacgggccagaggtggacgtatggtcattgggggtgatactgtataccctggtgagtggcagtttgcccttcgatggccagaatcttaaggaactgagggagagagtactccgagggaagtatcgcatacctttctacatgagtaccgattgtgagaatctgcttaaaaagttcttaattttaaacccgtccaaaagggggactcttgaacaaatcatgaaagatcggtggatgaacgttgggcatgaagacgacgaactcaaaccgtatgtggaacctctacccgattacaaggatccacggagaactgaactaatggtttccatgggctacacacgggaagaaatccaggacagcctcgtcggccagagatacaatgaggtaatggcaacctatctcctgctagggtacaagagttccgagctggagggcgacacgatcacccttaaaccacgaccttctgccgatctcaccaattcgtccgctcccagcccttcgcacaaagtgcagagatccgtgtccgccaaccctaaacagcgtcgattctccgatcaagcaggacccgccattcctacttccaatagttactcaaagaaaacacaatcgaataatgcagagaataaaaggccagaggaagatagagaaagcggcaggaaggcctcaagcaccgccaaggtaccagcctcccctttacccggcttggaaaggaagaaaacaactcctacacctagtacgaactccgttctgtctacctctacaaatcgatctcggaattcaccacttctggagcgcgccagcctggggcaggccagcattcaaaacgggaaagacagtaccgcaccccagcgggtccccgtggcatccccctccgcccataacatctcatcctcgggcggcgctccagataggactaactttcctcgaggagtttcgtcacggagcacattccacgcaggacagcttagacaggtgagggaccagcaaaaccttccgtacggggtgacccccgcctcaccatctggacactcccagggcaggaggggagccagcggttccatttttagcaagttcacctcgaaattcgttcggcgcaacctcaatgaaccagaaagtaaggatagggtcgaaacactgcgcccccatgtggtaggttctggcgggaacgacaaggaaaaagaggaatttcgcgaagcaaagccccggtcgctgcgctttacctggtccatgaagaccacctcttcaatggaacctaacgaaatgatgagagagatcagaaaggtgctggatgctaactcttgtcaaagcgagctgcacgagaagtacatgctgctctgcatgcacgggaccccagggcacgaggactttgtacaatgggagatggaagtatgtaaactccctcgactatcattaaacggcgtacggtttaaacggataagtggcacctccatggccttcaagaatattgcatcgaaaatcgctaacgagcttaaactgtag

SEQ ID NO: 123405 - DNA, 2367 bp, synthetic construct
  misc_feature 1..2367: note = Description of Artificial Sequence: Synthetic coding sequence
  source 1..2367: mol_type = other DNA
atgagttcggcccggacaccactgcctacgttaaatgagcgcgataccgagcagcctactctgggacatctcgactccaagccaagcagtaaatccaatatgatccgcggcaggaactccgcaaccagcgcagacgagcagccacatataggcaattaccggctgttaaaaaccattggcaagggaaactttgcaaaggtgaaattggcccgccatatcctgaccgggaaggaagtagccgtgaagatcatagataagactcaactgaacagttcctcccttcagaagctttttcgggaggtgcgcattatgaaggttctgaatcatcctaacattgtgaagttgttcgaggtcatcgagaccgagaagacactgtatctcgtcatggagtacgcttcaggaggtgaggtgtttgactatttagtggctcacgggagaatgaaggagaaagaggcacgagctaagtttaggcagatagtctctgctgtgcagtattgtcatcagaaatttatcgtccatcgtgatcttaaagctgaaaacttgctcctggacgctgacatgaacatcaagatagctgattttggcttttccaatgagttcacctttggaaataaactggacacattctgcggctctcctccctatgcagcacccgaactttttcaaggcaagaaatatgacggacctgaagtcgacgtgtggtctctgggggtcatactctacaccctagtgtcggggagtctgccatttgatgggcagaacctaaaggagctcagggaacgcgtactaagaggaaagtaccgcattccattctacatgtctaccgattgtgagaaccttctcaagaaatttctaattctcaatccttctaagagaggcacactggaacagataatgaaggaccggtggatgaacgtgggacacgaagatgacgagctgaaaccttacgttgagcctctgccagactataaggacccacgccggacagagctgatggtttctatgggctacacaagagaggagatacaggatagcctggttggccagagatacaatgaggtaatggcaacttacctgcttctaggctacaagtcctcagaattagaaggcgatacgattacactaaaaccacggccttctgccgacctgactaatagttctgccccatcgccttcccacaaagtacagagatccgtaagtgctaatccaaagcaaagacgattttctgatcaggccgctggaccggctatccctacatccaactcttactcaaaaaagacccagtccaacaacgccgagaataagcggcctgaggaggaccgcgagagtggacggaaagcttcatcaactgctaaagtcccggcgagtcctttacctggtctggaacgcaagaagaccacacctactcccagcactaacagtgtcctctcaacgagcaccaatcggagccggaacagccccctcttggagcgggcctcattaggccaggccagcattcaaaatgggaaggattccttgaccatgccaggaagccgcgcatctacagcctccgcaagtgccgcagtgagcgctgcgaggccgcgccagcatcagaaatccatgtcagctagtgtgcatccaaacaaagcatctggcctgccccctacagaatccaactgtgaggtgcctcggcctagcactgctcctcagagagtgccagtcgcttcacccagtgcacacaacatcagctcatccggcggcgcacccgatagaacaaactttcctagaggggtgtcgtcacgtagcactttccatgccgggcagctacgccaggtgagagaccagcaaaacctgccatatggggtcaccccagcctccccctctggccatagtcaaggacggcggggagccagtggttctatattctctaagttcacatccaaatttgtacggcgcaacctatcattcagattcgctcgcagaaatctcaatgaacctgaatccaaggaccgtgtggaaactctcaggccccatgtggttggaagtggtggtaacgataaggagaaggaggagttccgcgaagctaaacctcgctcactgcgtttcacatggtctatgaaaaccacgtcatctatggagccaaatgagatgatgagggagatccgcaaagtgctcgacgccaattcctgccagtccgaattacacgagaaatacatgctcctatgcatgcacggtaccccggggcacgaggacttcgtgcagtgggagatggaggtatgtaagctgcctaggctctccctcaatggggtaaggtttaagcggatctcggggacatctatggccttcaaaaacatcgccagtaagatcgcaaacgagctgaaattgtag

SEQ ID NO: 123406 - DNA, 2076 bp, synthetic construct
  misc_feature 1..2076: note = Description of Artificial Sequence: Synthetic coding sequence
  source 1..2076: mol_type = other DNA
atgatccgcggtagaaatagcgctacaagtgctgatgagcaaccacacatcgggaattaccgtttgctgaagactattggcaaaggcaactttgctaaagtgaaactggccaggcacattctcacaggcaaggaggtggccgttaagattattgacaagactcagctgaactcatcctctctccagaagctgttcagagaagttcggataatgaaagtcctgaaccaccctaatatcgtcaagctgttcgaggtgatcgaaacggagaagactctctacttggtaatggagtacgcctcaggaggcgaagtattcgattacctggtggcccatggccgaatgaaagaaaaggaggcccgggcaaagtttcgccaaatagtgagtgctgtgcaatactgtcatcagaaatttattgtccacagagatctaaaggcagaaaacttgctactggacgccgatatgaacataaaaattgcggacttcggcttctcaaacgaattcacctttggaaataagttggatacattctgtggctcgcctccgtatgctgcccccgagttatttcagggcaaaaaatacgatggtccagaggttgacgtatggagtctgggcgtaatcctgtacacactagtcagcggttccttgccatttgatggccagaatttgaaggagctgagagagagagtgctgcgcggtaaatataggatccccttttacatgtcaaccgactgtgaaaacctactgaagaagttcctaatcctgaacccttctaagcgcggaacactggaacagataatgaaagaccgctggatgaatgtcggccacgaagacgacgagctgaagccttatgttgaacctcttccagattataaggatccccgcaggacagagctgatggtgagtatggggtacacgcgcgaggagatacaggatagtctggttgggcagagatacaacgaggtgatggcgacttatctgctccttggttataaaagctcagagctcgagggcgatactattacgttgaagccccgtccctcagccgatctcactaacagctcagcaccgtcccctagtcacaaggtccagaggagtgtgagtgcaaaccctaagcagagacggttctccgaccaggctggcccagccatccctactagcaattcctactcaaaaaagactcagtcaaataacgctgaaaacaaacggcctgaagaggaccgagagagtggtcgcaaagcgagctctacagcaaaggtgcccgcatcccctctccccggcctcgagcgtaaaaaaacaacccctacaccctcaaccaactcagtgctctctacatcgaccaatagatcgcggaactctcctcttcttgagcgagcaagtctgggccaggccagcatccagaacggcaaggatagcacagcccctcagcgcgtgcccgttgcatctccatctgctcataatatcagtagctccggaggtgcccccgaccggacaaacttcccacgcggagtgtcctctagatctacctttcacgcaggacagctgaggcaggtccgggaccagcagaacctgccatatggcgttacccccgcctctccttcaggtcactctcaaggacgaagaggggcttcaggctcaatcttttcgaagtttactagcaagtttgtgagacgaaatctcaatgaacccgagagcaaggaccgcgtggagaccctgcggccacatgtggtgggatccggtggcaacgataaggagaaggaggaatttcgggaggctaaaccccggagtctccgctttacatggtccatgaaaacgacaagttcgatggaacccaatgagatgatgcgagagattcggaaagtattggatgccaacagttgccagtcagaactgcacgagaaatacatgctgctctgtatgcacggcacccccgggcacgaggactttgtgcagtgggagatggaagtctgcaagctgcctagactaagcctgaacggagtgaggtttaagcgcatcagcggtaccagcatggcctttaagaacatcgcatctaagatagctaacgaactcaagttatag

SEQ ID NO: 123407 - DNA, 2205 bp, synthetic construct
  misc_feature 1..2205: note = Description of Artificial Sequence: Synthetic coding sequence
  source 1..2205: mol_type = other DNA
atgagctctgctaggaccccactgcccacccttaacgagagggacaccgagcagccaactctggggcacctggattccaagcctagctccaagtccaatatgattcgaggccgaaattccgcaacctctgccgacgaacagccccacataggcaactacagactcctcaagaccatcggcaaagggaattttgccaaggttaagctggcgcgccacattcttacaggcaaggaggtggctgtgaaaatcattgacaaaacacagctcaatagcagcagcctgcaaaaactgtttagggaagtaaggatcatgaaagtccttaatcaccctaacatcgtgaaactgtttgaagtgatcgaaactgagaagacactataccttgttatggagtacgcatccggtggcgaggtgttcgattatttagtggcccacggccgcatgaaggagaaggaggcgagagccaaatttcggcaaattgtgagcgcagttcagtattgtcatcagaaattcattgttcatcgcgatttaaaagccgagaacctactccttgacgccgatatgaacattaagattgccgactttgggttcagcaacgaatttacattcggaaacaagttagataccttctgtgggagccccccctacgctgctccggaactttttcaggggaaaaaatatgatgggcctgaggttgacgtgtggagcctaggcgttatcctgtacaccctggtgagtggctcattgccatttgatggccagaacctcaaagaattgcgggagagggtgctacgcggcaaataccgaattccgttctacatgtccactgattgcgagaacttgctcaagaagttcctgattctcaatcccagcaagaggggaaccctcgaacagatcatgaaagaccgctggatgaatgtagggcacgaggacgatgagctcaagccatacgttgagcccctgcccgactataaagacccgcgaagaaccgagctgatggtgtcaatgggatacacacgagaagagatccaagacagccttgtggggcagagatacaatgaggttatggccacctaccttctgcttgggtacaaatcgtcggagctggagggcgacacgatcacacttaaaccccgtccatccgctgatctcacgaattcatcagcgccctcacctagccataaggttcagaggtctgtgtctgctaacccaaagcagagacggtttagcgaccaagccgccgggcccgctattccaacttctaactcatattccaaaaagacgcagagcaacaatgccgagaacaagcggcctgaggaagaccgcgaatctgggcgcaaggccagctcaacagccaaagtgccagccagccccttgcccggtttagagcgaaagaagaccacgcccaccccgagcacgaatagcgtcctgtccaccagtactaatcgctcgcggaacagcccattgctggaacgagcttccctgggacaggcatctatccagaacggaaaagactccaccgccccacagcgagtccccgtggcttccccttccgcccacaacatcagcagctccgggggggctccggaccgcacaaacttccccagaggtgtgtcctctagatccacatttcacgccggccagctgaggcaggtgcgagatcaacagaacctcccttacggggtgacaccagccagccctagcggacactcccaggggaggcggggagccagtggatcgattttctccaaattcacatcgaaatttgttagacggaacctgtcatttcggttcgcgcgccgcaacctaaatgaaccagaatccaaagaccgggtcgaaactttgcgaccccacgtggttgggagcgggggaaatgacaaagagaaagaagagttccgagaggctaagcccagaagtctgagatttacgtggtcaatgaaaacaacatctagcatggagcccaacgagatgatgagagaaatccggaaggtcttggacgcaaatagctgtcagtcagagttgcatgagaagtatatgctgctctgcatgcacggcacccctgggcatgaagatttcgtccaatgggaaatggaggtatgcaaactgcccaggttgtcattgaatggtgtgcggttcaaaaggatctcgggcacgagcatggcgttcaaaaacattgcttcaaaaatcgcaaacgagctgaagctctag

SEQ ID NO: 123408 - DNA, 2343 bp, synthetic construct
  misc_feature 1..2343: note = Description of Artificial Sequence: Synthetic coding sequence
  source 1..2343: mol_type = other DNA
atgtcttctgcgagaaccccactgccgacactaaatgagagggataccgagcagcccacattgggacacctcgactctaaaccctcaagtaaatctaatatgattcgaggtaggaatagtgctactagtgccgatgaacagcctcacataggaaattatcgtcttctgaaaacgatcggcaagggcaactttgccaaggtcaaacttgcaagacacatcctgaccggcaaggaagtcgccgtgaaaatcatagataagacccagctcaacagtagttctttacagaagttgttcagggaagtgaggattatgaaggtgctgaatcaccccaatatcgtgaagctcttcgaggtcatcgagactgaaaagactttgtacttagttatggagtacgcctctgggggcgaggtttttgattacctggtggctcatgggcgaatgaaggaaaaagaagccagagcaaaattcagacagatcgtgtctgccgtgcagtattgccaccagaagtttattgtgcaccgcgatttgaaggccgaaaacctgcttctggacgccgacatgaacattaaaattgcagattttggctttagcaatgaatttacctttggaaataagctcgatactttctgcggttctcctccctacgcggcgccggaactgttccagggtaaaaaatatgatggtccggaagtggatgtgtggagtcttggagtgattctgtataccctggtatccgggtctctgcctttcgacggacaaaacctgaaggaactgcgggagagagtgctccggggtaaataccgcattcccttttacatgagcacggactgtgaaaatctgctgaagaaatttctgatattaaacccttctaaacgcggcacactggaacagataatgaaagacaggtggatgaacgtgggacacgaagatgatgagctgaaaccctacgtggagcctttgccagattacaaagatcctcgccgtaccgagcttatggtgtcaatgggttatacacgagaggagatccaagatagtctggttggccagagatacaatgaagtgatggcaacatatcttctgttaggctacaagtcaagcgaactcgagggagacacaattactctcaagcctcgaccatcagctgacctaacaaattcttccgccccaagcccaagccataaggtgcagaggtccgtgtcggccaacccaaagcagaggaggtttagcgatcaggcagggccagcgatacccacaagtaactcttattccaagaagacgcagtccaacaacgcagagaacaagcgtcccgaggaagatcgcgaatccggccgaaaagccagtagtacagctaaagttcctgcttctcctcttccaggactcgagcgcaaaaaaactacaccaacaccctctaccaactccgttctatcaacctccacaaatcgctccaggaactcgcccctgctcgagagggcaagcctgggacaggcatccatccagaacggcaaggattccctgaccatgcctgggtctagagcctcaactgccagcgcatctgccgcagtcagcgctgcgagaccccgccagcaccagaagtccatgtctgcttccgtgcatccgaacaaagcttcgggcctgccgccgacagagtccaactgcgaagtgcccagaccccgccaggtcaccgctccacagagagtaccagtggcctctccatcggctcataacatttcttcctccggaggcgctcctgacaggaccaacttcccccgcggagtcagtagccgatcaacgtttcacgccggacagctccggcaggttcgtgaccaacagaacctgccgtacggggtgacacccgcaagcccatcaggccacagtcaaggcagaaggggcgccagcggttctatcttcagcaaatttacttcgaaatttgtgcgccgtaatctgaacgaaccggagagcaaagatcgagttgaaaccctccgacctcacgtcgtgggatccggtggaaatgacaaagaaaaggaagaattcagggaggcaaaaccccgctctctgaggtttacatggtctatgaagactactagtagcatggaaccaaatgaaatgatgcgtgagatcaggaaggtgctggatgccaatagctgccagtctgagttacacgaaaagtacatgctgttatgcatgcacgggacaccggggcacgaggatttcgtgcaatgggaaatggaagtgtgcaaattgcccagactgtcactgaatggggtgagattcaaaagaattagcggcacctcaatggcattcaagaacattgcgtctaagattgctaatgagctgaaactgtag

SEQ ID NO: 123409 - DNA, 126 bp, synthetic construct
  misc_feature 1..126: note = Description of Artificial Sequence: Synthetic coding sequence
  source 1..126: mol_type = other DNA
atgagctcagcgcggacaccgctgccaacattgaacgagcgcgatacggagcagcccactctgggacatcttgattctaagccgtcaagcaaaagcaacatgataagaggccgcaactccgcctag

SEQ ID NO: 123410 - DNA, 2175 bp, synthetic construct
  misc_feature 1..2175: note = Description of Artificial Sequence: Synthetic coding sequence
  source 1..2175: mol_type = other DNA
atgtcctccgcccgcactccactcccaacacttaacgagcgcgatacagagcaaccaacccttgggcatctggatagcaagccttccagtaaatccaacatgataaggggaaggaacagtgctacttctgccgacgagcaacctcatattggtaactacaggctgttaaagaccattggcaagggtaattttgcaaaggtcaagctggcaaggcacatactgaccggcaaagaggtcgcagtaaagatcatcgataaaacacagcttaactcttcatcactccagaagctgtttagggaagtgcggatcatgaaggtgctcaatcaccccaacatagtaaagctctttgaggttattgaaactgagaaaacgttatacctggtgatggagtatgcctctggcggcgaggtgttcgattacctggtggcacatggccgaatgaaggaaaaggaggccagagcaaaatttagacagattgtgtcagcggtgcagtactgtcaccagaaatttatcgtacaccgggatctcaaggccgagaacctgcttctcgatgctgacatgaatattaagattgccgactttggcttctctaacgagtttacattcggcaataaactcgacacattctgcggatcccccccctacgcagcgcccgagctctttcaggggaaaaagtacgacgggccggaagtggacgtgtggagtctaggggtgatcctgtataccttggtttccgggtctctgcctttcgatggccaaaacctcaaagagctgcgggagagggtccttcggggtaagtatcgaattcctttctacatgagcacggactgtgagaatctactcaaaaaatttttgatcctgaacccatccaaaagaggtactctggagcagataatgaaggatcgatggatgaatgtcgggcatgaagatgacgaactgaaaccttacgtggaacccctccccgattataaggacccaaggaggacagagctcatggtatctatgggttacacccgggaggagatccaagattctctcgtaggccagcgatacaatgaggtcatggccacatatctgcttctggggtacaagagcagtgagttagagggtgatacaattactttgaaacctagaccctctgccgatctcaccaactccagcgccccatcccctagtcacaaagtccagagatcagtgagtgctaaccccaagcaacgaaggttctcggatcaggcagggcccgcgatcccaacatctaactcatattccaagaaaactcagtcaaataacgctgaaaataagagacccgaggaagatcgggagtccggccggaaggcaagctccaccgctaaagttcctgcatcacccttgcccggattggagcgcaaaaagacgactcccacaccatctacaaattctgtgctctcaacttctaccaaccgttcccggaattcacccctgctcgagagagcctccttgggccaggcctccattcaaaatggtaaggactcaacagctccacagagagtcccagtcgcttcaccctcggcacacaacatctcaagcagcggtggggcccctgaccggactaacttcccacgcggtgtgagctccaggagcacattccacgccggacaactgcgccaagtgcgggatcaacagaatctcccgtacggagttacaccagctagcccgtcagggcatagtcaggggcgcaggggtgctagtggctcaatattcagtaagtttacgtccaagttcgtgcgacgtaaccttaacgaacctgaaagcaaggatcgcgttgagacgctcagaccccacgtagtcggcagcggcggaaatgacaaagagaaagaggagtttagggaggccaaaccgcgcagcctgagattcacctggagcatgaagacaacgtcttcaatggaacctaatgagatgatgcgggaaattcggaaggtgctcgacgctaatagctgccagtccgagctccacgagaaatatatgctgctctgtatgcatggtactcccggacacgaagactttgtgcagtgggaaatggaagtgtgcaagctgcctcggctttccctgaacggcgttaggttcaaaagaatctccggcacttcaatggcatttaaaaacatcgcgtcaaagatcgctaacgagctgaagctatag

SEQ ID NO: 123411 - DNA, 186 bp, synthetic construct
  misc_feature 1..186: note = Description of Artificial Sequence: Synthetic coding sequence
  source 1..186: mol_type = other DNA
atggaggttgcagggagcccgttcccatttctacagagtgtcgcttgtctgctcacactcgctcatatacctgcagtaggaaacattctgcagcatcggagacgtggggctggccctacgcttgggcaccttgactcaaagccttccagtaaaagcaatatgatcagggggcgcaatagtgcctag

SEQ ID NO: 123412 - DNA, 339 bp, synthetic construct
  misc_feature 1..339: note = Description of Artificial Sequence: Synthetic coding sequence
  source 1..339: mol_type = other DNA
atgattcgggggcgaaactctgctacatctgccgacgagcagccgcacatcggtaactaccgactgttaaaaaccattggtaaaggcaactttgcgaaggtcaaactggccaggcatatcctgaccggaaaggaggtggcagtaaagatcatcgacaaaacacaactaaattctagtagtctccagaagctgtttcgggaggtcagaataatgaaggtacttaatcatccaaacatagtgaagttgttcgaggttatagaaaccgagaagaccttgtacctggtcatggaatatgccagtggaggcgaggtttttgattatctcgtggcacacggatag

SEQ ID NO: 123413 - DNA, 486 bp, synthetic construct
  misc_feature 1..486: note = Description of Artificial Sequence: Synthetic coding sequence
  source 1..486: mol_type = other DNA
atgattagaggcagaaactccgcaacctcagctgatgaacagccacacatcgggaattaccggttgctgaaaactattggtaaggggaacttcgctaaggtcaagcttgccaggcacattctgacaggtaaagaggtagcggtaaaaatcatagacaagactcagctcaactcctcctcgcttcaaaaactttttcgagaggtccgcattatgaaggtgctaaaccatcccaacatcgtcaagctgtttgaagttatagaaactgagaaaactttgtacctggtcatggagtacgcttctggcggagaggtcttcgactacctggttgcgcacggccgaatgaaggaaaaggaggcccgggccaaattcaggcagattgtgagcgcagtgcagtactgtcatcagaaatttatcgtacatcgtgatcttaaggcggaaaatttactgctggatgccgatatgaatatcaagattgcagacttctag

SEQ ID NO: 123414 - DNA, 276 bp, synthetic construct
  misc_feature 1..276: note = Description of Artificial Sequence: Synthetic coding sequence
  source 1..276: mol_type = other DNA
atgggtggccagaggaacacaagcgtagggaatatagtgcagaggtggagggaccacgtggtttgtcagaaggccggcgtgatctatagcgggaggaaggcacaggagcacggcactggccgcacagacttcactcctgctcaaagactgatgatgccaacactgggccatctggactccaagccatccagtaaaagcaatatgattagaggccggaattccgcaaccagcgctgatgaacagccacatattggaaactatcggcttctcaaatag

SEQ ID NO: 123415 - DNA, 2238 bp, synthetic construct
  misc_feature 1..2238: note = Description of Artificial Sequence: Synthetic coding sequence
  source 1..2238: mol_type = other DNA
atgatcaggggacggaactcagctacgagcgcagatgagcagccacatattggcaactatcgtttactgaagactataggaaagggaaatttcgccaaagtaaagcttgctcgccacatcttgacaggaaaggaggtggccgtgaagatcattgacaagacccagctgaactcatcctccctgcagaagctctttcgggaggtacgcattatgaaagtgctcaatcaccccaacatagtgaaactgttcgaggtaattgagacagagaaaacactatatcttgtgatggagtacgcaagtggcggcgaggtgttcgactacttggtagcccacgggagaatgaaagagaaggaggctagggctaagttccggcaaattgtttccgccgtccaatactgccaccaaaagttcatcgtccaccgtgatttaaaggctgagaacctgctattggacgcagatatgaatatcaagatagccgattttgggttcagtaacgaattcacatttggtaataagttggatactttttgcggcagccccccgtacgcagccccggaactgttccaggggaagaaatatgatggccccgaagtagatgtgtggagtctgggtgtgatcttgtatacactcgtgtctggctccctgcccttcgatggccaaaatttgaaagagcttcgcgagagggttctgagaggcaagtaccggatccccttctatatgtccaccgattgtgaaaacctgctgaagaagtttctgatcctgaaccctagtaagagaggtacgctggaacagattatgaaggatagatggatgaacgtgggtcatgaagacgatgagctgaagccctacgtggaacccctgccagattacaaggatccaaggcgtacagagttgatggtgtctatgggctataccagagaggagatacaggacagcctggtaggccagcgctacaacgaagtcatggctacatatctcctccttggctataagtcctccgaactcgaaggtgacaccattaccctaaaacccaggccctcagccgatctgaccaactccagtgccccctccccttcccataaggtccaacggtccgtgtcagcgaaccccaagcagagaagatttagtgaccaggcgggtcccgcaatccctacaagtaactcatactctaaaaagacccagtctaacaacgcagaaaataaaagacctgaggaggaccgcgagagcggcagaaaggctagctctacagcaaaagtccctgcttctcctttgcctggacttgagagaaagaagactaccccaacaccttctaccaacagtgtgttgagtacgagcactaatcgctcacgtaacagcccacttcttgagcgcgcttcccttggacaggcttcaatccagaatggcaaagactctctgacaatgcccggatcacgtgcgtctacagcttccgcgagtgccgccgtgtcagctgcgcgcccaaggcaacatcagaagagcatgtcggcttctgtgcaccctaacaaggcatccggacttcccccaaccgaatcaaactgtgaagtccccaggccctcaaccgcacctcagcgtgtgccagtggcttctccctcagcccacaatatctcgagcagcggaggtgcaccagatcggactaatttcccgcggggagtttcttctcgctcaacattccatgccggacagttaaggcaggttcgggatcagcaaaatctcccatacggagtgacccccgcatcaccatctggccactctcagggccggcgcggtgctagcggatctattttcagtaaatttactagtaagttcgtaaggcggaacctgaacgaaccagagagcaaagatcgtgtggagacactgcggccccacgtagtgggctccggaggcaacgataaggaaaaagaggagttccgtgaagccaagccccgtagtctgagatttacatggagtatgaagacaactagcagtatggagcccaacgagatgatgcgtgagattcggaaggttctcgacgctaacagctgccagtcagagctgcatgagaaatacatgctgctctgtatgcacggaacaccaggacatgaggatttcgtgcagtgggagatggaggtgtgtaaactgccgcgcttgagcctaaatggcgtccgtttcaagcgtatttcaggcactagcatggccttcaagaatattgcatccaagatagcaaacgaacttaagctgtag

SEQ ID NO: 123416 - DNA, 4128 bp, synthetic construct
  misc_feature 1..4128: note = Description of Artificial Sequence: Synthetic coding sequence
  source 1..4128: mol_type = other DNA
atggaaggcgaccgcgtcgccggtagaccagtactgtcgagcctcccggtgctactcttactcccattgctgatgctgcgcgctgccgccctgcatcctgatgagttattcccacacggggagtcttggggcgaccagcttttacaggagggtgacgatgagtcatctgccgtcgtgaagctggctaaccctctgcatttctacgaagctaggtttagcaatctgtatgttggtaccaatggcatcatctcaacacaagattttccacgcgagacccagtacgttgactatgacttccccacagacttccctgccatagctcccttcctcgccgacatagacacgagccatggccgcggtcgggtcctgtatagagaagatacatctcccgcagttctgggtctggccgcacggtacgttcgggccgggtttccccgctctgcccgcttcacgcccacccacgcatttttagcaacctgggagcaggtgggcgcctatgaggaagttaagcggggcgctctaccatcaggcgagcttaacacatttcaggcagttttggcctcggacggaagcgactcttatgcactcttcttgtacccagccaacggcctccagttcctggggacacggccaaaggaatcgtataatgtccagctgcaattgccggcaagagtcgggttctgcagaggcgaagctgacgatttgaagtccgaggggccgtacttttctctcacttctacagagcaaagtgtgaagaatctttaccagctttccaatctcggaattcctggagtgtgggcgttccacatcggctctacttctcctctggacaatgtgcgacctgctgctgtgggagatttgagcgccgcccactcctctgtgcccctcgggcgcagcttcagccacgctactgctttggaatctgattacaatgaagacaacctggactactatgatgtcaatgaagaagaagcagaatacctgccaggcgagcccgaagaggccctgaatggacactcatctattgatgtgtccttccagtccaaagtggatactaagcccttagaagaaagctccacccttgatccacacactaaagaagggacgagcctgggcgaagtggggggcccagacctgaagggccaagtggaaccgtgggacgagagagagactagatccccagcccccccagaagtagatcgggattcactggcccctagctgggagacacccccgccatatcctgaaaacggatctatacagccataccctgatgggggcccggtgccttcggagatggatgtgcccccagcccatcctgaagaggaaatcgttttacgctcatatccggcaagtggacatacaacgccgctgtcgcggggaacgtatgaggttgggctcgaggataacatcggttccaacacagaggtcttcacatacaacgccgctaataaagagacgtgcgaacataaccacaggcagtgtagtcgccatgccttttgtaccgattacgcgaccggattttgttgccattgccagtccaaattctacgggaacggaaagcattgccttcccgagggcgctccccatcgggtgaatgggaaggttagcggacacctgcacgtcgggcacaccccggtgcatttcacggatgtggacctccacgcatacatcgtagggaatgacggacgcgcctacaccgcaatcagccacatcccacagcctgctgctcaggcactgttacctcttacccctattggcggtttgtttgggtggctgtttgcacttgaaaagcctgggagtgagaatggtttcagcctggctggagccgcatttacccatgatatggaagttactttctaccccggcgaggaaacggtacgtattactcagactgctgagggtctggatccagagaattatctttctattaagactaatattcagggacaggtgccctatgtgagtgccaattttacggcgcacatttcaccttataaagaattgtatcactactctgacagcactgttacctccacgtctagccgtgactacagtctgaccttcggggccataaatcagacctggagctatcgaatccatcaaaacatcacttatcaagtttgccgccacgcaccaagacacccatccttcccaactacgcagcaactcaatgtggacagagtcttcgccctgtacaacgacgaagagcgagtgctcaggttcgccgtgacaaatcagattgggcctgtcaaggaggactcagatccaaccccaggaaatccgtgttatgacgggagtcacatgtgcgataccaccgcccggtgccaccctggaacaggtgtggactacacttgcgaatgcgcgagcgggtaccagggcgacgggaggaattgcgtcgatgaaaatgaatgcgctacgggatttcaccgatgtggcccaaactcagtgtgtatcaatttaccgggaagttataggtgtgagtgcagatccggatatgaatttgcggatgatcgccatacttgtattctaataacgcctcccgcgaacccttgtgaagatggtagccacacatgtgctcctgccggccaggccaggtgcgtgcaccacggaggctcaacattctcatgtgcgtgtctgccaggctatgctggcgacgggcatcaatgtaccgacgtggatgagtgctctgagaaccgctgtcatccagcagccacctgttacaatactcccggtagctttagctgtagatgtcaaccgggttactacggcgacggatttcagtgcattcccgattccaccagctccctgacaccatgcgaacagcagcaacgccatgctcaagcacagtatgcgtaccccggagcacgctttcacattccacagtgtgatgaacagggcaacttccttccgttacagtgccacggatccacaggattttgttggtgcgttgacccggacggacatgaagtgccaggaactcagacgcctcctggcagtacacctccccactgcggcccaagccccgagcctacgcagcggcctccaacgatttgtgagcggtggcgcgagaacctgctggaacattacgggggcactcctagagacgatcaatacgtaccacagtgtgacgatctgggccatttcataccactccaatgtcatgggaagagcgacttttgttggtgcgtggacaaagatgggcgggaagttcagggtacgcgcagccaacctggcacaacacccgcatgcatccccacagtggcccctccaatggtgcgccccacaccaagaccagacgtgactcccccaagcgtgggtacattcctgctctatactcagggacagcagatcggctatctcccacttaatggaacaaggctgcagaaagacgcagcaaaaactctgttgagtctacacggaagcattattgtcgggattgattatgactgcagagaaaggatggtgtattggactgacgtcgcaggaaggaccatctctcgagctgggctcgagctgggtgcagaaccagagaccatcgtgaattccggactgatttcacctgaggggttggccatcgatcacatccggcggacgatgtattggaccgactctgtcctcgacaaaatcgagtctgctctcctggacgggtccgaacgaaaggtattgttctataccgatctggtcaacccgcgggccatcgcagtcgaccccatccggggcaacctttactggaccgattggaacagagaggcccctaagatcgagacttcctccttggatggtgaaaacaggcgcattctgattaacacagatataggattgcccaatggccttacatttgaccccttcagcaagctgctttgctgggcggatgccggcacgaagaagctcgagtgcactttgcccgatgggacaggtaggagggttattcaaaataacctgaagtacccgttctcgatcgtttcatatgctgaccacttctatcacacagattggaggagggacggcgtggtgagcgttaacaagcactccgggcagttcaccgacgagtacctcccagagcagaggagccacctgtacgggataaccgctgtgtacccatactgtcctacaggtcggaaatag

SEQ ID NO: 123417 - DNA, 2190 bp, synthetic construct
  misc_feature 1..2190: note = Description of Artificial Sequence: Synthetic coding sequence
  source 1..2190: mol_type = other DNA
atgtcgacacgcacgccgcttcccaccgtgaatgaacgtgataccgagaaccacacctcccacggagatggcaggcaggaagtcacatctcggacatcgcgttctggggccagatgcagaaatagtattgcttcttgcgctgatgaacagcctcatattgggaactaccggcttctgaaaacaatcgggaaggggaattttgctaaggttaagctggctagacacattctgacagggcgagaagttgccatcaagattatcgacaaaactcaactcaaccccactagtctccaaaaacttttcagagaagttcgcattatgaagattcttaaccacccaaatatcgtgaagctcttcgaggtgattgagacggagaagactttgtacctgatcatggaatatgcctccgggggggaagtgtttgattacctggtagcgcatggccgcatgaaggagaaggaggctagatccaaattccggcagatcgtgtctgccgttcagtactgccaccagaagcgaatcgtgcacagagatctgaaggctgagaaccttttactggacgccgacatgaacattaagattgccgactttggcttttctaatgaatttactgtgggggggaagcttgataccttctgtggttcacccccctatgctgcgccagagctgtttcagggtaagaagtatgacgggcccgaagtcgacgtctggagcctaggagtgattctctacacattggtgagcggaagcctgccattcgacggacagaatctgaaggagcttcgcgagcgggtactgagaggtaagtaccggatccctttttatatgtccaccgactgcgagaatctcctgaaacgtttcttggttcttaatcccatcaagagaggcactctggagcagattatgaaggatcgatggattaacgctggacacgaggaggacgagctcaagccctttgtcgagcctgagttggatatctctgatcagaagcggatcgatataatggtcggcatgggctatagccaggaggagattcaggagtcactgtctaagatgaaatatgacgagattaccgccacctatctgctgttgggacgcaaaagctcagaactggacgcctcggatagttcttcttcatcaaacctcagtctggcgaaagtgagaccaagtagtgacttgaataactccacaggtcagtctccccatcacaaggtacagcgctccgtctttagttctcagaagcaaaggcggtactctgaccatgctgggcccgcaattcctagcgtggttgcttatccaaaaagaagccagacatccacggcagattctgacctaaaagaggacggtattagctcgagaaaaagttctggttcagcagtgggaggtaaggggattgcccctgcctctcccatgcttggcaacgcctctaatcccaataaagcggatattccagaacggaagaagtcatctactgtcccttcctctaacaccgcctctggcggtatgacccggagaaatacctacgtgtgtagcgaacggactacagcagacaggcattcagtgatccaaaacggtaaagagaacagcactatcccagaccagcggacaccggtggcttcgacccatagcattagttcagctgcaacaccggatcggatcagatttcctagaggcacggctagcagaagtacctttcacgggcagccccgtgagagaaggactgctacatacaacgggccgcccgcctccccttccttgagccacgaggccaccccactttctcagactaggtctagagggtcaactaacctgttctccaagctgacgagtaaactgactaggagcagaaacgttagtgccgagcagaaggacgagaataaggaggctaagcctcggtcactccgatttacgtggtcaatgaagacaacctcttccatggatcccggggatatgatgagggaaattagaaaagtcctcgacgccaataactgcgattatgaacagcgcgaaaggtttttgctgttttgcgttcacggcgatggccatgcggaaaacctggtgcagtgggaaatggaggtgtgtaagctgccgcgactgtcactgaacggtgttcggttcaaacggatatccggtactagtattgctttcaaaaatatcgcctcaaaaatcgccaatgagctgaaactgtag

SEQ ID NO: 123418 - DNA, 1338 bp, synthetic construct
  misc_feature 1..1338: note = Description of Artificial Sequence: Synthetic coding sequence
  source 1..1338: mol_type = other DNA
atgaagtacgatgaaataaccgctacttacctgcttctgggcaggaagagctctgagctggatgctagcgacagctcctcatccagcaacctttcattagctaaagtccgaccatcaagcgacctaaacaactctaccggtcaatcaccccaccacaaggtccagcgcagcgtctttagcagtcaaaagcaaaggcgctatagcgaccacgcgggtcccgcaattcccagtgtcgtggcctatccaaagaggtcccagactagcactgccgattctgacctcaaggaggacgggatttcgtcccggaagtcaagtggaagcgcggtcggcgggaagggtatcgctccggcttctccaatgctgggcaatgcctctaacccgaacaaggcggacattcccgagcgcaaaaagtccagtaccgtgcctagtagcaacacagccagtgggggaatgacaagaagaaacacgtatgtgtgctcagagcggactactgccgatcgccactccgtcattcagaacggtaaagaaaacagcctcacagagatgttcgcttacgccgccagtcccgccagtgtctgtaccagtacttgccgcttgcgacaccagaagtccatgtctatgtcagcctccggacacccgaagatgatgctgcctcctatagattccgagggtgataattttaaggccatcactattccagaccagaggactcctgtcgcttccacgcattccatatccagcgcagcaactcccgaccgtatacgcttccctcgggggacagcatcgaggagtacttttcatgggcagcccagggaaaggagaactgcaacctacaatggaccaccagcatcccctagcctttcccacgaagccactcccctgagccagactagatcaagaggctcaacgaacctcttctctaagctgacttccaaactcacaaggcgcctgccaactgagtatgaacgaaatggccggtacgagggatcatcacggaacgtgtctgcagaacagaaagacgagaataaagaagcaaagccccgctccttgcgctttacttggagcatgaaaactacctcttcaatggatccgggcgatatgatgagggagatccgtaaggtacttgatgcaaacaattgtgattatgagcagcgcgagcgatttctgttattctgcgtacacggagatggacacgccgagaatcttgtgcagtgggagatggaggtgtgtaagctgccaagactcagcctcaatggggttcggtttaaacgcattagcggcacctcgatcgcatttaaaaatatcgcctcaaagatagccaatgaactaaagttgtag

SEQ ID NO: 123419 - DNA, 2259 bp, synthetic construct
  misc_feature 1..2259: note = Description of Artificial Sequence: Synthetic coding sequence
  source 1..2259: mol_type = other DNA
atgtctacaaggacaccattgcctaccgtgaacgagcgagacaccgagaatcacactagccatggcgacggcagacaggaggtaacttcacgtacatctagatccggtgcccgatgccgaaactctatagcctcctgtgcggatgagcagccacatattggcaattatcgtttgctgaagactatcggaaaagggaattttgcaaaagtgaagttggcccgccatatattaacaggacgtgaagtggcaatcaagattatagacaagacacagcttaatcccacttctctgcagaagctgttccgagaggtgcgaatcatgaagatccttaatcaccctaacatcgtgaagctgtttgaagtcatagagacagaaaagacgctatacctgattatggagtacgcgagtgggggtgaggtcttcgattatctggttgcacatggtaggatgaaagagaaagaggccaggtctaaattccggcagggatgtcaggccggtcaaactattaaagtgcaagtgagctttgatctactgtccttaatgttcaccttcatcgtttctgctgttcagtactgccatcagaagagaattgtccatcgcgatttgaaggccgaaaatctactattggatgctgacatgaatattaagatcgccgatttcggcttctccaatgaattcaccgtgggtggtaagttagacacattttgtgggtctccaccttatgccgcacccgagctgttccagggcaagaagtatgatggtcccgaggtcgacgtttggtctctgggcgttatcctttacactttagttagcggctctctcccattcgatgggcagaaccttaaggaactccgggaacgtgtcctcagaggcaagtacagaatccccttctacatgtccaccgactgcgagaacctcctgaaacggtttcttgtccttaatcccataaagcggggcaccctggagcagattatgaaggaccgttggattaacgcggggcacgaagaggacgagctgaagcctttcgtagagcctgaactggacatctcggaccagaaaagaatcgacataatggtgggcatggggtacagccaggaggagatccaggagtctctcagcaagatgaagtatgacgaaataacagctacctacttgctgctggggcgcaaaagctccgagcttgacgcctccgactcttccagctcttcgaacctgagccttgctaaggtcaggccctcaagcgatctgaacaattcaacagggcaatccccccatcataaggtacaacggagtgtgttcagctcccagaagcagagaaggtattctgatcacgctggtccggccatcccctccgtcgtcgcctatccgaagcgatctcagacttctaccgcggattccgatcttaaggaagatggaatttcaagccgaaaatcaagcggttccgcagtgggaggaaaagggatcgcaccggcaagccccatgctcggcaatgcaagcaatcctaacaaggcagatattccggaacgcaagaagagctctactgttcctagctcaaataccgccagcgggggcatgacaagacggaatacttacgtatgctccgagcgcactacagctgatagacactccgtgattcagaacgggaaggagaactctaccatccctgatcagagaactcccgtggctagcactcactccatcagtagcgcagcgacccccgatcggattaggtttcctcggggcaccgcctcgcgttctacctttcatggccagcctagagagcgtaggaccgcaacctacaatggacctcccgcttcacccagtctctctcacgaggctacaccactgagtcagactcggtctcgcggcagcacgaatttattcagcaagctgacttctaaacttacacgctcaagaaacgtgtctgccgaacagaaggacgaaaataaagaggccaaacctcggtccttgaggttcacgtggtctatgaagacaacctcctcaatggatccaggcgacatgatgcgagaaattcgcaaggttctggatgccaataattgcgactacgaacagcgcgagcgatttctgctattctgtgtccacggcgatggccacgccgaaaacttggtccaatgggagatggaagtctgcaagcttccgagactatccctcaacggcgtccggtttaaacgaatctcggggacaagtattgcctttaaaaacattgcctccaagatagccaatgagctgaagctctag

SEQ ID NO: 123420 - DNA, 2262 bp, synthetic construct
  misc_feature 1..2262: note = Description of Artificial Sequence: Synthetic coding sequence
  source 1..2262: mol_type = other DNA
atgtctacccgaacacctttgcccaccgtgaatgagcgtgacacagagaatcacacgagccacggagacggtcgccaggaagtgacctcccgaacctctcgttccggtgcgcggtgcagaaattctattgcatcctgtgcggacgaacagcctcatataggaaactacagactgcttaagaccataggcaagggcaattttgcaaaggtcaagcttgccagacatatcttgacggggcgcgaagtggccattaagatcattgataagacacagttaaacccgacttcccttcagaagctgtttcgcgaagtcaggatcatgaagatattgaatcatccaaacatcgtgaagctgtttgaggtgatagagacggaaaaaactctttacctcatcatggagtatgcaagcggcggtgaggttttcgattaccttgtggcgcacggaagaatgaaggaaaaggaagcccggagcaagtttcgccagattgtctctgctgtgcagtactgtcaccagaagagaattgtgcacagggacttaaaggccgagaaccttctgctggacgcagatatgaacattaagattgccgatttcggcttctcgaacgagttcacagtgggaggaaagctcgacacgttctgtgggtcacccccctatgctgcaccggaactgttccagggcaagaaatatgatggccccgaggtggacgtttggagcctgggcgttattctgtacacactcgtctccggttccctccccttcgacggacagaatctgaaagagcttagagagagagtgctgagggggaagtaccgtataccgttttacatgtcaaccgattgtgagaaccttcttaagagatttctggtgctcaatcctattaaaaggggaacgttggaacagatcatgaaggataggtggattaacgctgggcacgaagaagacgagttaaagccttttgtcgaacccgaactggatatcagcgatcaaaagcgcatagatattatggttgggatggggtattctcaagaggagatccaggagtccttgtccaaaatgaagtacgatgagatcaccgccacttacctgcttttagggcgcaagagcagcgagctggatgcctccgactctagctccagctcaaacctttctctggcgaaagtgcgtccctcttctgatctgaataacagcactgggcaaagccctcaccacaaagtgcagcggtcggtctttagctcacaaaaacaaaggagatattccgatcatgccggcccagccatcccttccgtggtagcctaccccaaacgctcgcagaccagtactgcagacagtgacctaaaggaagatggcatctcctcccgtaaaagtagtggcagtgctgttggtgggaagggtatcgccccggcatcacccatgcttggaaacgcttcaaaccccaacaaggccgatatccccgagcgcaagaagtcgagtaccgtgcccagctcaaataccgcttccggcggcatgactcggagaaacacctatgtatgcagcgagagaacaactgccgacagacatagtgtcatacagaacggcaaagagaacagtaccataccagaccaacgtacgcctgtcgcatccacacacagcatcagctccgcagccacaccagataggataaggttcccccggggcacggcatcccggtccacctttcacggccagccaagagagcgcagaaccgccacgtacaacggacctcctgctagcccctcactcagccatgaagcaacccctctttctcaaaccagaagcaggggctccacaaacctgttctctaagttgacatctaaacttacgcggcgcaacatgagtttccgattcatcaaaagacttccaacagaatacgaacgaaatggtcggtatgaaggcagttcccgcaacgtttctgctgaacagaaagatgaaaacaaagaagcaaagcccagaagtctcaggtttacctggtcaatgaagaccacttccagcatggacccaggagacatgatgcgggagatcagaaaagtgctggacgcaaataactgtgactatgagcaacgggagagattcctcctgttttgtgtgcacggggatgggcacgctgaaaacctggtgcagtgggagatggaagtttgtaaattgccgcggctgagcttgaacggggtccggtttaaacggatcagcggcacgtcaattgcattcaagaacatcgcctcgaagatcgctaatgagctcaaactgtag

SEQ ID NO: 123421 - DNA, 1980 bp, synthetic construct
  misc_feature 1..1980: note = Description of Artificial Sequence: Synthetic coding sequence
  source 1..1980: mol_type = other DNA
atgtctacacggactccactgccaacagtgaatgagcgggatacagagaaccacacttcacacggcgatggcaggcaagaggtgacaagccgcacctccaggtccggtgcgaggtgcaggaactctatcgccagttgtgctgacgagcagccgcacatcgggaattataggctcctaaaaaccatcggtaaaggtaatttcgctaaagtgaaactggcaaggcacatcttaactgggagggaagtggctattaagataatagataaaacccagctaaatcctacttcactccagaaactgtttcgcgaagtgagaatcatgaaaatccttaatcatccaaacatcgtcaagttatttgaggtaatagaaacagaaaaaacgctgtacctaatcatggagtacgcctccggaggggaagttttcgactacctcgtagcacacgggagaatgaaggagaaggaggcgagaagcaagttcaggcagattgtgagtgctgttcagtattgtcaccagaaacgcattgtccacagagatttgaaggagctccgtgaaagagtcctgaggggtaaataccgaatcccgttttacatgagcacagactgtgaaaatctgctgaagcgatttcttgtgctgaatcccattaaacggggaacactggagcaaattatgaaagaccgttggatcaacgcaggtcacgaagaagatgagctgaaaccattcgtggagccagaactcgatatctccgaccagaaacggattgacatcatggttggcatgggctactctcaggaagagatacaggagtctctatccaaaatgaagtacgatgagatcaccgccacttacctcctgttgggcaggaagtcgtcagagctggacgcctccgattcttcatccagttcaaacttgagtttggcgaaagtccgccccagcagcgacctgaacaacagcaccggccagtcccctcaccacaaagtgcaaagaagcgtcttcagtagtcaaaagcaacggaggtacagcgatcacgcaggccctgccattccaagtgttgtagcgtatcctaagcggtcacagacctccacagcagatagtgatctgaaggaggatggaatctcgtccaggaagtctagcggctctgctgtggggggcaagggtatcgctccagccagtccgatgctcggaaacgccagtaaccccaataaggccgacatccccgagagaaagaagtcgtccaccgtacctagctctaacaccgcaagtggtggcatgaccagacgcaacacttatgtatgctcggagcgcacgacagctgataggcactctgtgatccaaaatgggaaggaaaattctactatccccgaccagcgaactccagtggcctctacccattcgatttcttctgcggccacccccgatcgcatccgcttcccccgcggaaccgccagtcggtccacgttccatggacagccaagagaaagaagaaccgccacctacaatggacccccagcctcgccgtctttaagtcacgaggctacgcctctgtcccagactcgcagtaggggaagtactaacctgttttctaagttgacatctaagcttacacgccggaatatgtcattccggttcattaaatcacgcaatgtgtccgcagagcagaaggacgagaacaaagaagctaaaccacggtctctgcggttcacatggtcaatgaagaccacttcgagcatggatcctggtgatatgatgcgcgagatccggaaggtattggatgccaacaactgtgactatgaacagcgtgaaagattcctgcttttttgtgtgcatggggatggtcacgccgaaaatctggtgcaatgggaaatggaagtctgcaagctgcccagactgtccctgaacggagtgaggtttaagcgaattagtggtaccagtatagcgtttaaaaatatagcctcaaaaatcgccaacgaactgaagctgtag

SEQ ID NO: 123422 - DNA, 2235 bp, synthetic construct
  misc_feature 1..2235: note = Description of Artificial Sequence: Synthetic coding sequence
  source 1..2235: mol_type = other DNA
atgagcactcgcactcctctaccgaccgtgaacgagcgggacacagagaaccacacatcacacggtgacggccgccaagaagtgacaagccgaactagccggtccggtgccagatgtagaaattcaattgcctcctgcgccgatgagcaacctcacatcgggaactaccggctgttgaagactatcggaaaggggaatttcgccaaagtgaagctggcccggcacatcctcaccggcagggaggttgccattaagattattgacaagacccagctgaacccaacctctctgcagaagctatttagggaagtgagaataatgaagatcctgaatcatcccaatatcgtcaagctgttcgaggtcatcgagactgaaaagactctttacctgataatggagtacgcttccggtggggaggtgttcgactacctggtggcccacggccgaatgaaggagaaggaggcccgaagtaagtttaggcaaatcgtgagcgctgttcagtattgtcatcaaaaacgtatagtgcacagagacctgaaagcagaaaatctgctgcttgatgccgatatgaatattaaaatagcagatttcggtttctcaaacgagtttaccgtaggcggtaaattggacactttctgtggctccccgccctacgccgctcctgagctatttcaaggtaaaaagtatgatgggccagaggtcgacgtgtggtctttgggcgtgattctttacacattggtaagtggatccctccctttcgacggccagaatctcaaggaactgagggagcgggtgttgcgcggcaaatatcgcatccctttctacatgagtaccgactgtgagaatctgctgaagcgctttctcgtgctgaatccgatcaagagggggaccctcgagcagataatgaaggatcgttggattaatgccggtcacgaggaggacgaactgaaaccttttgtcgagcctgaattggatatctcagatcaaaagaggattgatatcatggttgggatgggatactcccaggaagagattcaggagtctttgtccaagatgaagtatgatgaaatcaccgccacgtacttgctccttggacggaaaagttcagaactggatgcctctgatagttcctcaagctccaatttgtccctagcaaaggttcgcccttcgagcgatcttaataattccacaggccagagtccccaccacaaagtgcagcgctctgtgttttcaagccaaaagcagaggcgatactccgatcacgcgggacctgctatccccagcgtggtcgcatatccaaagagatctcagacatccaccgctgactctgatcttaaggaagacgggatttccagccggaagagttctggctcagctgtgggcggtaaaggtattgcccccgcctcccctatgctgggcaatgcgtccaaccccaataaggccgacatcccagagcgcaaaaagagctcaacggtgcctagctctaataccgcttccggaggcatgaccagacgtaacacttacgtgtgcagcgagcggactaccgctgatcgtcatagtgtcattcagaacggcaaagaaaattctaccatcccagatcagaggactccagtcgcatcaacacatagcatttcttctgccgcaactcctgatcggattagattccctcgcggaacagccagccgttccacttttcatggccagccaagagaacgccgcaccgctacttacaacgggcccccagcttccccatctctttcccacgaagccacccctctgagtcagacaagatctcggggtagcaccaaccttttctccaaattgacatccaagctgacaagacgcctgcccaccgagtacgagaggaacggacggtacgaggggagcagtaggaacgtctccgcagagcaaaaggacgagaacaaggaggcaaagccacgttccctgcgattcacctggtcaatgaagacgacctcgagcatggatcctggcgatatgatgcgcgaaattaggaaggtgctggatgcaaacaactgcgattatgaacagcgggagagattcctgctgttctgtgtccacggcgacggtcacgcggagaatctggttcaatgggagatggaggtgtgcaaactgccccgcctctctcttaacggagtgcggtttaaacggatcagcgggacctcgatcgcctttaagaacattgccagtaagattgccaatgagttaaagttgtag

SEQ ID NO: 123423 - DNA, 1518 bp, synthetic construct
  misc_feature 1..1518: note = Description of Artificial Sequence: Synthetic coding sequence
  source 1..1518: mol_type = other DNA
taagtagatgtatggagcctcggcgtcattctgtacacactggtcagtggtagcttgccctttgacggccagaatttgaaagaactgagagagagagtactgaggggcaagtatcggatccctttctatatgtctaccgactgcgaaaaccttctgaaacggtttttggtcctaaaccccattaagcggggtaccctcgagcagatcatgaaggacagatggatcaacgccgggcacgaagaagatgaactgaagcccttcgttgagcctgagctggatatctccgatcagaagagaatcgacatcatggtgggtatgggatatagccaggaagaaattcaagagtctctgagcaaaatgaagtatgacgagatcaccgctacatacttactgctgggaagaaagagcagtgaagttcggccatcgtccgaccttaataattcgacgggccaatctcctcaccacaaggtgcagaggtcagtattttcctcacagaaacagagaagatactcagatcacgccggtccagcaatcccaagcgtggtcgcatatcctaagcgaagccagactagtaccgcagattctgatctgaaagaggacgggatttcgagcaggaagtccagtggcagcgccgtgggcggcaagggcattgcgcccgcatcaccaatgttaggaaatgcttctaaccccaataaagccgacattccagaaaggaaaaaatcaagcacggttcccagttctaacaccgcctcaggggggatgacacgccggaatacttacgtctgcagtgaaagaaccaccgctgatcgtcattccgtgatacagaatgggaaggagaattctacaatcccagaccagcggacccctgtggcctctacccattccatctccagcgcagcaactcctgaccgcatacgtttccccagggggactgccagcaggagcacattccatgggcagccacgtgagaggcggaccgccacttacaatggtccaccagcctcacctagcctgagtcatgaggcaacacctctttcccagacccgatctcgcggtagcacaaacttgttcagtaagctgacgtccaagctgacacgccggaacatgtcattccgtttcataaagcggctccccactgagtacgagcggaatggacggtacgagggcagtagtaggaacgtgtccgctgagcagaaagacgagaacaaggaggctaaaccccgctcactccgcttcacatggtctatgaagacaacatcgagtatggatccgggtgacatgatgcgcgaaattcggaaagtgctcgacgctaacaactgtgactatgagcaaagggagcggtttctgctcttttgtgtccacggcgacggccacgccgagaatttagtgcagtgggaaatggaagtgtgtaagctgcctaggctgtctctgaatggcgtcaggttcaaaagaatcagcggcacctcaatcgctttcaagaatattgcaagtaaaatcgccaacgagctcaaactatag

SEQ ID NO: 123424 - DNA, 2259 bp, synthetic construct
  misc_feature 1..2259: note = Description of Artificial Sequence: Synthetic coding sequence
  source 1..2259: mol_type = other DNA
atgtcctcccggacggtgctagctccaggcaatgacaggaactcagacacccacggaactctcgggtccggcagatctagcgacaagggaccttcatggagcagcagatcattgggcgcgcggtgccgaaattcaattgccagctgtccagaggaacagccgcacgttgggaattacagactgctgcgaactattgggaagggtaactttgcgaaagtgaaattagcccgtcacatcctgacaggcagggaggtcgcaattaagatcatagataaaactcagctgaatcccagcagcttgcagaagctttttcgtgaggtgcggattatgaaagggctgaatcacccaaatatagtgaagctgttcgaagtcatcgagacggagaagacactctacctggtgatggagtacgcgtcagccggagaggtatttgattacctagtgtcccacggtcgcatgaaagaaaaggaggccagggccaaattccgccaaattgtgtcagccgtacactattgccaccagaagaatattgtccatagggacctaaaagccgaaaacttattgttggacgccgaggctaatattaagattgctgattttggtttttccaatgagtttactctcgggtccaaactggatacattttgcgggtctccaccatatgcagctcctgaattattccagggaaaaaaatatgatgggccagaggtggacatctggagtctgggtgtaattctgtatacactggtgagcggctctctgcccttcgacgggcacaacctgaaggagctcagggaaagggtgcttcgtggtaagtacagggtgccattttacatgagcaccgactgcgagtctatcctgaggaggtttctggtgctcaatcctgccaagaggtgcacactggagcagattatgaaggataaatggataaacatagggtacgaaggggaagagctgaaaccttacaccgagccagaggaagattttggagataccaaacgaatagaggtgatggttggaatgggttatacacgcgaagagatcaaagagtccctgacaagtcagaagtacaacgaggtgaccgctacttatctcctcctgggacgaaaaactgaagagggtggtgacagaggggcccctggcctagcgctggctcgggtcagggctccaagcgacacaaccaacggcacttctagcagtaaggggacatcccatagcaaaggccagagaagctcctctagtacctatcaccgtcagagacggcattctgatttctgcggcccatcccctgcgcctctccatcctaaaaggagccccaccagtaccggcgaagctgagcttaaggaggaacgtctcccggggcggaaggctagctgctcaaccgccgggtccggttcaaggggactccccccttcttctccaatggtgtcctcagcacataacccaaacaaagcagagatccccgagcgccgaaaagactctaccagtacgcctaataatttaccaccttctatgatgacaaggagaaacacttacgtatgcactgaacgcccaggagcagaaagaccctctttattacctaatggtaaggagaattcaagcggcacaccccgtgtgcccccggctagcccttcatcacacagcctggcccctcctagtggagaacgatcccgactagccaggggctctaccatccgctctactttccatggtgggcaggtgagggacaggcgggccgggggcggtgggggcggtggggtccagaatggccctccagcttctccgacgcttgcccacgaggcagctccactcccggccgggcgccctagacctaccaccaacctgttcaccaagcttacctccaaactgacacggcgcgtggcggatgaaccagaacgcatcggcggcccagaagttacctcatgccacctcccttgggatcagacagagactgctccccggctactcagattcccatggagcgtgaaactgacaagttccagaccccctgaagctttaatggctgctctccgtcaggctacggcggccgctagatgtaggtgtcggcagccacagcctttcctgctggcatgcctgcatggcggtgcagggggtcccgaaccactgagccatttcgaagttgaagtctgccagctgccacggccggggctgagaggcgtactgttccgaagagtagccggaacagcgttggctttccgtactctggtgactaggattagcaatgacttggaactatag

SEQ ID NO: 123425 - DNA, 1389 bp, synthetic construct
  misc_feature 1..1389: note = Description of Artificial Sequence: Synthetic coding sequence
  source 1..1389: mol_type = other DNA
atgagttctcggactgtgttggcccccggcaatgacagaaactctgacacccacggcacacttggctctgggaggtccagcgataaaggcccaagctggtcatcccggtccctcggtgccagatgccgcaactccatcgccagttgtcccgaagaacaaccacatgttggaaactatcggttgctgcgtaccatcgggaagggaaactttgctaaggtcaaattggccaggcatatcctgacggggcgggaggtggccatcaagattatagacaagacgcagctcaacccctcgtctctgcaaaagctgttccgggaggtgaggattatgaagggcttgaaccatcctaacattgtgaagctttttgaagtcatcgagactgagaagaccctgtacctggttatggagtacgcatcggctggcgaacctccaactttgagcgctctccctctttgtcaccttccacttcccctccacttgactcttacccctctagggttgtgtcccgccggggaagtatttgattatctggtgtctcacggtagaatgaaagagaaggaagcacgagctaagttcaggcagatcgtatcagctgtgcactactgccatcagaagaacatagtgcacagagacctgaaggctgaaaatctccttctggatgccgaagccaatattaaaatcgccgatttcggatttagcaacgaatttactctgggttctaaactggatactttctgtggaagcccaccttacgcggcccccgaactcttccagggaaagaaatacgacggtccagaagtagacatctggtccttgggagtgattctctacacactcgtgtcagggagtctgcctttcgacggccataacctgaaggaactcagagagcgtgtgctgcgcggaaagtatcgcgtgcctttttacatgagcaccgattgcgagtcaattctgcggaggttcctggttctgaatcctgccaaacgttgcaccctcgagcaaattatgaaggataagtggataaacatcggttacgagggggaagagcttaaaccttatactgagccggaagaggattttggcgacacaaaacggatcgaggtcatggtggggatggggtatacccgggaggaaatcaaagagagcctcacctcccagaagtataatgaagttaccgccacttaccttctgcttggtagaaaaactgagccagacgaacacggagggggcggggctgaaggaggagctgccgcaaggcccgagggagagttgcaacatagaggcgagtgggaatccagagcagctcccttacaaccgcatggacaacagcggccacaacctcagcaaggtcgcgacccacgcgcagcggaaggccaacacgaacatccatag

SEQ ID NO: 123426 - DNA, 2067 bp, synthetic construct
  misc_feature 1..2067: note = Description of Artificial Sequence: Synthetic coding sequence
  source 1..2067: mol_type = other DNA
atgagctcccgaaccgtcttagccccaggtaacgatcggaatagcgacacccacgggactctggggtcgggccgctctagtgataaaggtccgagctggtcctcaagatccctcggagcccggtgcagaaactccatagccagctgccccgaggagcagcctcacgtagggaattatcgactgctgaggactattgggaaaggcaattttgcgaaagtcaaactcgcaagacatatattgaccggcagagaagtggcaattaaaattatcgataaaacccagctgaatccatcatcgttgcagaagcttttccgtgaggtcagaatcatgaaaggacttaatcacccaaacattgtgaaactgttcgaggttatagaaacagaaaaaacactgtacctcgtcatggagtacgccagcgctggggaggtgttcgactacttagtgtcacacgggcgtatgaaagagaaagaagcgagggccaaattccgccagatagtctccgccgttcactattgccaccaaaagaacatcgtccatagggatctaaaagcggagaatctgctgttagatgccgaggccaatataaagatcgccgactttggatttagcaacgaatttaccttgggtagcaagcttgacaccttctgcggatctccgccatatgctgcacctgagttattccaaggaaagaaatatgacggtccggaagtcgacatctggtccctcggagtgatcctttacacactggtgtctgggagcttaccatttgacggccataacttgaaggaactcagggagcgcgttctgcggggaaaataccgtgttcccttctacatgtccacggactgcgagtctatcctgcgtcgcttcctagtgctcaatcctgctaagaggtgcacactcgagcagattatgaaggataagtggattaatatcgggtatgaaggcgaagaactcaaaccctatactgagccggaagaggattttggagatactaagcggatcgaagtcatggtaggaatggggtataccagggaggagattaaagagagtttaaccagccagaagtataatgaggtcaccgccacatacctcctgctgggtagaaagaccgaagaagggggggaccgtggagcacctggactggcactggccagggtccgcgcaccgtcagacacaaccaacggcacctcatccagtaaaggcacatcacacagcaaggggcagcgcagctccagttccacttatcataggcagcggcggcatagcgacttctgcggacccagcccagctccgctccatcctaagagatcacccacctctactggcgaagcggaactgaaggaggaaaggctgccaggtcgcaaagcaagctgtagtactgctgggtctggctctcgtggactccctcccagctctcccatggtctcatctgcgcataatcctaacaaggctgaaatcccagaacggaggaaagattcgacgtcaactccgaacaaccttccaccctccatgatgaccaggcggaatacttatgtctgcacagagaggccaggagccgagagacctagtctgcttccaaacgggaaggagaattcatccggtactcccagggtgcctcccgcttccccctctagccactcactagctccaccttccggggaacgctctagactggcgagaggctcaactatcagatcaacattccacggcgggcaggtcagagatagacgggccgggggcggtggaggtggaggcgtgcagaatgggcctccagctagccctacccttgcacacgaggcagctcccctgcccgccggcaggccccgacccactaccaacctatttactaaattgacctctaagttaacacgcagagttactttagatccaagtaagaggcaaaacagtaatcgctgcgtgagcggcgcgagcctaccccagggctccaagataaggagccagacaaatctccgtgagtctggcgacctgaggagtcaagtggcgatttaccttggaattaagcgaaagcctcctcccggatgttctgacagtccaggtgtctag

SEQ ID NO: 123427 - DNA, 240 bp, synthetic construct
  misc_feature 1..240: note = Description of Artificial Sequence: Synthetic coding sequence
  source 1..240: mol_type = other DNA
atggctgcgctgcgccaggccaccgcagccgctagatgccgttgtcgtcagccccagccctttttacttgcatgtttacacggaggtgctggagggcccgagcctctctcacattttgaggtggaggtgtgccaacttccccggccaggcctgagaggagttctttttcgcagggtcgccggcaccgcattggcattcaggaccctcgtgacgcgcatctcaaacgacctcgagctatag

SEQ ID NO: 123428 - DNA, 1032 bp, synthetic construct
  misc_feature 1..1032: note = Description of Artificial Sequence: Synthetic coding sequence
  source 1..1032: mol_type = other DNA
atggccgcggctacagagcttaatcgaccatcaagcggagacagaaaccttgagcgtaggtgtaggccaaacctgtctcgagaagtgctatatgagattttccggtcccttcacactctggttggacaacttgatttaagggacgacgtcgtgaaaataacaatcgattggaacaaactccagtctctcagtgcttttcagccggcgctgctattttcagccctggaacagcatatcctgtacctccagccttttctggccaaattgcagagccctatcaaagaggagaacacgacagctgtggaagaaataggaagaacggagatgggtaataaaaatgaggtaaacgacaaatttagcatcggagatctccaggaagaggagaaacacaaggagtccgatttacgggacgtaaaaaagacacagatccattttgaccccgaggtggtacagataaaggctggtaaagccgaaatcgatagacgaatctcggcattcattgagagaaagcaggcagagatcaacgagaacaacgtgcgcgagttctgcaatgtaatcgactgtaatcaagaaaactcttgtgcccggactgacgcaatattcaccccttatcctggtttcaagtcacacgtgaaagtgagcagagtggtaaacacctacgggccacaaactcgtcctgaggggatacccggttctggacacaaacctaactccatgttgcgagactgcgggaatcaggcagtggaagagagactgcaaaatatcgaagctcacttgcgtttacagacaggaggcccagtaccccgtgatatataccaaagaattaagaagctagaggacaaaatcctggagctcgaagggataagtcccgaatatttccagagcgtgtcgttcagtgggaagcggaggaaggtgcaacctccacagaattactccctggccgagctcgatgagaagatttctgctctgaagcaagccctcctaagaaaaagtcgtgaagctgagtccatggccacacatcatctcccctag

SEQ ID NO: 123429 - DNA, 1035 bp, synthetic construct
  misc_feature 1..1035: note = Description of Artificial Sequence: Synthetic coding sequence
  source 1..1035: mol_type = other DNA
atggctgctgcgactgagctcaatcgaccctcaagtggagacagaaaccttgagaggaggtgccgtcctaacctgagcagggaggtgctgtatgagatcttccggtctctccacacgctggtgggtcagctcgatcttagggacgacgtggttaaaatcaccattgattggaacaagttacagagtttgtccgccttccaacccgcacttctcttttccgccctggagcaacacattttgtacctacagcccttccttgcaaagctgcagtcccctatcaaggaggaaaatacaaccgccgtggaggagatcggacggacagaaatgggaaataaaaatgaggtgaatgacaaattctctattggagacctgcaagaggaggagaaacataaagagtccgacctgagagatgtcaagaagacccagatccacttcgacccagaggtggtgcagattaaggcagggaaagctgagattgaccgtcggataagcgcattcatcgaaaggaagcaggccgaaatcaacgagaataacgtgagagagttttgcaacgtcatcgattgcaaccaggagaattcttgtgctcggactgatgctatcttcactccttatcccggattcaaaagccacgtcaaggtaagccgagtggtcaatacatacggcccccagaccagaccagaaggcatacccggctctgggcacaaaccaaatagcatgttgagggactgcggtaaccaggcagtagaggaaagactccagaatatcgaggctcacttgcgattgcagaccggagggcccgtgcctcgcgacatctatcagaggattaagaaattagaagataaaatcctggaactagaaggcatttctccggagtacttccagagtgtatctttttctggaaagaggcggaaagtacagccacctcagcagaactacagtctggccgaattagatgagaaaattagtgccttaaagcaagccctgttaaggaaatcgcgggaggcagaatctatggcaacccatcatctcccctag

SEQ ID NO: 123430 - DNA, 4944 bp, synthetic construct
  misc_feature 1..4944: note = Description of Artificial Sequence: Synthetic coding sequence
  source 1..4944: mol_type = other DNA
atggtccaaaagaagaagttctgtccgagattgctggactatctcgtgatcgtgggagcccgccatccaagcagtgactccgtggcccagacaccagaactgctgcgccgttatccgcttgaagatcatactgagttccctctccctcccgacgtggtgttcttttgtcaacccgagggatgtctctccgttcggcagcggagaatgagtctgcgcgatgataccagctttgtctttaccctcacggacaaggatacaggcgtaacccgctatggcatctgcgtgaatttctaccgctccttccagaaaaggatctcaaaagagaaaggagaggggggagctggcagccggggcaaagaaggtacacatgctacttgtgcgtccgaagagggaggcactgagtctagtgagtcagggagcagcctgcagcctctgtccgctgatagtactcctgatgttaaccagtctccccgggggaaacgaagggctaaagccggcagtcgcagtcggaacagcacattaacctccctgtgtgtcctgtctcactacccgttcttctcaacattcagagagtgtttgtacacattgaaacggcttgtggactgctgctcagagaggctgctgggaaaaaaactggggattccacggggcgtccaacgggacactatgtggagaatattcacaggctcccttcttgtcgaagaaaagtcgtcagctctgctccatgatctccgagagatcgaagcttggatttacagactgttacgtagtccagtgcctgtgtctggccagaaacgggtggacatcgaagtcctgccccaggagcttcagcccgccttgacatttgctctaccagatccaagcaggtttacactggtcgatttccctttacacttgccccttgaattactgggagtcgacgcgtgcctgcaggtcctgacttgcattctcttggaacataaagttgtgctccagtcacgggattacaacgccttgtccatgtccgtgatggccttcgtggcaatgatatatccactggagtacatgtttccggtgatcccattattaccaacctgcatggcctctgcggagcagcttctactagccccgaccccttatatcataggagttcctgctagcttttttctgtataaactggattttaagatgcctgatgatgtgtggttggtcgaccttgattcaaatagagtaattgctcctaccaatgctgaggtgctgccaatcttgcccgaacctgaatcattagagctaaaaaagcatctgaaacaggccttggctagtatgtctttgaatactcagccaatcttaaatctcgaaaaatttcacgagggtcaggaaattccacttctgctgggacgtccgagcaatgatctccagagtacaccctcaactgagttcaatccgctgatatatggaaacgacgtggactcagtcgatgtcgcaactagagttgcaatggtccgctttttcaactccgcgaatgtcttacaggggtttcaaatgcacacaaggacactgaggctcttccccagacctgtggtagctttccaggccgggtcattcttggccagccgacctagacagacaccttttgccgagaaactggctagaacacaagcggtggaatactttggtgagtggatcctgaaccctacgaattacgccttccagcgcatacataacaacatgtttgatcccgccctaattggggataaacccaaatggtatgcacatcagctgcaacctatccactaccgggtgtacgacagcaatagccagctcgcagaagctttaagcgtgccacctgagcgagatagtgactcagagcctacagatgatagcggaagcgactccatggactatgatgattcctcgtcaagttacagcagcctgggcgatttcgtgtccgagatgatgaagtgtgatattaacggcgacacgcctaacgttgatccgttaactcatgcggctttgggcgatgcctctgaggttgaaatcgatgaactacaaaaccagaaagaggccgaggagcctgggccagattccgagaacagccaggaaaatccacccctgcgaagcagtagtagcactacagcctcaagctctccaagcaccgtgatccacggggcaaatagtgaacccgcagactccacagaaatggatgataaggccgccgtaggggtgtctaaacccctcccatcggtgcctccatccataggtaagagcaacgttgatcgtcgccaggccgaaatcggggaagggtctgtgcgacggaggatctatgataatccttattttgagccacaatatggatttccgcccgaggaagatgaggatgagcagggcgaatcatatacacccagattttcccaacacgtgtctggcaaccgggctcagaaacttctcagaccgaattcgctgcgtctggcatccgatagtgacgccgagtccgactctcgggcctcatcccccaactcgacagtaagcaatactagcaccgagggcttcggtggcatcatgagctttgccagcagcctctacagaaaccactccacgagcttcagcctctcaaatctgactcttcccacgaagggggcacgagaaaaagccacccccttcccaagcctgaaggttttcggcctgaacacccttatggaaatcgtgaccgaagctggccccggatcaggagagggaaataggcgcgccttggttgaccagaagtcttcagtgattaagcacagtccgaccgttaaacgtgagccccccagcccacagggtaggagttctaactcgtccgagaatcagcagttcctcaaggaagtcgtacactccgtgctggacgggcaaggggtgggatggttaaacatgaagaaggtgcggaggttgttggagtcagagcaactgagggtctttgtgctgtcaaaactcaatcgcatggtccaaagtgaagacgacgcccgtcaggatattatccctgacgtggagatttctcgcaaagtttacaagggtatgctcgacctgcttaaatgtaccgtgctttccctggagcagtcctatgcccatgccggcctcggcgggatggcgtctattttcggcctgctcgaaatcgcccagacccactattattccaaagagccggataaaagaaagcgtagtcctaccgaaagcgttaatactcctgtaggcaaggatcctgggcttgcgggtagaggggatcctaaagccatggcgcaactgcgggtccctcaactgggccctcgtgcgcctagcgccacgggcaaaggtcccaaggagctagacacaaggtccttgaaggaagaaaactttatagcctcaattgagctgtggaacaaacatcaagaggtgaagaagcagaaggcgctcgagaaacaacggcccgaggtaattaagccggtgttcgacctgggggagaccgaagagaaaaagagccagataagtgcagattctggagtcagtctcacgagcagttctcagcgtactgaccaagactcggttattggcgtcagccccgctgttatgattcggtcatccagccaggactccgaagtctctactgtggtttcaaattccagtggggagactctgggcgctgactcagacctgagcagtaacgctggcgatgggccgggaggggagggttcagtgcatctggcctcgagtagggggaccctttcagactccgagatcgagacaaattccgctactagcacaattttcggaaaggctcactcgctgaagccaagcattaaggagaagctcgccggatcaccaattagaacatcggaggacgtttcccagagggtgtacctttacgagggtcttcttggaagagataagggatcaatgtgggaccagctggaagacgctgccatggagacctttagcatttctaaggaacgaagcactctctgggaccagatgcaattctgggaggacgcctttctggacgcagtgatgctggaacgcgaggggatgggcatggaccaggggccacaggagatgatagatagatatctgtccctgggggaacacgaccggaagaggctcgaggatgacgaagaccgccttctggcgacactgctccacaatctgatcagctatatgctgctgatgaaggtgaataaaaacgatattagaaaaaaagtgagacgtctcatgggcaagagccacatcggactcgtctactcgcagcagattaatgaggtcctggatcagcttgcaaacctgaacgggcgcgatttgtctatctggtctagtggctccagacacatgaaaaaacaaacgttcgtggtccacgcgggcacggataccaacggggacatattcttcatggaagtgtgtgacgattgtgtggtacttcgctctaacatcggcaccgtgtacgaaaggtggtggtacgaaaaactgatcaacatgacctattgtcctaagacaaaagtgctttgcctttggagaaggaatgggagcgagacccagctcaataagttctatacgaagaagtgccgtgagctatactactgtgttaaagattctatggaacgcgcggcggctaggcagcagtcgattaagccgggcccagaactcggaggcgagttccctgtgcaggatttaaagaccggagagggcggactgctgcaggtaacgctggagggcatcaacctgaagttcatgcacaaccaagtgttcatcgagctgaaccacataaagaagtgcaatactgtcagaggtgtgtttgtgcttgaggaattcgtccctgagattaaagaggtcgttagccataagtacaagacccccatggcacatgagatttgttatagtgtgctctgtttattttcttacgttgccgctgtgcatagctccgaggaggacctcaggacaccaccgaggccggtcagttcatag

SEQ ID NO: 123431 - DNA, 4767 bp, synthetic construct
  misc_feature 1..4767: note = Description of Artificial Sequence: Synthetic coding sequence
  source 1..4767: mol_type = other DNA
atggtgcagaaaaaaaagttttgtcctcggctgctagactaccttgttatcgtcggagctcggcatcctagctcagacagcgtcgcccagacacccgaacttcttcgaaggtatccccttgaggaccatacggagttcccactgccgcccgacgtggtgtttttctgtcagccggagggatgccttagcgttagacaaagacgcatgtccctgagggatgataccagttttgtgtttacgctgacagataaagacaccggagttacccgatacggcatttgtgtcaacttctaccgttcatttcagaaaaggatctcaaaagaaaaaggggaggggggtgctggaagcagagggaaagagggcacacatgctacgtgtgcctcagaagaaggaggcacggagtcctcggaatcaggctcttcgcttcagcccttgagcgccgatagcactcctgatgtcaatcaatccccgagagggaaacgacgggcgaaggccggatcccggtcaagaaattccacccttacgagcctgtgtgtgctctcacactacccctttttctccacttttcgcgaatgcctgtatacgctcaagcggctggtggactgctgttctgagcgtctgctcggcaaaaagttaggtattcccaggggcgtccaacgcgatactatgtggcgcatttttacagggagcctgctcgtggaagagaagtcctcggcactgctgcacgatctccgagagattgaagcatggatctatcgcctgctccgctcacctgtccccgttagtggccagaaacgcgtagacatcgaagtgctcccccaggagctgcagcctgcgctgacattcgctctgcccgatccttcacggttcacactggtcgacttccctctgcacctcccactggagctactcggtgtggatgcttgtctacaggtcttgacctgcatcctgctggagcacaaggtggtccttcagagccgtgattacaacgcattgagtatgtcagttatggcgttcgtggcgatgatctacccattagagtatatgtttccagtgattccgctgttacctacctgcatggcatctgccgagcagctactcctcgcaccgaccccctacataattggggtgccagccagcttttttctctacaagcttgattttaaaatgcccgacgacgtctggctcgtggatttggactctaaccgagtgattgcccctactaacgctgaggttctgccgattctgccggagccagagtctctcgaactcaagaagcacctgaagcaggcattagctagcatgagtctgaatacccaaccaatcttaaacctcgagaagttccacgagggacaggaaatacccctcttgctgggacggccatctaatgatctacaatcaaccccttctacagaattcaatccgttaatctatggtaatgacgtggattctgtggatgtggccacacgggtagccatggtaaggtttttcaactctgctaatgtgctccagggatttcagatgcatacacgtactctgcgcctcttcccccgtcccgtggtggcttttcaggccggaagtttcctagcctctcggccccgtcagaccccatttgcggagaaactggcccgtactcaagccgttgagtactttggagagtggatcttaaatccaacaaactatgcctttcaacggatccataacaatatgttcgaccccgcccttatcggcgacaagccaaagtggtacgcccatcagttgcagcccatccactacagggtttatgattccaacagtcaactggctgaagcattaagtgttccgcccgagagagactcggattccgaaccgaccgatgactctggatcagacagtatggactatgacgattcgtcctcttcctactcatccctaggggatttcgtatccgagatgatgaaatgtgacatcaacggagacacgccgaatgtggacccgcttactcatgctgctctgggcgatgcgtccgaggtagaaatcgatgaactccagaaccagaaggaagcagaggagcctggaccagattccgagaactctcaggaaaaccccccactccggagcagcagtagtacaacggcctccagctctccgtcaacggtcattcacggggccaattcagagcctgcggacagcacggagatggacgacaaggctgccgtgggagtgtcgaaacccctcccttcggtccccccttcgattggcaagagcaacgtggaccgccgccaggccgaaataggcgaggggtcagtgcggcgccggatctacgacaatccctatttcgaaccacaatacgggtttcctcctgaggaggatgaggatgaacagggtgaatcctacactcccaggttttcacaacacgtgagcggcaaccgggctcaaaagctgctaagaccgaacagtcttagattagcttccgactctgacgcggagagtgatagtagagcatcctcccctaattccaccgtgagcaatactagcacagagggtttcggcggaattatgtccttcgcttccagcctgtacaggaaccatagcacctccttttctttatcaaatctcaccttgccaactaagggggctagagagaaagctacacccttcccctccctgaaggggaatcgtcgggccttggttgaccagaaatcaagtgtgataaaacattcaccaaccgtgaaacgggagcctccaagcccccagggacggagctccaattccagcgagaaccagcagttcctgaaggaagtcgtgcatagcgttctggatggacagggagtgggctggcttaatatgaagaaggtacgacggcttcttgaaagtgagcaactgagagtgtttgtattatcaaagctgaatcgcatggtgcagtcggaggacgacgcccggcaagatattatacctgatgtcgagatcagtcggaaagtgtataaaggcatgctggacctgctaaaatgcactgtactgtcacttgagcagagctatgcgcatgctggcttgggagggatggccagcatttttggacttctggagatcgcccaaacgcattactacagcaaggaaccagacaagcgcaagcgtagccctaccgagtctgtcaacacgcccgttggaaaagaccccggattggccgggcggggtgaccctaaggcaatggcacagctgcgggtaccacagctcgggccgagggccccgtcagctactgggaaaggtcccaaggaacttgacactcggtccttgaaagaggaaaattttatcgcttccataggtccggaggtgatcaagccagtgtttgatctcggtgagactgaggagaagaaaagtcagatctctgctgattcaggagtctccctgacttcttcctcacagcgcaccgatcaggacagtgtcatcggcgtgagtccagctgttatgatccgttcaagcagtcaggacagcgaagtgagtacagtcgtcagtaatagcagcggggaaaccctcggggctgactctgacctgtcttcaaacgcgggcgacggccccggtggggaaggcagtgtccatcttgcttcaagccggggtacattaagtgacagtgagatcgagacgaattctgcaacctctactattttcggcaaagcccactcacttaaaccatcgataaaagagaaattagcaggctcccccatccgtacctccgaggatgtctcacagcgggtatacctgtacgagggtctgctgggaaaggagcgcagcaccctttgggaccagatgcagttctgggaggatgcgtttctggacgccgttatgttggaacgcgagggaatgggcatggaccagggacctcaagaaatgattgacagatacctgtctctcggagagcatgatcgcaaaaggctcgaagacgacgaggatcgcctcctagccactctcctgcacaatttaatttcttatatgctgctgatgaaagtcaataagaatgacatccgcaaaaaagttcgtaggttaatgggtaaaagtcacataggactagtctatagtcagcagatcaacgaggtcctcgaccaactggctaacttaaacgggagggatttaagcatatggagctctgggagccgtcatatgaagaaacagacattcgtagtgcacgctgggacagataccaatggtgacatctttttcatggaagtgtgcgacgactgtgtggtcttgagaagcaatattgggactgtctatgaacgttggtggtatgagaaacttatcaatatgacctattgcccaaagacaaaagtcttatgtctttggcggcgcaatgggagcgagacacagctaaataagttctatactaagaaatgtagagagctgtactactgcgtgaaggactctatggagagggcggctgcccgacagcagagcatcaaacccggtcctgagctcggcggggagtttcccgtgcaagacctgaagacaggagaaggcggactcctacaagttacattggaggggattaatctgaagtttatgcacaatcaggtgtttatcgagctcaaccacattaagaaatgcaatacggtccgcggcgtatttgtgctggaggagttcgtccctgaaatcaaggaagtcgtgtctcacaaatacaagacccccatggcccacgagatatgctacagcgtgctgtgtctcttttcctacgtggcagccgtacatagctctgaagaggacctgagaacgcctcccaggccggtgtcttcgtag

SEQ ID NO: 123432 - DNA, 4827 bp, synthetic construct
  misc_feature 1..4827: note = Description of Artificial Sequence: Synthetic coding sequence
  source 1..4827: mol_type = other DNA
atggttcaaaagaagaaattctgcccaaggctgctcgattacttagtgattgtgggtgcccgtcatccttctagcgattcggttgcccagacaccagagctgttaagacgctatccccttgaggaccacaccgaattccctctgccgcctgacgtcgtctttttctgccagcccgaaggttgtctgagtgtccgccagaggaggatgtcgctgcgcgatgacacatctttcgtgttcacactgacagacaaagatacaggcgtgacaagatacgggatttgtgtcaatttctaccgcagtttccagaaacgcattagtaaggaaaagggagagggaggtgccggaagcaggggtaaagagggaactcatgcaacgtgcgctagtgaagagggaggcaccgagtcttcggagtctggcagctcactgcaacccctgagtgccgattccactcctgatgtaaaccagtcgccccgaggcaaaaggcgtgcaaaggcagggtctcgcagccgcaatagtaccctaaccagcctctgtgttttgtctcactatcccttcttcagcacctttagggagtgcctgtacaccctaaagcgactggtggactgctgctccgagcgactccttggtaaaaagctcgggataccccgcggtgttcaacgcgacaccatgtggcggattttcaccggcagtctgttggtcgaggagaagtcgagtgccctgctgcacgatcttcgggaaatcgaggcatggatctaccggctcttacggagccccgtgcccgtgtcagggcagaaaagggttgacatcgaagttctgccacaagagctgcagcctgctctgacctttgctttgccagatcctagcaggttcacgctcgttgattttcccctgcatctgcctttggagcttctgggcgtggacgcctgccttcaggtgctgacttgtattctcctagagcataaggttgttctccaatcacgcgactataatgccttgagcatgtccgtgatggctttcgtggcaatgatttaccccctggagtacatgttcccggtgatcccacttctgccgacgtgcatggccagcgccgaacaactgctgctggcccccaccccctacattattggggtccccgctagcttcttcctgtataagctcgatttcaagatgccagacgatgtgtggctggtggacctcgattcaaatcgggtgattgcccccacaaacgctgaagtgttgccaatcctgccagagcctgagagcctggaactcaaaaaacacttgaaacaggctctggcgtctatgtcacttaatactcagccaatactcaatttggagaagttccacgaaggccaagagattccattactcttgggccgcccgagcaacgatctccagtctaccccttcaacagaatttaacccgctcatctacggtaatgacgttgacagcgtagatgtggccacacgtgtagctatggtgcggttttttaactccgctaacgtgctgcaaggcttccagatgcacactagaactttaaggctgttcccgcgccccgtggtcgcattccaagcgggcagttttttggcctcccgcccgcggcagactccttttgcagagaagctggctaggactcaggccgtagagtattttggggagtggattttgaatcctaccaactacgctttccagaggatccacaataacatgtttgacccggctctcatcggagacaagccaaaatggtatgcccaccagctgcaaccaatccattacagagtgtacgatagcaactcccagctcgccgaagctttatcggtccctcctgagagagattccgacagtgaacccaccgatgattctgggtctgattccatggactacgatgactcctcatcgagttactccagtctcggggactttgtcagcgaaatgatgaaatgcgacatcaacggtgacacgccaaatgtggaccccctgactcacgctgcactcggagatgctagcgaggtggaaattgatgaactccagaatcagaaagaagccgaagaacctgggccggacagcgaaaacagtcaagagaacccacctctgcggtcttccagttctactacagcttcatctagccccagcacggtgatccacggcgcaaacagtgaacctgcagactctacagaaatggacgacaaagccgcggtaggtgtctcaaaacccttgccttccgtgcccccctccatcgggaaatccaatgtggatcgcaggcaggctgagatcggtgaggggtcagtgaggcgcagaatctacgataacccatattttgagccccagtatggattcccaccagaggaagacgaagacgaacagggggaaagctatactccacgattcagccagcatgtgagtgggaacagagcccagaaattgctaagacctaactccttgaggctggcatcagacagcgacgctgaatcagatagccgggctagcagtcccaacagtacagtgagtaacaccagtacggaaggcttcgggggaattatgtcattcgctagctcactgtatcgcaaccatagtacttctttcagcttgagtaatctgaccctgccaactaagggagcaagggagaaggccaccccatttcccagcctgaaagtctttggactgaatacacttatggagattgtcacagaagcgggccctggttcaggcgaaggaaaccggagagctctggtggaccagaaaagctccgtcattaagcactctccaaccgtgaagcgcgagcccccatctccacagggaagaagctcaaattcctccgaaaaccagcagttccttaaagaggtggtacatagcgtgctcgacggccagggggtaggctggctcaacatgaaaaaagtgcgacgcctgctcgaatcagagcagttgagggtatttgttttaagcaaactcaacaggatggtgcaatccgaggatgatgcaaggcaggatataattcccgacgttgagatatcccgcaaggtgtacaaggggatgctcgacctcctgaaatgcacagtgctgtctctggaacagagctacgcccacgcagggctaggtggtatggcgtcaatcttcggcctgctcgaaattgcccagactcactattactcaaaggaaccagacaaacggaagagatctcctaccgaatcagtcaatacgccagtgggcaaggaccccggactggccggaaggggcgatcccaaggctatggctcagcttcgcgttccccagctgggtcctagagccccatctgcgacagggaaggggccgaaagaactggatactcgaagtctcaaggaggagaactttatcgcatctattgggcccgaggtcatcaaaccagtgtttgacctaggtgagaccgaagaaaagaaaagccagattagcgccgactcgggcgtcagcctgacatctagcagccagaggaccgatcaggacagtgtgattggtgtctcacccgccgttatgattagaagcagcagccaggactctgaggtgtcaaccgtggtatcaaacagctccggtgaaactttaggggctgactctgacctgtctagcaatgcaggtgacggcccaggaggtgaaggatcggtgcatctggctagttctaggggcacactgagcgattcagagatagaaaccaactcagctacgagcaccatcttcggcaaggcccattcattgaagccctctatcaaagagaaactagcagggtctcccatccgaaccagcgaagacgtgtcacagcgtgtatacttatatgaggggttactgggcaaggagcggagcacgctgtgggatcagatgcagttctgggaggacgccttcctagacgcagtgatgctggagcgggagggcatggggatggatcaagggccccaggagatgatcgaccggtatcttagcttgggagagcacgaccgtaaaaggttggaggatgacgaagacaggctgctggccactcttcttcataatctgatcagctacatgcttctgatgaaggtcaataaaaatgacattaggaagaaagtgagacggctcatgggtaagtctcacatcggactggtctatagccagcagattaatgaagtgctggatcagcttgctaacctcaatgggcgggaccttagtatttggagctcagggagccggcacatgaagaaacagacatttgtggtccacgccggtactgataccaatggcgacatcttttttatggaggtttgcgacgactgtgttgtcctgcggtcgaacatcgggactgtctatgaaagatggtggtacgagaaacttatcaacatgacttattgccctaagactaaagtattgtgcctgtggaggagaaatggtagtgagacacagctcaataagttttatactaagaaatgtagggaactctattactgtgtgaaagactctatggagcgggctgctgcaagacaacagagcatcaaacccggccctgaactagggggagaatttcccgttcaagatcttaagacgggcgagggagggctcttacaggtcactctggaaggcattaacttgaagtttatgcacaatcaggttttcatcgagctcaaccacattaagaagtgcaacaccgtccgcggagtgtttgtgctagaggagtttgtgcctgagataaaggaggtagtgtcccacaaatataagactcccatggcgcatgagatctgttattctgtcctgtgcctctttagctatgtggcggccgtacattcctctgaagaggatctgagaacccctccaaggcctgtatcgagttag

SEQ ID NO: 123433 - DNA, 4746 bp, synthetic construct
  misc_feature 1..4746: note = Description of Artificial Sequence: Synthetic coding sequence
  source 1..4746: mol_type = other DNA
atggtgcaaaagaagaaattctgtccaaggctccttgattatcttgtcatcgtaggagccagacatccaagctcagacagcgtcgcacaaactccagaactgctgcgacgctatccactcgaggaccacaccgagtttccacttcctcccgatgtggtgtttttttgtcagccggaggggtgccttagcgttcgccagcggaggatgtctcttcgagatgatacctcctttgtctttaccctgacggataaagatactggagtgacgcggtatggcatctgcgtaaacttctacaggagctttcagaaaagaatctcaaaagagaagggcgaaggtggcgccggctctaggggaaaggaaggaactcatgcaacctgcgcctccgaggaagggggcactgagtcctcagaatcaggatcctcgttgcagcctctgtccgcagacagcacgccagacgtgaaccagagtccccgggggaaacgccgagccaaagctgggagtagaagcaggaatagcaccctgactagcctttgtgtgttatcccactatcctttctttagcacctttcgggagtgcctgtacactttgaagcggttggtggactgttgctctgagcggctgctggggaagaaattaggcattccacggggcgttcagcgcgataccatgtggcgcattttcacaggctccctgttagtagaggagaagtccagcgctctactgcacgatcttcgcgagatcgaggcatggatctatagactgcttaggtcccccgtacccgtgagcggtcagaagcgcgttgatatagaagtgttgccccaggaactacaacccgccctgacttttgccttacccgatccgtctcggttcacactcgttgattttcctctgcacctgccactcgaacttctgggagttgatgcatgtctgcaggtcctgacatgcatcctgttagagcacaaggtcgtgcttcagtcaagagactacaacgcgctttcgatgtccgtgatggcctttgtggcgatgatttaccccctggagtacatgtttcctgtgatccccttgctaccaacttgtatggcctccgctgagcagctcctgctggcccctaccccgtacatcatcggggtccccgcgtcattctttctctataaactcgacttcaagatgcctgatgacgtgtggttagtggaccttgatagcaaccgtgtcatagctcctacgaacgcagaggtgcttcctattttaccggaacctgagtcactggagttgaaaaaacaccttaaacaggcgttagcctcgatgtcgctgaatactcagcctattctgaacttggaaaagttccacgaaggccaagaaatccctctcctgctggggagacccagtaacgacttgcagagtacaccttctaccgaatttaatcccttgatctacgggaacgacgtggacagtgtggatgtggctactagggtggctatggtgcggtttttcaatagcgccaatgtcctccagggattccaaatgcatactcgcaccctccgcttgtttccccggccggtggtggcttttcaggctggctcctttctggcaagcagaccacgtcagacgcccttcgctgaaaaactagcccgcacacaggccgtggaatactttggggagtggatccttaatcccactaattatgccttccagcgtattcataacaacatgttcgatcctgcattgatcggggacaagcccaaatggtacgcacaccaactgcagccgatccactaccgcgtgtacgattctaactcacagctcgcggaggccctgagcgtgccccccgagcgcgatagtgatagtgaaccgacagacgactccggctcggatagcatggactacgacgacagtagttcctcatactcaagtctgggcgatttcgtaagtgaaatgatgaaatgcgatatcaatggagatacaccaaatgttgacccactgactcacgctgccctcggggacgcgtccgaggtggagatcgatgaattgcaaaatcagaaagaagctgaagagccgggccccgactccgaaaatagtcaggagaacccccccttaaggtcatctagttcaacaactgccagtagttccccatctacagtgatccatggcgccaactccgagcctgcagactccactgaaatggatgacaaggccgctgtcggtgtgtcgaagcccctgccctccgttccaccgagcataggaaagtctaacgtcgatagacggcaggcagagataggggaagggagtgtgcgacgcagaatatacgataacccttactttgaacctcagtacggttttcccccagaagaggatgaagatgaacagggagagagttacacaccacgcttctctcaacacgttagcggcaatagggcccagaagcttctgaggccaaactcactcagactcgcctctgactcagatgccgaaagcgattcacgagccagcagcccaaacagtaccgtgtccaacactagtaccgaaggatttggtgggataatgagttttgcatctagcctgtacagaaaccactcaacaagcttttcactctccaatttaacactaccaaccaagggggcccgcgaaaaggcaacacccttcccatccctaaaggtgtttggccttaacacgttgatggaaattgtaacagaagccggcccaggctctggcgagggcaatagacgagctctagtggatcaaaaatcttctgtgatcaagcacagtcccactgttaaaagagaaccgccttcaccacagggacggagttctaattcctccgaaaaccagcagttcctcaaagaagtggtccacagtgttctggacggccagggggtaggttggctgaacatgaaaaaggtgaggcgcttactggagtctgagcagctgcgagtattcgtcctctctaaactcaaccggatggtgcaaagcgaagacgatgccaggcaggatattatacccgatgtggaaatctctagaaaagtatataaaggaatgttggacctgctcaagtgtacagttctgagcctagaacagagttatgctcatgctggtctgggcggcatggccagcattttcggcctgctggagatcgcccagacacattattacagcaaagaaccagacaagcgaaaaaggtcgcctacagaatccgtgaatactccagtgggcaaggaccccgggctcgccggtcgcggcgatcccaaggcgatggcacagctgcgcgtcccacagctgggccccagagcaccaagcgccactgggaagggcccaaaggaacttgatacgagatccctcaaagaagagaatttcattgcttctatagaactatggaacaaacatcaggaagtgaaaaaacagaaagcactggagaagcagcggccggaggtaattaagccagtgtttgatctaggcgaaactgaagagaagaaatctcagatcagtgccgacagcggagtgagtctcacctcttcatcacagcgaacagatcaggactcagtgattggagtgagtcctgctgtcatgattcgttcctcctctcaggatagtgaggtgtccactgtggtcagcaactcatccggagaaaccctgggagctgatagcgatcttagtagcaatgccggcgatggtcccggtggcgaaggctctgttcacttggcctcttcacggggcaccctctcagattccgaaatcgaaacgaatagtgctacaagcacaattttcggtaaggcccatagccttaaaccatcaatcaaggaaaaactggccggttctccaatacgtacatccgaggatgttagccaacgagtgtacttgtatgagggactcctaggacgagacaagggatccatgtgggatcagttggaggacgccgccatggagactttttctattagtaaagagcggtccacgctatgggatcaaatgcaattttgggaggatgcattcctggatgctgtgatgttagagcgcgagggcatgggaatggatcagggcccgcaggaaatgattgatcggtaccttagcctgggagaacatgatcggaaaaggctcgaagacgatgaggatcgattgctggcgactctcctccataaccttataagttacatgttgctcatgaaggtgaacaaaaatgatatcagaaaaaaggtccgtcgcctgatgggaaagagccacataggactcgtttacagccagcagattaacgaggtccttgatcagttagccaatctgaacgggcgagatctctcaatttggtctagtgggtcgcgccacatgaagaaacagacgttcgtagtccatgccggcactgataccaatggggatatattctttatggaagtgtgcgacgactgtgtcgtactgcgctctaacataggcacagtgtacgagcgctggtggtacgaaaaattaatcaacatgacatattgtccaaaaaccaaggtcctctgcctttggcgccgcaacggatcggagacccagctcaataagttctacaccaagaagtgccgggaactgtactattgtgtgaaagattccatggagagagctgcggctcgacaacagagtatcaagcctgggcctgagctggggggtgagttccccgttcaggatctcaagacaggggagggtgggcttctacaggttactcttgaaggcattaatttgaagttcatgcacaaccaatttcttaagctgaaaaaatggtag

SEQ ID NO: 123434 - DNA, 4440 bp, synthetic construct
  misc_feature 1..4440: note = Description of Artificial Sequence: Synthetic coding sequence
  source 1..4440: mol_type = other DNA
atggtgcagaaaaagaaattttgccctaggcttttagactacctggttattgtcggtgccagacacccgagttccgactctgtggctcagactcccgagttactgcgaaggtaccccctggaagatcacaccgagttcccactgccacccgatgtagtctttttttgccagcctgaaggatgtctgagtgtgcggcagaggcgcatgtccctcagggatgacaccagctttgtcttcaccctgaccgacaaggacaccggggttaccaggtatgggatttgcgtgaatttctaccggtcattccagaagagaatttcaaaagaaaaaggtgaaggaggcgcaggatctagggggaaagaagggacacatgccacctgcgcctctgaggagggcgggacagagtcttcagaaagcggtagttccctccagcctttgtcagccgatagcacacccgacgtgaatcagtcaccccgcggtaagagacgcgcaaaggcgggctcccgcagcaggaacagcactcttaccagcctgtgtgtcctctctcactacccattcttctctacctttcgtgagtgtctgtacactctcaaacgcctggtggactgctgctccgagcgactgttggggaaaaaacttgggatcccaagaggtgtccaacgagacaccatgtggcgcatattcacaggatcactgctcgtagaggagaagtcgagtgcacttctgcacgacctgagggaaatcgaagcatggatatatagattgctaagatctcctgttccagtaagcggacagaaacgggttgacattgaagtgctgccccaggagctccagcccgccctgactttcgcactgcctgacccatctcggtttaccctcgtggattttccgctgcatttacccctggaactgttaggagttgacgcctgcttgcaggtgctgacttgcatcctattggagcataaggtggtcctccagtctcgggattataacgctctgagcatgagcgtgatggccttcgtagctatgatttaccccctggagtacatgtttccagtgatcccactcctgccaacatgcatggcgtcagccgaacagctgctgttggccccgactccctacattatcggcgtgcccgccagtttcttcttgtataagcttgactttaaaatgcccgacgacgtctggctcgtagatctcgactccaatcgcgtaatcgcccctacaaacgctgaagtgctaccaatcttgcccgaacctgaaagcctggaacttaaaaagcacttgaaacaggccctggctagtatgagccttaacacgcagccaatcctaaatctcgagaagttccacgagggacaggagattccactgctcctggggaggcccagcaatgatctccagtccacacctagcactgagttcaacccgttgatttacggaaatgacgtggactctgtggatgtggccacacgggtcgccatggtccggtttttcaattctgcaaatgtactacagggtttccagatgcacacacggaccctcaggctgttccccaggcccgtcgtagcattccaggccggatctttcttagcgtctcggcccagacagaccccattcgctgagaagctagcgaggacccaagcggtcgagtacttcggggagtggatactcaatcctacaaactacgcattccaaagaattcacaacaacatgttcgaccccgcacttatcggcgataagccaaaatggtacgcacatcaacttcagcctatccattatcgtgtctacgactctaacagccagctcgcggaggccctctcggtcccaccggaacgggacagtgattctgagcccactgacgatagcggctctgattcaatggattacgatgacagttcgtccagttactcctccctgggcgacttcgtgagtgagatgatgaaatgcgacatcaatggtgacactccaaatgttgatccgctgacccatgcggctctgggcgatgcttcagaggtggagatcgatgaactgcaaaatcagaaggaggcagaagagcccggaccagattcagagaatagccaagagaatcctccattgcgtagcagcagttccaccacagcctcttccagcccaagcaccgttattcacggcgctaatagcgaacccgccgacagcaccgaaatggatgacaaggcagctgtgggtgtgtctaaacccttaccttcagtcccaccaagtatcggtaagagcaacgttgaccgcagacaggctgaaattggcgagggcgctcagaagcttcttcggcccaatagcctgagactggcatctgactcagacgccgagtccgactccagggcttcatctccaaactctaccgtgtccaacacttccacagagggattcggcggcataatgagcttcgcctctagcctctatcgcaatcactccacatctttctctctttctaacttgaccctcccaacaaagggtgcccgcgaaaaagcgacaccattcccaagtcttaaaggaaatagacgggctttagtggatcagaaatcttccgtgattaagcacagccctaccgttaaacgggagcctccatccccccagggcaggagtagcaactcttctgagaatcagcagtttctcaaggaggtggtccatagcgtgctcgatggacagggggtggggtggttgaacatgaaaaaggtcaggaggctgttggaaagcgagcagctccgggtgttcgtcctttcaaagttgaacagaatggtacagtccgaagacgacgcccgacaagacataatcccagatgtggagatttcacggaaggtctataagggcatgctagatttactcaaatgtactgtactttccctggaacaatcctacgcccatgccgggcttggtggaatggcctcaattttcggtctgctggaaatcgcgcagacccactattactctaaggagcccgataagcggaaacgaagtccaacggaatcagttaatacacctgtcggtaaggatccgggcctagcagggaggggcgacccaaaagccatggcccaattaagagtgcctcagctgggaccaagagcaccatcagctaccggaaagggtcctaaagaacttgatacgagatcactgaaagaagaaaatttcattgcttccatcggcccagaagtgataaagcctgtgttcgaccttggggaaacagaggaaaaaaagtcacaaatttcagctgattcgggggtatcgctcactagctcgagtcagagaaccgaccaggacagtgtcattggcgttagcccagccgttatgattcgttccagttcacaagactccgaggtgtctactgtggtcagcaacagtagcggcgagaccctgggggctgactccgatctgtcttcaaacgctggggatggcccaggcggcgaaggctccgtccacctggccagctcccgcggcaccctgagcgactccgaaatagaaaccaatagtgctacaagcacgatcttcgggaaggcccacagtctgaaaccctctatcaaggagaagctggccggctcacccatccgtaccagcgaagacgtctcacagcgcgtatacctctacgagggccttctcggaaaagaacgctccacattgtgggaccagatgcagttctgggaagatgctttccttgatgcggtgatgttggaacgggaaggcatgggcatggaccaaggtccacaggaaatgatagacagatacttatcactaggcgagcacgatagaaagcgactcgaggacgacgaagatagactattggcaacgctgctgcacaatctgatttcgtatatgctgttgatgaaggtgaataaaaacgatatacgtaagaaggtccgcaggttgatggggaagtcccacatcggtttggtctattcccagcagataaacgaagtgctggatcagctcgccaacttaaacggtcgagacctgagcatctggagttccggaagcaggcacatgaaaaagcagacattcgtggtgcatgccgggacagataccaatggagacattttcttcatggaagtgtgcgatgattgtgtggtgttgcgctctaacattggaacagtgtatgaacgctggtggtacgagaaactgattaacatgacatactgccccaagactaaggtactgtgcctttggagacgcaatggcagcgagactcagctgaataagttttataccaaaaagtgcagagagctctactactgcgtgaaggacagcatggagcgggcggcggcgcgccagcagtctataaagccaggtcctgaactggggggagaatttcctgtgcaggatctcaaaacaggcgagggcgggctcttgcaggtgacactggagggtataaatttaaagttcatgcacaaccaactccttaggcggctgcgatggtag

SEQ ID NO: 123435 - DNA, 4626 bp, synthetic construct
  misc_feature 1..4626: note = Description of Artificial Sequence: Synthetic coding sequence
  source 1..4626: mol_type = other DNA
atggtgcagaaaaaaaaattttgcccacgactgttagattaccttgtgatcgtgggggcacggcaccccagctcagattctgtagctcagacccccgagctcctacgcaggtacccgctggaagaccacacagaatttccactgcctcctgatgttgtattcttctgtcagccagaagggtgtctgagtgtcagacagcggcggatgtcccttagggacgataccagcttcgtgttcaccctaactgacaaggacaccggcgtgacaaggtatggcatctgcgtgaatttctataggtcgtttcagaaacgaatcagtaaggagaaaggcgagggaggagctgggagtcgcggcaaggaaggaacccacgctacctgcgcttctgaagaaggagggacggagagtagtgagagcggctcctcgctgcagccactttcagcagattcgacccctgacgtcaatcagtcacctagaggtaagcgccgcgctaaggccgggtcaagatctaggaatagcacccttaccagcttatgcgtcctgtctcattacccattcttcagtacatttagagagtgtctgtatacccttaaaagattggttgattgttgtagcgagcggcttctgggcaaaaaattgggcatcccgcgcggcgtgcagcgggacaccatgtggagaatctttactggttccttgctcgtggaggaaaagtccagtgctctgctgcacgacctgcgggagatagaggcgtggatatacaggctgcttaggagccccgtgcccgtgtctggccagaagagagttgacattgaggttcttccgcaggagctgcagccagctctgacgtttgcactgcccgatcctagtaggttcactctagtagatttccccctgcacctaccactggagcttctgggagtggatgcctgcttgcaggtgctgacttgtatcctcctggagcacaaagtggtcctgcagtctcgtgactataacgctctctctatgtcagtcatggcttttgtagccatgatctatccgcttgaatacatgttcccagtgattcctctgttgcctacttgcatggcatcggccgagcagctgctactcgcgcctacaccatacattatcggcgttcctgctagtttcttcctctacaagcttgacttcaagatgcccgacgacgtctggcttgtggatcttgactctaatcgcgtgattgcccctacaaacgccgaggtgctcccaattcttcctgagccggagtccctggaactaaagaagcatctgaaacaggctctggcctcaatgtctctgaacacccagccaatcctcaatctggagaaatttcacgaagggcaggagattcccctcctcctcggcaggcctagtaatgatttgcaatccacacccagtacagagtttaaccccttaatctatggaaacgacgttgattcagttgatgtcgcaacccgtgtagctatggttaggttttttaatagcgcaaacgtgttgcaggggttccagatgcatacaaggacgctccgccttttcccccggcccgtagtggcattccaggccggatcatttctggcttccaggcccaggcagacccccttcgcggagaaactagcccgaacacaagcggttgaatacttcggcgagtggatccttaacccaacaaactatgcatttcaacggatccataacaatatgttcgacccagctctaatcggcgacaaaccgaagtggtacgcccaccagcttcagccgatacactacagagtatatgactcaaattctcagttagctgaagctctgagcgtgccacctgagagggacagtgattctgagcccacagacgactccggcagtgactcgatggattatgatgactcgagttcatcttattcttctcttggagattttgtaagcgaaatgatgaaatgtgacataaatggggacacacccaatgtcgatcctttgactcatgcagccttaggggacgccagtgaagtggagatcgacgagctccagaaccagaaggaggcagaggaaccagggcctgactctgagaattcacaggagaatccaccattgcggtcttcaagtagcacaactgcatcctcatcccccagcactgtaatccacggagccaactccgaacctgctgactccactgagatggacgacaaggccgccgttggagtatccaagcccctcccctcagtgcctccttccatagggaagagcaatgtggaccggcggcaggctgaaattggagagggcgctcagaagctgctcaggcccaattccttgcggctagcttccgactcagatgccgaatccgattcacgtgcaagctcaccaaactcaacagttagtaataccagtaccgagggattcggcgggatcatgagctttgcttcctccttgtacagaaaccacagtaccagcttctcattgtctaacctcaccctgccaacgaagggcgctagggaaaaggcaactcccttccctagcctcaaagggaacaggagagcccttgtagatcaaaagtccagtgttattaaacactctcctacagtgaaaagagagcccccgtctcctcagggacggtctagtaattctagcgaaaaccaacagtttcttaaggaagtggttcactctgtgcttgacggccagggcgtcgggtggctgaacatgaagaaagttcgtagactcctggagtctgagcagttgagagtgttcgtgcttagcaagctgaatcgcatggtgcagtccgaagacgatgcacgccaggacataattccggatgtcgagatcagcagaaaggtatataaggggatgctggatctcctgaagtgtacagtcttgtccctagagcagtcatacgcccacgcaggccttggcgggatggctagcattttcggtctacttgagattgctcaaactcactactatagcaaggaaccagacaaaagaaagcgaagcccaacagagtcggtgaatacacccgtgggtaaggatcccggattagcgggtaggggtgatcctaaggctatggcccagcttcgggtgcctcaactcggcccccgcgcaccatccgctaccgggaaggggcctaaagagctagacactcgctccctgaaggaggaaaacttcatagcctcaatcggccccgaggtcatcaagccagttttcgaccttggagaaaccgaagaaaagaagtctcaaatcagtgcagattcgggagtgtccctgacatcaagctctcagcggacagaccaggactcagtgattggtgttagtcctgctgtgatgattcgatcttcatcccaggactccgaggtgtctaacagcagcggagagacgctgggtgctgatagcgacctgtcatccaatgccggggacggccctggtggtgaaggcagcgtgcatctggcaagctcccgtggaacactttccgactctgagatcgaaactaacagcgccacgtccaccatctttggaaaagctcacagtctgaaacctagtattaaggaaaagttggctggctctcctattcgcacaagtgaggatgtaagtcaacgggtttacttgtatgaagggctcctgggcaaggaaagatccactctgtgggaccagatgcaattctgggaagacgcgtttttggacgcagttatgcttgaacgtgagggcatgggaatggaccagggcccacaggaaatgatagatcggtacctgtccctgggcgagcatgacagaaagcgccttgaagacgacgaggacaggctacttgcaactctcctgcataacctaataagctacatgctactcatgaaggtcaataagaatgatatacgtaaaaaagtcaggaggctgatgggcaaaagccacatcggtctggtttatagccagcagataaacgaggtcctcgatcagcttgcaaatttgaacggtcgcgatctgtcaatttggagttcgggctctagacacatgaaaaagcagacattcgtggtccatgctggcaccgacacaaacggggacatcttcttcatggaggtgtgcgatgactgtgtcgtcctccgttctaacataggcacggtgtatgaaagatggtggtatgaaaagttaattaacatgacctactgtcccaaaaccaaggtactatgtctgtggcgtcgcaacggtagtgaaacgcaattgaacaagttctataccaaaaaatgtcgggaactgtactattgtgtgaaagattcgatggaacgcgccgccgccagacagcagagcatcaaacctggccctgaattgggaggcgagtttcccgtgcaggacttgaaaacaggcgaaggtggtctcttgcaggttacgctggagggcattaatcttaagttcatgcacaaccaggttttcatcgaactgaatcacataaagaaatgcaatactgtgaggggagtttttgttttagaggaatttgtccctgagattaaagaggtagttagccataaatacaagacgcccatggcccacgaaatctgttattcagtgttatgtctattctcgtacgtagctgccgttcattcaagcgaagaggacctgagaaccccgcctcgacctgtcagctcatag

SEQ ID NO: 123436 - DNA, 4764 bp, synthetic construct
  misc_feature 1..4764: note = Description of Artificial Sequence: Synthetic coding sequence
  source 1..4764: mol_type = other DNA
atggtgcagaaaaaaaagttttgtccccgcctgcttgattatctcgtgatcgtcggagcgagacacccatcttcagatagcgtggcacaaacccccgagctgttgcgaagatatcccctagaggatcacacagagttccccctgccaccagacgtggtgttcttttgtcagcctgagggatgtctgtctgtgagacagcgccggatgtcgcttagggatgacacatcgttcgtgttcacactgaccgacaaagacacaggagttactcggtatggcatctgcgtcaacttttacagaagcttccagaaacggatttcgaaggagaaaggtgagggcggggctggtagccgtgggaaagaagggacacatgcaacttgtgccagcgaagaagggggaacagagtcatccgaaagcggcagcagcttgcagcccttgtcagccgattcgacacctgacgtcaaccaaagccctcgcggaaaacggcgtgctaaggctggaagtcgatcacggaactcaacgctcacatctctatgcgttctgtcccactacccctttttctccacctttagagaatgcctttacactctaaagaggctagtggattgttgcagtgagcggctgctcggcaagaagctaggtattccaaggggggtacagagggacactatgtggcgaatcttcaccggtagtctgcttgttgaggagaagagctccgccctacttcacgaccttcgtgagattgaagcatggatttatcgcctccttcgatctccggtaccagttagcgggcaaaaaagggtcgatattgaggtgcttcctcaggaattgcagcccgctctgaccttcgctttgccggatccaagtagatttaccttagtcgacttccccctacaccttccgctagagctgctcggggtggatgcctgcctgcaggtgctcacatgtatccttttggagcacaaggtcgtgctgcagagccgagactacaatgccctctccatgagcgttatggcttttgtcgccatgatataccccttggaatacatgttccccgtgattcccctgctgccgacctgtatggcctctgccgaacagcttctgcttgcccccaccccttacattataggtgttccggcttcttttttcctttacaagctggattttaagatgcctgacgacgtgtggctggtcgacctcgactcaaatcgcgtaatcgctcccaccaatgctgaggtgttacctatcttgccggaacctgagagcctcgagctgaaaaagcacttgaagcaagcactggcctctatgtccttgaatacgcaacccattttgaacctggaaaagttccacgaaggtcaggaaattcccttactccttgggcgaccttcaaacgatcttcaatctacgccatcaactgagtttaaccctctgatctacgggaatgatgttgacagcgtggacgtggccacgcgagtagcaatggttagattctttaatagcgccaacgtgttgcagggcttccaaatgcataccagaactctgcgcctcttcccacgccctgttgttgccttccaagccgggtcctttctcgcgagtcggcctagacagactccgtttgccgaaaaactcgcacgcacacaagcggttgaatactttggcgaatggattctgaatccgaccaactacgccttccagcggattcacaataacatgttcgatcccgcgctaataggcgataaaccaaagtggtatgcccaccaactgcagcccattcactacagagtgtatgactccaattcacagctggctgaagccctgagtgtcccaccagagcgggattcagatagcgagcccaccgacgactctggttctgattccatggattacgatgattcatcttcctcttactcatcgctaggcgactttgtgtcagagatgatgaaatgcgatataaatggtgatacccccaacgttgatcccctcactcacgcggctctcggcgatgcaagcgaagtcgaaattgatgagttacagaatcaaaaggaggcggaagagccgggccctgatagcgagaactcccaagagaacccgcccctgcgtagcagctccagtacaactgctagttcaagtccttccactgtgattcacggcgccaacagcgaacccgccgacagtacggagatggacgataaagctgccgtcggtgtttccaaacctcttccgagtgtccccccttcaattgggaagtccaatgtagataggcgtcaggctgagattggagaaggcagcgtgagaagacgtatctacgacaacccctactttgaacctcaatatggttttcctcccgaggaagatgaggacgaacagggcgaatcctacaccccacgtttctctcagcacgtctcagggaacagagcacagaaattactcaggcctaactcgctgcgcctagcgagcgattccgacgctgagtctgactccagggcctcctctcctaatagtaccgttagtaacactagcactgaaggctttgggggcatcatgtcgttcgcatcctcgttataccgcaatcactccacatccttctcacttagtaacctgactttacctaccaagggggcccgggagaaggccacccctttccccagcctgaaaggcaatcgaagggcactggttgatcaaaaatcctcagttattaaacacagcccaactgtgaaacgcgagcccccctcgccccaaggacggtccagcaattcctccgagaaccaacagtttctgaaggaggtcgtacatagcgtgttggacgggcagggcgtgggctggttgaacatgaagaaggtgagaagattgctcgagagcgagcagttacgggtctttgttctatccaagttaaatcggatggttcagagcgaggacgacgcccgccaagatattatacctgacgtggagatcagcagaaaggtctataaaggtatgctcgaccttcttaagtgtaccgtcctatctctagaacagtcgtatgcccacgctgggctgggcggaatggcctccatttttggccttctggaaatcgcacagactcactactactccaaagagccagacaaacggaagagatctcctacagaaagcgtcaacaccccagtgggtaaagaccctgggctcgcaggccgcggcgacccaaaggccatggcacaattgcgggtgccccagctcggtcccagggctcccagcgccacaggtaaaggacccaaggaactggatacacgtagtctcaaagaggaaaacttcatagccagcattggccccgaagtcatcaagcctgtctttgacctaggagaaaccgaagaaaagaaaagtcaaatcagtgccgattccggggtgtcgctcacctctagctctcaacgtactgaccaggactccgtcataggggtatcgcctgccgtgatgattagatcgtcgagccaggactctgaggtgagcacagtgtctaattccagcggcgagacactgggcgcagattctgatctgtcatcaaacgccggggacggccctggtggtgagggatcggtgcacctcgcatcttcgagagggactctgtctgacagtgagatagaaaccaattcagctacctcaacgattttcgggaaagcccactccctcaagcctagcatcaaggaaaagctggcaggctcacccatccgcacctcggaggacgtatcccaacgagtttatctctacgagggcctgctgggaaaggagcgtagcacactctgggaccagatgcagttttgggaggacgcattcctcgatgccgtgatgctcgaaagagaaggaatggggatggaccagggcccacaggaaatgatcgaccggtacttgtctctgggggaacatgaccgcaaacgtctggaggatgacgaggaccgcctgctcgcgactctgttacataatttaatttcctacatgctcttgatgaaggtgaacaaaaacgacatccggaagaaagttaggagattgatgggcaagtctcacattggcttagtctatagtcagcaaatcaacgaggtgctggaccagttagccaacttaaacggcagagacctctctatttggagctctggaagccggcacatgaagaagcaaacattcgtggtgcacgccgggacggatactaacggagatatcttcttcatggaggtgtgcgatgattgtgtcgtgctgcgcagcaacatcgggaccgtgtatgagaggtggtggtacgaaaagttaatcaatatgacttattgtcccaagacaaaagtcctgtgtttatggcgaagaaatgggtctgaaacccagctgaacaaattttacacaaaaaaatgccgcgagctttattactgcgtcaaggatagcatggagagagctgcagcgcggcagcagtctatcaagcctggtcctgagctcgggggggagttcccagtacaagacctcaagaccggcgaaggcgggctgcttcaggtgaccctcgaagggattaatctcaagttcatgcataatcaagtctttattgagcttaaccatatcaaaaaatgtaacaccgtgcggggggtgtttgtccttgaggagttcgtcccagaaatcaaggaagtggtttcccataagtataaaactcccatggcacacgagatctgctattcagtcctatgcctcttctcctacgttgccgctgtgcattcctccgaggaggaccttagaacccctccccgccctgtctcatcttag

SEQ ID NO: 123437 - DNA, 4638 bp, synthetic construct
  misc_feature 1..4638: note = Description of Artificial Sequence: Synthetic coding sequence
  source 1..4638: mol_type = other DNA
atggttcaaaagaaaaagttttgccccaggctgctggattatctggtcatcgtgggggccaggcatccttcctccgattctgtggctcaaactcccgagctcctgagacgctaccccctggaagaccataccgagtttccccttcccccggatgttgtatttttctgtcagcctgagggatgtctaagcgttaggcaacggcgtatgagtctccgggatgacacttcatttgtgtttacgctgacagataaggacacgggagttaccagatacggcatctgtgtgaatttttatagaagtttccagaagagaatttcaaaagagaaaggggagggtggggcagggtccaggggtaaagaaggaacccatgcgacatgtgcgtccgaggagggaggtactgagtcttcagaatctgggtcatccctacaaccactgtcagctgactctacccccgatgtcaaccagtcccccagagggaaacgcagagcaaaggccggttcaagatccaggaacagcacattgacatccttatgtgtgctgtcccattatccgttcttctctaccttcagagaatgcttgtacacactgaaacggctggtggattgctgtagtgaacggctgctgggtaagaaactgggtatcccccgaggcgtgcagcgagacacgatgtggagaatttttactggatccctcttggtggaggaaaaatcttctgcgctgctacacgatctcagagagatcgaagcgtggatctacaggctcttgaggtctcctgtcccggtgtccggccagaaacgggtggacatcgaggtcctgccgcaggagctgcaacctgctcttaccttcgctttgccagacccaagccgcttcacacttgtggacttcccactgcacctgcctcttgagctgctgggggttgatgcctgtcttcaggtgctaacctgtatcctcctcgaacataaggtagtcttgcagtcacgcgattataacgcactgtccatgagcgtcatggccttcgtggcgatgatatatccccttgagtatatgtttcccgtgatacctctgttgccaacatgtatggcaagcgcggagcagttgttgcttgccccaaccccttatatcattggcgttcccgcctcatttttcttgtataagctggacttcaaaatgccggatgacgtttggctggttgacttggacagcaatcgagttattgcccctacaaatgccgaggtgcttccaatactgccggaacctgagagtctggagcttaagaaacacctgaagcaggccctcgctagtatgagcctcaatacacagccaattctaaatctggaaaaatttcatgaaggacaggagatcccgctcctcctcggccggccctccaacgacctccagagcacgccttcaacagagttcaatccactaatttacggcaatgatgttgattctgtggacgttgccacccgggtggccatggtgcggttcttcaactctgccaacgtgttacaaggatttcaaatgcatacccgaaccctccgactattccccagacctgtggtcgcattccaggctggatcttttctcgctagcagaccaagacagaccccgtttgctgagaaacttgcccgcacccaggctgtcgagtatttcggcgaatggatccttaatcctaccaactacgcctttcagaggatccataataatatgtttgacccagccctaattggcgacaaaccaaagtggtacgcccatcagctccaaccgatccactaccgcgtgtacgactccaacagccaactggctgaagccctatcagtacctccggaacgtgacagtgactctgagcccacagatgacagcggaagtgattcaatggactatgatgattcttcgagctcatacagctcacttggggattttgtgagcgaaatgatgaagtgtgatatcaatggagatactccaaacgtggatcccttaacacacgccgcactgggcgacgcttccgaggtggagattgatgaattgcagaaccagaaggaggctgaggagccagggcccgactcagagaactcccaagaaaatcccccacttcgatcgagcagctctactaccgcatccagttcccctagcaccgtaatccacggagcgaattcagagccagccgattccacggagatggacgacaaggccgccgtgggagtgtcgaagccacttccctctgtaccaccatccatcgggaaatctaacgtagatcggaggcaggctgaaattggggagggagcccagaagctcttgaggccgaatagcctgagactggcgtccgactccgatgccgaatccgattctcgagctagctcacccaactccaccgtatcaaacacatcgacagagggctttggtgggattatgagttttgcttcttcactgtatcgtaatcattctacgagcttttctctttccaatttgacccttcctaccaaaggtgcacgcgaaaaagcaacaccgttcccctctctcaaaggaaatcgcagggctctggtggaccagaagagtagcgtgatcaagcattcacctacagtaaagcgtgaacccccaagccctcaggggaggtcctccaactcaagcgagaaccaacagttcctcaaggaggttgtccattccgtcctggatgggcagggcgtcggctggctcaatatgaagaaagtgcggcgcctgctagagtctgaacaactgagagtcttcgtgcttagtaaattaaatcgcatggtgcaaagcgaggacgacgctcgccaggacattattcccgacgtggaaatcagtcgcaaggtctacaaagggatgttagatctattaaagtgtactgtgttgtcactagaacaatcttacgcacacgcaggtttaggggggatggcaagcatcttcgggctactggagattgcacagactcattactattctaaggagcccgacaagagaaagaggagtccaacagagtccgtgaacaccccagtgggcaaggacccgggcctggccgggaggggcgaccctaaagcaatggcccagctccgggtcccccagttgggccctcgggccccaagcgctacagggaaagggcctaaggagttagatacccgctcactcaaagaggaaaatttcatcgcaagcattgggcctgaggtcattaagccagtctttgaccttggcgagacggaagaaaaaaaaagccagatttctgcagattccggcgtttcattgaccagttcttcccagcggacagatcaggacagtgtaatcggcgtctcacccgctgtcatgattcggagcagctcccaggactctgaggtgagcacagtagtgtctaatagcagtggtgaaaccctgggtgccgatagcgatttatccagtaatgccggcgacgggcctggaggagagggatccgttcacctggcatcctctcgtggtacactctccgattcagaaatcgaaaccaattccgcaacatccactatcttcggcaaggcacactccctgaaaccctcgattaaggagaaactagctggaagtcccatcagaacatctgaggacgtctcgcagagggtgtatttatatgagggcttgctaggcaaagagcggtcgactttgtgggaccagatgcagttctgggaagacgccttcttagacgccgtcatgctcgaacgtgaggggatgggcatggatcaaggcccgcaggagatgattgacagatacctgtcattgggggaacatgacaggaagcggctggaagacgatgaagatcggcttttggctaccttacttcacaatcttatttcctatatgctgctcatgaaagtcaataaaaatgatatccggaagaaagttcggcggttaatggggaaaagccacatcggactggtttactcccagcaaattaatgaagttctggaccaactggcaaatctgaatgggcgggacctgagcatttggagctcaggatccaggcacatgaaaaagcagacatttgttgtgcacgctggaacggacactaatggcgatatcttctttatggaggtgtgcgatgactgcgtggtcctacgaagtaacatcgggaccgtttacgaaagatggtggtacgagaagcttatcaatatgacctactgccctaagacaaaagttctgtgcctctggcgaaggaacggttctgagactcagctgaataaattctacactaaaaaatgccgcgagctctattactgcgttaaagactctatggagagagccgccgctcgccagcagagtatcaagccaggacccgaactaggaggtgagttccccgtccaagatctgaagacaggagaagggggcctcctacaagtcacattggagggaatcaatctcaagtttatgcataaccaggtgttcattgagctgaatcacatcaaaaaatgtaatacagtgaggggggtatttgtcctggaggagtttgtgcccgaaatcaaagaggtggtgtcacacaagtataagacccccatggctcatgagatctgttactcggtgctgtgtctgttttcttatgtggcagcagtgcactcttctgaagaggacctcaggaccccccctcggcccgtttcctcctag

SEQ ID NO: 123438 - DNA, 4440 bp, synthetic construct
  misc_feature 1..4440: note = Description of Artificial Sequence: Synthetic coding sequence
  source 1..4440: mol_type = other DNA
atggtgcaaaagaaaaagttttgccccagactcctggactacctggttattgtgggtgctcggcatccatcttcagatagcgttgcgcagacgccagagctgttacggcgttacccactcgaggaccacactgagttccccctccccccagacgtcgtatttttctgtcagcccgagggttgcctaagcgtacggcagcggagaatgagcctgcgagacgacacaagcttcgtgttcactttgaccgataaggacacaggggtgacacgatatggcatctgcgtgaatttttaccgctcctttcagaagaggatttccaaagaaaaaggcgaagggggggccgggagtaggggtaaggagggaacgcacgccacgtgtgcctcagaggagggcgggacggagagttcagagagtggttcaagtctgcagcctctgagcgccgattctacacctgatgtcaaccagtctcctagagggaagcgaagagccaaagcgggctcacggagccgcaattccaccttgactagcctctgtgtcctttcacactaccctttcttctccacattcagagagtgcttgtatactctcaagcgcctagtcgactgttgtagtgagaggcttttaggcaaaaagctggggatcccaagaggggttcaaagggacactatgtggcggatcttcactggctccctgctggtggaagagaagtcctcagctctgctgcacgacttgagagaaatcgaggcttggatatatcgcttgctgagatctccagtgccagtgtccggacagaagcgcgtagacatcgaagtcctgccccaggaattacaaccagctctgacatttgccctcccagatcctagtcgatttactctcgtcgacttcccactccatctgcccttagagctcctgggagtcgacgcttgtctccaggtacttacatgcatcctgctggaacacaaagtcgttctccagagccgtgattataacgctttgagtatgagtgttatggcgtttgttgctatgatctatccactcgaatacatgttccctgtgatccctctgctgcctacttgtatggctagcgctgaacagctgcttctagcccctactccttatatcatcggtgtgcctgcgtctttcttcttgtataagcttgactttaaaatgccagatgatgtgtggctcgtagatctagattcgaatcgggtaatcgccccaacaaatgctgaggttctgcccatcctacccgaaccagagagtctggagttgaaaaaacatttgaaacaggccctcgctagtatgtccttgaatacacagcccatcttgaacctggagaagtttcacgaagggcaggaaatccctctgctgcttggaaggccttcaaacgatctgcaaagcactcccagcaccgagtttaacccattaatttacggtaacgatgttgattctgttgacgtcgccacaagggttgctatggttagattctttaatagtgccaacgtcctgcagggcttccagatgcacacacgcaccttgcgcctctttccgcgtcctgtcgtagcttttcaggccggcagctttttggcatctaggccacgacagaccccttttgcggaaaagctggctaggactcaggccgtagaatatttcggtgaatggatcctcaaccctacaaactacgctttccaacggatccacaacaatatgttcgaccccgcattaatcggcgataagcccaagtggtatgctcaccagctgcagcctattcactaccgagtctacgactcaaactcacagctcgccgaagcattatccgtgccccctgaaagagacagtgatagcgagcccaccgacgacagcggctccgatagtatggactatgatgactcgtcttcgtcttactctagcctgggtgacttcgttagcgagatgatgaagtgcgatatcaacggagatacacccaatgtcgaccctctcacgcacgctgctctgggggacgcgtctgaggttgaaattgatgagctacagaatcagaaggaggcagaggaacctggcccggatagtgagaactcccaggagaaccctccactccggtcttcttcttccacaacagcgtctagtagcccaagcaccgtgatacacggggcaaactccgagcctgctgattcaaccgagatggacgataaggcagcggtgggcgtgtcaaagccgttaccatcagtgcctcctagcattgggaagagcaacgtggatagaaggcaggccgaaatcggagaaggggctcagaaattgctgcgtcccaattccttacgcttggcctccgacagcgacgctgagagcgatagccgcgcttctagcccaaactccacagtttccaatacgtccactgagggtttcggtggtataatgtcctttgccagcagcctttacagaaaccacagtacttccttttccctgtctaacttgactctccccacaaagggagcacgcgaaaaggccactccatttccgtccctcaagggcaatcgaagagccttggtggatcaaaagtcatcagttatcaagcacagtccgacggtgaaacgggaacccccttcaccccaggggcgtagctctaattcgagcgaaaaccaacagttcctgaaagaagtggtgcatagcgtgctggacggacagggggtcgggtggctaaacatgaaaaaggtgaggagattactcgagtcagaacagctgagagtgtttgtactgtccaagttaaaccgaatggtgcaatccgaagatgacgcacgccaggacattatcccagatgtcgagatctcacgtaaagtttacaagggtatgctagaccttttgaaatgcaccgtcttaagcctcgagcaaagctacgcacacgccggactgggcggcatggcttccatctttggtctgctggagatcgctcagacccattattactcaaaagagcccgacaagaggaagaggtcacccacagagtccgtgaacactcctgtcggtaaggaccctggactggctggaaggggcgaccccaaggctatggctcaactaagagtacctcagctggggccgagggcaccctcagctaccggaaagggtccaaaggagttggatactcgtagtctgaaggaggagaacttcattgcatccatcggtcccgaggtgatcaaaccagtgttcgatctgggagaaaccgaagagaaaaaatctcagatatcagcagatagcggggtgagccttacatcaagcagtcagcgcaccgaccaagatagtgtgatcggagtgagccccgccgtcatgattcgcagtagctctcaggactcagaagtgtcgacagttgtgagcaattcctctggagaaaccttgggagcggattcggacctgtcctcgaatgctggcgacggccccgggggagagggcagcgtgcacttggctagttctcggggaacgttatccgactccgaaatagagaccaacagtgcgaccagcaccatctttggcaaggctcattccctcaaaccaagcattaaagagaagttagctggctccccaatcaggacctctgaggacgtttcccagcgggtctatctatatgaggggttgctcgggaaagagcgtagcacgctgtgggaccagatgcaattttgggaagatgcttttctggatgctgtcatgctcgagagagaggggatgggtatggaccaggggccccaagaaatgatcgataggtacctcagcctgggggaacacgatcgaaaacggctggaggacgacgaggaccgattgttggccaccctcctgcacaatcttatcagctacatgttgttgatgaaggtgaataagaatgatattcgcaagaaggtgcggcggctcatggggaaatcacacataggactggtttactcacaacagatcaacgaggtacttgaccagctcgcaaatctcaatgggagggacctgagcatatggagcagcggatctaggcacatgaaaaaacagactttcgtcgtgcacgctgggaccgataccaacggagacattttctttatggaagtgtgtgacgactgtgtggttctcaggagcaatatcggcactgtctacgagagatggtggtacgaaaaactaattaacatgacttactgtcccaaaacgaaagtgctctgtctctggagacgcaatggatcagagacgcagctcaataaattctataccaagaagtgtcgcgagctgtactactgtgtcaaagactccatggagagagcggccgcgcgccagcaatcaatcaaaccgggcccagaactcgggggcgaattccctgtgcaggacttaaagacgggcgagggtggcttgctccaggtgacactggaaggcataaacttgaaattcatgcacaatcaattcctgaaacttaaaaagtggtag

SEQ ID NO: 123439 - DNA, 4698 bp, synthetic construct
  misc_feature 1..4698: note = Description of Artificial Sequence: Synthetic coding sequence
  source 1..4698: mol_type = other DNA
atggtgcagaaaaaaaagttttgtccacgcttgctcgattacctcgtgatcgtcggagcccggcaccctagttcagacagcgttgctcagacgccagagttgttgcgtcgctaccctctggaagaccataccgaattccccttacctcctgatgtggtcttcttctgccagcctgaaggctgcctcagtgtgagacagaggcgcatgtcgttaagggatgacacctcgttcgtgttcaccctgacagataaggataccggggtgacccgatatgggatctgcgtgaacttctacaggtccttccagaagcgcatttccaaggagaagggtgaaggcggagctggtagccgtggcaaggaaggtacgcatgcgacttgtgcctccgaggagggcggaaccgaatcatccgagtccggatctagcctccagcctctgagcgcagattcaaccccagatgtaaaccaaagcccgagaggtaaacgccgggctaaggcaggctcccgatcacgcaattctacccttacatctctgtgcgtacttagccattatccattttttagtacattccgagaatgcctttacacccttaagaggctggtagattgctgctccgagcgcctgctaggtaaaaagctaggcatcccgcgcggggttcagagggataccatgtggcggatttttacggggagtctgctagtggaggagaaaagctctgccttgctgcacgatctcagggaaattgaggcttggatctatagactgttaagatcccccgttcccgtcagtggacagaagagggtggacatcgaggtgctgccacaggaattgcagcctgctctgacattcgcccttcccgatcccagtagatttacgctagtggactttcctcttcacctgccccttgaactgctaggagtagacgcctgcctccaggtcctaacctgcattctattggagcataaggtcgtcctacagtcgcgggactacaacgcactttctatgagtgtgatggcttttgtggccatgatctacccactcgagtatatgttccctgtcataccgctcctgcctacctgtatggcctctgctgaacagctattgttggcacctaccccgtacataattggtgtcccagcttcattcttcctgtacaagctagacttcaagatgcctgacgacgtatggttagtggacctggattcaaacagagtgatcgcccctaccaacgccgaggttctccctatcctgcctgagccagagtctctcgagctgaaaaagcacctgaaacaggctctggcctcaatgagtctgaatacccagcctatcttgaacttagaaaagttccacgaaggtcaggagattcctctcttgctcggccggcctagcaacgatttacagagtaccccatcgaccgagtttaatcccctgatttatggtaatgacgtggattctgtggatgtagctacccgtgtcgctatggtacggttttttaactctgcaaacgtccttcagggttttcaaatgcatactcggacactcaggctgttccctagacccgtggttgccttccaagctggaagtttcctggcctcccggcctaggcaaacgccttttgctgaaaagctagcccgcacccaggccgttgagtattttggcgaatggattctgaaccctaccaactacgccttccaaaggatccacaataatatgtttgatcctgcattgatcggagataagcccaagtggtacgcgcatcagcttcaacccatccattatcgcgtctatgactcaaattcacagctcgccgaggcgctgtctgtacccccagagagagatagcgattcagagcctacagacgacagcggcagcgattctatggattacgatgactcctccagctcttactccagcttaggcgacttcgtaagtgagatgatgaagtgtgacattaatggggacactccaaacgttgatcctttaacgcatgccgctctgggcgacgcttctgaggtcgagatcgatgaactgcagaaccagaaggaagccgaggagcccggacccgactcagagaactcccaggagaaccctcccctgcgctcttcatcatctactacggcctcgtcaagtccctctacagtgatccacggcgctaatagtgaacccgcagacagcacagaaatggacgataaggccgctgtgggtgtatctaagccattgccctcagtacccccctcgatcggaaagagtaacgtggacagaaggcaggcggagatcggagagggcgcgcaaaagttgttgaggccaaattcactgcgtctggcttctgactccgatgcagagtccgatagccgcgcctcctcacccaactctacagtctccaatacttctacagaaggtttcggtgggatcatgagcttcgcaagctcgctctatcgaaatcacagcactagcttttcactttcaaatctcacactgccgacaaagggggctagagagaaagcaaccccctttcctagtctgaaagtgttcggacttaacacacttatggagatcgtcacagaagccggcccgggctccggggagggtaaccggcgggccctggtcgatcaaaagagttctgtgattaaacacagtcctacagtgaagagggagcctccatccccccagggccgttcatcaaactccagcgagaaccaacagtttcttaaagaggtcgtgcacagcgtgcttgatggccagggggtaggatggctgaacatgaagaaggtacgccgcttgctggaatcagagcagcttagggtattcgtcctgtctaagttgaacaggatggtccaatcggaggatgatgcccggcaggatattatcccggatgtggagattagtaggaaagtgtataaaggcatgctggaccttctcaagtgtacagtgctgagtttagagcagagctatgcccacgctggactcggcgggatggcctccatttttggtctgctggagatagcacagacccattactattctaaagagcccgataagaggaagagaagccctaccgagagtgtaaatacgcccgtgggcaaggacccgggtcttgccggcagaggggacccaaaagccatggcccagctcagagtcccccagctcggccctagagcaccctctgcaacggggaagggccccaaagagttggacactcgtagcctgaaagaagaaaacttcatcgccagcattggccccgaagtaattaagcccgtctttgacctcggggaaacagaagagaagaaatcgcaaatctcggcggacagcggcgtgagtctgacgtcctcttcccagcgcacggaccaagattcagttatcggcgtgtctcctgcagtgatgattcggtcctctagtcaagattccgaggtatctacggtcgtttctaatagtagcggcgaaacgctgggcgctgatagtgatctatccagtaatgctggtgatggacctggtggggaggggagcgtacacctggcttcatcacgtgggaccctctcagatagcgagatagaaacaaattcagctacgagtaccatctttggaaaggcacactcactcaagccatcaatcaaggaaaagttggcaggttccccaataagaacaagtgaagatgtctcccagcgtgtgtatctgtatgagggactgctgggtaaagaacgatcgacactctgggaccagatgcagttttgggaggatgcttttctggatgcggtgatgctggagagagaaggaatggggatggatcagggacctcaggagatgatcgaccgttatctgagtctcggggagcatgatcgaaagcggttggaggacgacgaagatagactgctggcaacgctgctgcataatctgatctcttacatgttattgatgaaggttaataaaaatgatatcagaaagaaagttcgccggctgatggggaagtcccatatcgggcttgtctacagccagcagatcaatgaagtattggaccagctcgccaatctaaatgggagggatcttagcatttggagcagcggtagtcgtcacatgaagaagcagacatttgttgtacatgctgggactgataccaacggggacatcttctttatggaagtgtgcgacgattgcgtcgtattacgtagtaacattggtaccgtgtatgagcggtggtggtacgagaagctgattaacatgacctactgccctaagactaaggtgctgtgcttgtggagacgcaacggtagtgaaactcagctgaataaattttacactaagaagtgtagagagctgtactactgcgtgaaagattccatggagcgtgccgcagctcgacagcagtctattaagccaggacccgagctgggtggcgagtttcccgtgcaggacctcaaaacaggcgaaggcggactgctccaagttaccctcgaggggataaacctgaagtttatgcataatcaagtctttatagaacttaaccacatcaagaaatgcaatacagtgaggggggtctttgtcttagaggaattcgtgcccgaaattaaggaagtggtcagccataaatataaaactcctatggcacacgaaatttgttactccgtactgtgccttttctcgtacgtcgccgcggtccactcatctgaagaggatcttcggacgccacctcgccctgtatcttcgtag

SEQ ID NO: 123440 - DNA, 588 bp, synthetic construct
  misc_feature 1..588: note = Description of Artificial Sequence: Synthetic coding sequence
  source 1..588: mol_type = other DNA
atgggttctcaatctagcaaggcaccaagaggtgatgtgaccgccgaagaagccgcaggtgcctcacctgccaaagcgaatgggcaggagaatggccatgttaagtctaatggggacctttcccctaagggcgagggcgaatcgcctcccgttaacgggacagatgaggccgccggagcaaccggggacgcaatcgaacccgcgccaccctcacagggggcggaagcgaaaggggaggtgccacccaaagaaacccccaagaagaagaagaagttctctttcaaaaagccattcaagctctccggattgtcttttaaacgcaaccgaaaagaggggggcggggacagttctgctagctctcccacagaggaagaacaagaacagggtgagatcggcgcctgttcggatgagggcaccgcacaggaaggaaaagcagccgcaacgccagaatcccaggagcctcaagccaaaggtgcagaggccagtgccgcctcagaagaggaagccggaccacaggctactgaaccatctacaccttccggtccagagagcggccccacaccggcttctgcagagcagaatgagtag

SEQ ID NO: 123441 - DNA, 1377 bp, synthetic construct
  misc_feature 1..1377: note = Description of Artificial Sequence: Synthetic coding sequence
  source 1..1377: mol_type = other DNA
atgtccaatgatggccgctcccgaaaccgcgaccggcgatacgacgaggtgccctctgatctgccctaccaggatactaccatcagaacacaccccaccctccatgacagtgagcgggccgtgagcgcggatcccctacctcccccgcccttgccactgcaaccaccgtttggtcccgatttttatagctcggacaccgaagagcctgcaatcgccccggacctgaagcccgttaggagatttgtgccggatagttggaaaaatttcttccgaggtaaaaagaaagatcctgagtgggataaacccgttagcgacatccggtacattagtgatggagtggaatgtagcccaccagcctctccagccagaccaaatcatcgctccccactgaacagctgtaaggacccctacggcgggagcgagggaactttttcttctaggaaggaggccgatgccgtatttccacgcgatccatacgggtctttagatcgccatactcagacagtccgaacgtattcagagaaggtcgaggagtacaatctgcgctattcgtacatgaaatcctgggccgggctcctccgcattctcggagtggttgaacttctgctcggcgccggagtcttcgcctgcgtgaccgcttacatacataaggacagcgaatggtataatttatttgggtatagtcagccctatggaatgggtggcgtcgggggcttaggcagtatgtatggaggctactattacactggtcctaagactcccttcgttttggtagtcgcagggttggcttggataactactattatcatcctggtgctgggtatgtcgatgtactatcgaacaattctcctggattcaaactggtggcctttaaccgaatttggtatcaacgtagctctgtttatcttgtatatggccgccgcaattgtgtacgtaaacgatacaaataggggcgggctttgttactatcctctttttaacacacccgtaaacgcagtgttctgtcgcgttgaggggggtcaaatagctgccatgatttttctctttgtgaccatgatcgtgtacctgattagcgctctggtctgcttaaagttgtggcggcatgaagcagctagaagacaccgcgaatacatggaacagcaagaaatcaatgagccctccttatctagtaagagaaaaatgtgtgaaatggctacaagtggtgatcgtcagcgggactctgaagtgaatttcaaagaattgcgcaccgccaaaatgaaaccggagttgcttagtgggcatattccccccccgcgccccgcaaattttttcgtttttctggtggagatggggtttcatcgcgtcagccaggatgatctggatcttctcacctcatag

SEQ ID NO: 123442 - DNA, 1677 bp, synthetic construct
  misc_feature 1..1677: note = Description of Artificial Sequence: Synthetic coding sequence
  source 1..1677: mol_type = other DNA
atgagtaatgatgggcgctccagaaacagagatcgacgctacgatgaggtaccgagcgatttgccttatcaggacaccacaatccggactcaccccaccctgcatgattccgagcgtgcagtctcagcagatcccttgcctccgcctccccttccccttcagcctccattcgggcctgatttctatagctcagataccgaggaacctgcaatcgcacccgatctgaaaccagtgcggcggtttgtgccggattcttggaagaacttctttcgaggaaagaaaaaggaccccgaatgggacaagcccgtctccgacatcaggtacataagcgacggtgtcgaatgttcccctccagcttcaccggcacggccaaaccacaggagtccgttaaactcttgtaaggacccttacggcggctccgaaggaacattcagttcccgcaaggaggctgacgccgtattcccgcgtgatccatatgggagcctggatcgccatacacagacggtacgaacatacagtgagaaggtggaagagtacaatctgaggtactcctacatgaaaagctgggccgggctactgcgtatcctcggcgtggtagaactgttactgggcgccggcgtgttcgcttgcgtgactgcatacatccataaagacagcgagtggtacaatttgtttggctattcccagccatacggcatgggaggcgtgggcgggctgggatccatgtacgggggctattactacacaggccccaagacaccctttgttcttgtggtggctggacttgcttggattactactatcattatattggtgctgggcatgtctatgtactatcggacaatcttattagatagtaattggtggccgctgactgagttcggaatcaatgtcgccctctttatactttatatggcagcagctatcgtatacgtaaacgacactaatagaggcggactctgctactatcccctgtttaacactcccgtaaatgctgttttctgtagggtggagggtggtcagatcgctgcaatgatctttctctttgtgacaatgatcgtgtatttgattagcgctcttgtgtgtttgaagctctggaggcatgaggctgctcggaggcatagagagtacatggagcagcaggagatcaacgagccctccctctcctcaaagcgcaagatgtgcgagatggcaacctctggggaccgacagcgcgacagcgaggtgaatttcaaggagttgaggacagcaaaaatgaaacctgagctcctttctgggcacatacctccaggccatattccaaaacccattgttatgcctgattacgtcgcaaagtatcccgtgatccagacggacgacgaaagagagcgttataaagctgtgttccaggatcaattctctgagtacaaggaacttagcgctgaggtgcaggcagtgctacggaagtttgatgaactggatgccgtgatgagtcgactgccccatcactccgagtccaggcaggaacacgagcggatctcaagaattcatgaagaattcaaaaaaaaaaaaaacgatcccacttttctcgagaaaaaagaaagatgtgactacttgaaaaataaactgtcccatattaagcagaggattcaagagtatgacaaggtaatgaactgggacgtgcagggatatagctag

SEQ ID NO: 123443 - DNA, 1329 bp, synthetic construct
  misc_feature 1..1329: note = Description of Artificial Sequence: Synthetic coding sequence
  source 1..1329: mol_type = other DNA
atgtcaaatgatgggcggtcccggaatagggacagaaggtatgatgaggtcccatcagacctgccctatcaagatactaccatccgaacgcacccaacattgcatgattccgagcgggccgtgagtgcagaccctttgccccccccaccccttcccttacaaccgccattcggtccagatttctattcgagcgataccgaagaacctgccatcgctcctgacctcaaacccgtgcgtaggttcgtgccggactcatggaagaacttcttccgtggtaagaagaaggaccctgagtgggacaagcctgttagcgatatccggtatatcagcgatggggtcgagtgctctccaccggcttctccggccagacctaatcacaggagccctttgaactcatgcaaagacccatacggcggatcagaaggcacgtttagcagccgcaaagaggccgatgcggtgttcccacgtgacccttacgggagtttggacaggcacacccaaacagtccggacatactccgagaaggtggaagaatacaacctgcgatattcctacatgaagtcctgggcaggtctcctcaggatcctgggggtggtagagctgttactgggagcaggagtcttcgcctgcgttacagcgtatatccataaagactcagagtggtacaacctgttcggatacagccagccttacgggatgggtggtgtagggggcctgggatctatcgcactagtctgtcttaagctgtggcgccatgaagccgcacggcgacaccgagagtacatggaacagcaggagatcaacgaaccatctctttccagcaagcggaaaatgtgcgagatggccacatcaggcgaccgtcagcgcgattccgaggtcaacttcaaggagttgaggaccgcgaaaatgaagcccgagctcttgtcaggccatatcccccccgggcacatcccgaagcccattgtcatgccggactatgtggctaaatatcccgtcatccagacagatgatgaaagagagcggtataaagcagtcttccaggaccagttttctgaatacaaagagctctcggctgaggtgcaggctgttttaagaaaatttgatgaactggacgccgtaatgtccagactgccacaccacagcgagtcaaggcaggagcatgaacgtattagccgcatccatgaagaattcaagaagaagaagaatgatcctaccttcctggagaagaaggaaaggtgtgactatcttaagaacaagctgtcccatatcaagcagcgtatacaggaatacgataaggtcatgaattgggacgttcagggatattcttag

SEQ ID NO: 123444 - DNA, 1641 bp, synthetic construct
  misc_feature 1..1641: note = Description of Artificial Sequence: Synthetic coding sequence
  source 1..1641: mol_type = other DNA
atgagcaacgacggccgttcccggaatcgagaccggagatatgatgaggtgccgtctgacctcccctaccaggacacaaccattaggactcatccaacgcttcacgattcggaacgggcagtgtccgctgaccccctgccacctccaccactgcccctgcagcctccatttggccctgatttctattcttctgacacagaagaacccgccattgctcccgacctcaaaccagtgaggcgcttcgtgcctgattcttggaagaacttttttaggggtaaaaagaaagaccccgaatgggacaagcccgtaagcgatatccgctatatttccgatggcgtggagtgcagtcctccagcctcccctgccagaccaaaccatcggagtcctctgaacagttgtaaggacccatacggcggctcggagggaacatttagttcccgaaaggaggccgatgccgtatttccccgggatccttatggctccctcgacaggcacacgcagacagtcagaacctactcagagaaggtcgaggaatataatctacgatactcttacatgaagtcttgggcaggactgctaaggatactcggagtggtagaattgctgctgggagcaggggtctttgcgtgcgtcacagcctatatacacaaagatagcgaatggtataacttgtttggatattctcagccttatggtatgggtggcgtggggggccttgggtcaatgtatgggggctattattataccggccctaagactccttttgtgttagtcgtcgcagggctagcttggattactacaatcattattctcgtgttagggatgtccatgtattatagaacaattctgctggacagcaactggtggcctctgacagagtttggtatcaacgtagcccttttcatcctgtatatggctgccgcgattgtgtacgtgaatgacactaatcggggcgggctctgttactacccgctgttcaatacgcctgtgaatgccgtgttctgtcgggttgaaggtgggcagatcgccgccatgatctttctcttcgtgacaatgatagtgtacctcataagtgcactggtctgcttgaaattatggcgacacgaggcagcccgtagacaccgggagtatatggaacagcaggaatgcgagatggcaacttcaggagacagacaacgggatagtgaggttaattttaaagagttacgtacagctaaaatgaagccagagttgctgagcgggcatatacccccgggccacatccccaagcctatcgtaatgccagactatgtggcaaaatacccagttatacagactgatgacgaaagagagaggtacaaggctgtgttccaggatcagttttccgaatataaagaactgagcgcggaggtgcaggccgtgctgaggaaatttgacgagctcgatgctgtgatgtctcgactcccccatcattcggagagtagacaggaacacgagaggatttcccgtattcacgaggagtttaagaagaagaagaacgaccccacattcttggaaaagaaagaacgatgtgactacctgaagaataagctctctcatattaagcaaagaatccaggaatacgacaaggttatgaattgggacgtccaaggctactcatag

SEQ ID NO: 123445 - DNA, 1551 bp, synthetic construct
  misc_feature 1..1551: note = Description of Artificial Sequence: Synthetic coding sequence
  source 1..1551: mol_type = other DNA
atgtctaacgatggaagaagtagaaatagggaccgacgatatgatgaagtgccgtccgatttgccttaccaggatacaaccatccggacccaccccactcttcacgactccgagagagcagtcagcgcggacccactaccgccccctccgctcccgctgcaaccgccattcgggcctgacttctattcgagtgatacagaggaacctgcaattgctccggatcttaagcctgtgaggcgcttcgtgcccgatagttggaagaactttttccgtgggaagaagaaggaccctgaatgggacaaacctgtcagtgacattcggtacattagcgacggagtggagtgtagcccacccgcctctcccgcccggcctaatcacaggagccccctaaactcttgcaaggatccatatggcggatccgagggaacctttagctctcggaaggaggcagacgcagtgttcccccgcgacccatatgggtctttggatcgacatacgcaaacggtccgcacttactccgagaaagtggaggaatataacctacgttatagttatatgaaatcctgggccggtttactgaggatcctgggcgtggtggaactgctccttggggcaggagtgttcgcctgtgttacagcatacatacataaagatagcgaatggtacaacctcttcggatactcccagccctatggcatgggcggcgtaggcggtcttggatccatgtacggcggttactattatactggccccaaaacccccttcgtgttagtggttgctggtttagcctggatcaccacaatcattatcttggtgctgggcatgtcaatgtattatcgaacaatcctactggactcaaactggtggccccttaccgagttcggaataaatgtggcgctttttatcctgtatatggcggccgctatagtgtacgtcaatgacaccaaccgcggcgggttgtgttattatcctctgttcaacacacctgttaacgcagtattctgtcgggtcgaaggcggccaaatcgctgccatgatattcttattcgtgacaatgattgtctacctgataagtgccctagtgtgtctgaaactttggcgtcacgaggccgcccgaagacacagggagtatatggagcagcaggagatcaatgagcctagtctcagttctaagcgtaaaatgtgtgagatggccacgagcggcgacagacagagggatagtgaggtgaatttcaaggaactaagaacagcaaaaatgaagccagaattactgagcggccacatcccccccggacacattcctaagcccattgtaatgcccgattacgtggccaagtaccctgtgattcagacagatgacgaaagagaaagatacaaggcagtcttccaggaccagttttctgagtataaagaactgtcagcggaagtccaggccgttctgaggaagttcgacgaactcgacgctgtgatgtctcgccttcctcatcattctgagtccaggcaggagcacgaacgcatttctagaatccacgaggagtttaagaagaagtag

SEQ ID NO: 123446 - DNA, 438 bp, synthetic construct
  misc_feature 1..438: note = Description of Artificial Sequence: Synthetic coding sequence
  source 1..438: mol_type = other DNA
atgtctaacgacggtcgtagccggaatcgcgatcgtcggtacgatgaggtgccgagcgacctcccataccaggacaccaccatcagaacacaccccacattgcatgactccgagcgcgctgtatccgctgatcccctgcctccgcctccgcttccactccagccaccgttcggccccgatttctattcaagtgacactgaggagcctgcaatagcacccgatttgaagcctgttaggaggttcgtcccagattcctggaagaattttttccgaggcaagaaaaaggaccccgaatgggataagccagtgtccgatatccggtacatctcggatggggttgagtgttcccctcccgcatcacctgcaagacctaaccacaggtcccccctgaactcatgtaaggatccttacgggggcagtgaaggcacatttagctag

SEQ ID NO: 123447 - DNA, 1206 bp, synthetic construct
  misc_feature 1..1206: note = Description of Artificial Sequence: Synthetic coding sequence
  source 1..1206: mol_type = other DNA
atggaggaccccagcggtgccagggagccccgcgcgcgcccacgagagcgagatcccggccggagaccccatcctgaccaagggagaacccatgatagaccaagggatagaccaggagatccccgccggaagaggtcgagcgacggcaaccgtcgtcgggacggggaccgcgaccccgaaagagatcaagagcgcgacgggaacagagatcgcaaccgcgacagggaaagggagcgggagagagaacgggacccagatcgcggtccccgaagggacactcatcgtgatgccggtccccgcgccggagagcacggggtctgggagaagcccagacaatctcgtactagagacggtgcccgcgggttgacgtgggatgcggcagctcccccaggcccagctccatgggaagcccccgagccccctcagccccagcgcaagggtgaccctggcaggcgtcggccggagtctgagcctccctccgaaaggtatttgccttctacaccccggcccgggagagaggaggttgagtattaccagtccgaagccgaagggctcttggagtgccacaagtgcaaatacctctgcaccgggcgcgcctgctgccagatgttggaagttctcctcaacttactgattcttgcctgctccagtgtttcttatagctcaacaggcggctatacaggcataacaagtctgggaggaatctattattaccagtttggtggtgcatacagtggatttgacggagcagacggtgagaaagcgcaacaactagacgtacagttttaccagttaaaactgccaatggtgaccgtcgccatggcctgttccggggcactgaccgcattgtgttgcctctttgttgcaatgggcgtgctgagggtgccttggcactgtcctctgctattagttactgaagggttgctggacatgctgatcgcaggtggttacatccccgctttgtacttctatttccactatctcagtgctgcgtatggcagcccagtgtgcaaggaaagacaggcattgtatcaaagtaagggctacagcggtttcggctgttcgttccacggagccgatataggggccggaatattcgctgcactaggaatcgtcgtctttgctctgggggctgtccttgctatcaaggggtatcgtaaggtgcgaaaattaaaagaaaaaccggccgaaatgtttgaattttag

SEQ ID NO: 123448 - DNA, 1233 bp, synthetic construct
  misc_feature 1..1233: note = Description of Artificial Sequence: Synthetic coding sequence
  source 1..1233: mol_type = other DNA
atggaggaccccagcggagcacgtgagcccagggcacggccaagagaacgcgatccggggcggcggcctcaccctgaccagggacgaacgcatgatcggccaagggatcgcccaggggaccctagacgcaagaggagcagcgacggaaataggcgacgggacggcgacagggaccctgagagagaccaggagcgcgatggcaacagagaccgtaaccgtgatagagaacgggagcgcgaacgcgagcgggatcccgaccgtggccctaggagggatacccaccgggatgccgggcctagagccggcgagcatggtgtttgggagaagccccggcaaagtcgcacacgcgatggtgcccgtggactgacctgggatgctgctgcccctcctgggcctgccccgtgggaggcacccgaaccaccacaaccacagcgaaaaggggatcctggtcgacgccggcctgagagcgagccaccctcggaacgctatctgccctcaacgccacggccggggcgggaagaagtcgagtactaccaatctgaggccgaagggctcctcgagtgccataaatgcaaatacctttgtactggccggggagtggtccagatcgtggaggtcgtattgaacggtatggtcctcatctgcatcgtggcatcttacttcgtgttggcaggattcagtgcctctttcagcagcggggggggcttcgggaataactattatagtcctttcgagggcactgagctcgagcaggttaggcagctcgaccagcagtacaccatcctgcgttcccccctcatctacggaggtgtcgccgtgtcactaggattaggtgttcttacgatgggcgtgctgttgcagggggcgaagagccggactatgctgtccggtaagtggctgctgacagaggccgcctttagcttgctggcagctgtggggtactgcacagggatcggggtctatctacatgtggctctgcagataaacagcactgacacatgtaagaccagggagcgcctctatgctaggaaaggacttacatggatggactgccagctcgcaggcaccgacggcgccgctgccacctttgcatgtttgttggtcatcatgtacggcgcaagtgtcgtactggcactacgcagttatagggagcaaaagcgctacaaaggctcgagagagcagccaggttcttacagcgatgctcctgagtatctgtggtctggcacactatag

SEQ ID NO: 123449 - DNA, 978 bp, synthetic construct
  misc_feature 1..978: note = Description of Artificial Sequence: Synthetic coding sequence
  source 1..978: mol_type = other DNA
atggacggctccaacgtgacgtcatttgtggtggaagaaccaacaaatataagtactggtcggaatgcctccgttggaaacgcccacaggcagatacccatcgtgcattgggtcattatgtccatttcaccagtcggtttcgtcgagaatggcatcctactttggtttctctgctttaggatgagaagaaacccgttcaccgtgtacattactcacctttctattgctgacataagtttgctattttgcattttcatcctttctattgattacgctctagattatgaactcagtagtgggcactattacacaattgtcactctcagcgttacgtttctatttggatacaacacaggtttgtatcttctgacagctatatcggttgaacgatgcctgtctgttttgtatcctatctggtaccgttgccaccgcccgaagtaccagtctgcccttgtttgcgcactgctgtgggccctgtcatgtttggtgaccaccatggaatacgtgatgtgtatcgatcgggaagaagaaagtcatagccggaatgattgccgagccgtgatcatttttatcgccatcctgtccttcctcgtgttcacacctttaatgttagtgagctccacaatcctagtggttaaaattagaaaaaatacctgggcaagccactcgtctaaactgtacatagtgattatggttaccatcattatctttctgatcttcgctatgcccatgaggctgctctacttgctgtattatgagtactggtctactttcggcaacctgcatcatattagtctgctatttagcactatcaatagctccgcaaacccgtttatctatttctttgtggggtcatcaaagaagaagaggttcaaggagtctctgaaggtcgtcctgactcgggcattcaaagacgagatgcagcctcggcgtcagaaggataactgcaatactgttactgtggaaaccgtggtttag

SEQ ID NO: 123450 - DNA, 1137 bp, synthetic construct
  misc_feature 1..1137: note = Description of Artificial Sequence: Synthetic coding sequence
  source 1..1137: mol_type = other DNA
atggtatggggtaagatctgttggttctctcaacgggcagggtggaccgtgttcgctgagtcacagatttccctgtcttgctcgctgtgtctgcacagcggtgaccaggaggcgcagaaccccaacctggtctcccagttgtgtggagtctttctgcagaatgagacaaacgagacaattcacatgcagatgtccatggctgtgggccaacaggctctgccgttgaacattatcgcccccaaggctgttttggtttctctgtgcggcgtgctgttgaacggaaccgtcttttggctgctctgttgtggagctacgaacccctacatggtctatatcctccacttggtggcggccgacgtcatctacttgtgttgctctgcagtgggcttcctgcaagtgacacttctgacatatcacggcgttgtcttcttcataccagatttcttggcaatcttgagcccgtttagtttcgaggtatgtctgtgtttgctcgtggccatctcaaccgagaggtgcgtctgcgtgctgtttcccatatggtatcggtgtcataggccaaaatatacgtccaacgtcgtctgcacactgatatggggacttcctttctgtatcaatattgttaaaagtttgttcctgacctattggaaacacgttaaggcttgtgtgatatttcttaaactgtccgggctgttccacgctatcctgtccctagtgatgtgcgtgtcgagtctgacacttctcatcaggtttctctgctgctcgcagcagcagaaggcgactagggtgtacgccgttgtgcagatttctgctcccatgttcctattgtgggcactccctttatccgttgctccgttgatcacggatttcaagatgttcgtgactacctcgtacttaattagcctgttcctcataatcaattctagtgctaacccaattatttacttttttgtcggctcactgcgaaagaagcggctgaaggaatcgctgcgcgtgatactgcagagagccttggctgacaaaccagaggtgggccggaacaagaaggcagcaggaatagaccctatggaacaaccgcactccactcagcacgtagagaatctgcttccaagggagcacagagtcgatgtggaaacatag

SEQ ID NO: 123451 - DNA, 1137 bp, synthetic construct
  misc_feature 1..1137: note = Description of Artificial Sequence: Synthetic coding sequence
  source 1..1137: mol_type = other DNA
atggtttgggggaagatctgttggttttcccagagggcaggttggactgtttttgccgagagccagatcagtctttcatgtagtctctgcttgcacagtggggaccaagaggctcaaaaccctaatctggtgtcacagttgtgtggagtattcctacaaaatgagaccaacgaaacaatacacatgcagatgtccatggctgttggacaacaagctctgcccctgaacatcatagctccaaaggccgtgctggtgtctctttgtggcgtgttgctgaatggcactgtgttttggctcctgtgctgtggggcaacaaacccttacatggtctacatcctacacctggttgccgccgacgtgatttacttgtgttgtagcgcagtgggcttcctgcaggtgacccttttgacgtaccacggcgtggtttttttcatacctgatttcctagctattctgtccccattcagcttcgaggtgtgcctttgcctgttggtagctattagtactgagaggtgtgtgtgtgtgctgttcccgatctggtataggtgtcatcgccccaagtataccagcaacgtcgtatgcaccttaatttggggtctacccttctgcattaacattgttaaaagtctatttctgacctactggaagcatgtgaaggcctgcgtgatcttcctgaagcttagcggtctatttcatgcaatccttagtttggtcatgtgcgtctctagccttactttacttattagatttctctgctgctcacagcagcagaaggccacgcgtgtatatgctgtcgtgcaaattagtgctcctatgtttctgttatgggctcttccactgagtgtcgcacctctcattacagactttaaaatgttcgtgaccacctcctatctgatttctctttttttaatcataaatagttctgctaatccaatcatctactttttcgtcggatcccttcggaagaagcgattgaaggagagcctgcgcgttatcttgcaacgcgcgttggccgataagccagaggttgggagaaataagaaggctgctggaattgacccaatggagcagccccattcaacacagcacgtcgaaaaccttctccccagagaacatcgcgtagacgttgagacgtag

SEQ ID NO: 123452 - DNA, 1137 bp, synthetic construct
  misc_feature 1..1137: note = Description of Artificial Sequence: Synthetic coding sequence
  source 1..1137: mol_type = other DNA
atggtatggggaaaaatctgctggttcagccagcgggctggttggacggtttttgccgaaagccaaatctccctcagctgttccctgtgccttcactcgggggatcaggaggcccagaatcctaacctggtttcgcagctttgtggagtgttcttgcagaacgaaaccaacgagactatccatatgcagatgagcatggctgtcgggcagcaggcactgccgcttaatatcattgctcctaaagcagtgctagtgtcattgtgtggggtcttattgaacggcacagttttctggctcctgtgctgcggagctacaaacccctacatggtgtacattctgcacctggtcgccgcagatgtcatctacctctgttgtagcgctgtaggcttcctgcaagtgactctgctgacatatcacggtgtggtgtttttcatcccggactttctggcaatcctgtcccccttcagcttcgaagtgtgcttgtgtttattggtggccatcagcacagaacggtgtgtgtgtgtactcttccccatatggtataggtgccatcgacccaaatacacatctaatgtcgtgtgcacactcatctggggactgcctttttgcatcaatatcgtcaaaagcttgtttctgacttattggaagcatgtgaaggcctgcgtgatttttttgaaactctccggactgttccatgcgattcttagcttggtgatgtgcgtatctagtctaactcttctgattagattcctctgctgctcccagcagcagaaggccacccgcgtgtatgctgttgtacaaatttctgctccaatgttcctgctgtgggccttgccactttctgtcgcgcctctcatcacggacttcaaaatgttcgtcaccacctcatatctgatttccttgttcttaattatcaacagctcagctaatccaattatatatttctttgtgggctccctgcgcaagaagaggctgaaggaatcattgagagttatcctgcagagggccctggcagacaaacctgaagtagggcggaataagaaagccgccggaatagaccctatggagcagccccattccactcagcacgtggagaatttactgccacgcgaacaccgggtggatgtcgaaacctag

SEQ ID NO: 123453 - DNA, 1137 bp, synthetic construct
  misc_feature 1..1137: note = Description of Artificial Sequence: Synthetic coding sequence
  source 1..1137: mol_type = other DNA
atggtctgggggaaaatctgttggttttcccagagagccggttggaccgtgttcgcagagagccagatctccctttcttgcagcctctgcctgcactctggggatcaggaggcacagaaccccaatcttgtgtcccagctctgcggcgtttttctgcaaaacgaaaccaatgagaccattcacatgcaaatgagcatggccgtgggacagcaggcattacctctgaacattattgccccgaaggctgtgctagtgtcgctgtgcggtgtcctcttgaacggaactgtattctggctgttgtgctgcggcgctaccaacccttatatggtttacatcctgcatctcgtggctgccgacgtgatctacctgtgctgctcagccgttggcttcctccaggtaacactcctgacctatcacggcgtggtgttctttattcccgatttcctcgcaatcctatcccctttctcattcgaggtgtgcctttgtctccttgtcgccatctctacggagcgttgcgtgtgcgtgctcttccccatttggtatcggtgtcacaggccaaagtacacctccaacgtcgtgtgtacactgatctggggcctgcccttctgcattaacatcgtgaaaagcttgtttcttacctactggaaacacgtgaaggcttgcgtgattttcctcaaacttagtggccttttccatgctatccttagtttggtgatgtgtgtgtcctcactgacgttattgatcagattcctgtgttgttctcaacagcagaaagccacccgagtgtacgcagtggtccaaatctcagctcctatgtttctgctttgggccctgccgctgtccgttgcccccttgattacggacttcaaaatgttcgtgaccacctcctatttaatttccctttttctgattatcaattcttccgccaaccctattatttatttctttgtcggaagcctccgcaaaaagaggctgaaggagagcctgcgcgttatcctgcagcgcgcattggctgacaagcccgaggttggccgcaacaaaaaggccgccggcatcgacccgatggaacagccccatagcactcagcacgtcgagaatctgctgccacgagaacatagggtagacgtggaaacctag

SEQ ID NO: 123454 - DNA, 1137 bp, synthetic construct
  misc_feature 1..1137: note = Description of Artificial Sequence: Synthetic coding sequence
  source 1..1137: mol_type = other DNA
atggtttgggggaaaatctgttggttcagtcaaagggccgggtggacggtgttcgctgagtctcagatatcactgagttgttctctgtgcctacatagtggcgaccaggaagcccagaaccccaacttggtatctcagctttgtggagtctttttgcagaacgaaactaatgagaccatccatatgcagatgtctatggccgtaggccagcaagctctgcccctgaacattattgctcctaaagcagtcttggtgagcctttgcggagtgttgctcaacggcaccgtgttttggctcctttgctgtggcgccaccaatccatacatggtgtatatcctgcacctggtggctgcagatgtaatctatctctgctgcagcgcggtcggatttttgcaagtgacacttctcacctaccacggagtcgtcttttttatcccagatttcttagctattctgtcccccttttcctttgaagtttgcctgtgtctgctcgtggcgatctcgaccgagcggtgcgtttgcgtgctattccccatttggtaccgatgccatcgtccaaagtacactagtaatgtggtgtgcactcttatctggggtctgcctttctgcatcaacatagtgaagagccttttcctcacctattggaaacacgttaaagcatgcgtgatctttcttaagttgtccggactgtttcatgcaatactgtccctcgttatgtgcgttagctctctgacgttgctgattcgatttctgtgttgttctcaacagcagaaagcaacgcgcgtatacgctgtggtgcagatcagcgccccgatgttcctgctgtgggccctcccgctgtccgtcgccccccttatcacggacttcaagatgtttgtgaccacaagctacctgatttcactttttctgatcattaattctagcgctaatcccatcatctatttctttgtggggtccctgcggaaaaaacgtctgaaggagagtttgagagttattctgcaacgggccttggctgacaaacccgaagtaggtaggaataagaaggccgcaggtattgaccctatggaacagccacattctacacaacacgtggagaacctccttcccagagagcaccgggttgatgttgaaacctag

SEQ ID NO: 123455 - DNA, 1137 bp, synthetic construct
  misc_feature 1..1137: note = Description of Artificial Sequence: Synthetic coding sequence
  source 1..1137: mol_type = other DNA
atggtgtggggaaagatctgctggttttctcaacgagccggttggaccgtattcgctgagagccagatttctctttcttgcagtctgtgtctccactccggtgaccaggaagcccagaaccccaacctggtgtcccaactctgtggcgttttcttgcagaatgaaaccaatgaaacaatccatatgcaaatgagcatggctgtcggacaacaagctctccccctgaacattattgcacctaaggccgtcctcgtgtccttatgtggtgtgctgctgaacggcacagttttttggttactatgctgcggcgccacaaacccatacatggtgtacattctccacctcgttgccgcagatgttatctacctttgctgctccgcggtgggcttcttgcaggtgactctattgacttaccatggtgtagtcttctttatcccagatttcttggcaattctttcacctttttcttttgaggtctgtctgtgtctgctcgttgctatctcaaccgagagatgtgtgtgcgtcctgttcccgatctggtatcggtgccaccggcctaagtatacgtccaacgtggtctgcacccttatctgggggctgcctttctgcatcaacatcgttaaaagcctgttcctgacatactggaagcatgtgaaggcatgtgtgatattcttgaagctgtccgggctgtttcacgccattcttagcctcgtgatgtgtgtcagttctctgacactgttaatcaggtttctgtgctgcagccagcaacagaaagcaacgagagtttacgctgtagtgcagatcagcgcacctatgtttctgctctgggccttgcccttatctgttgctcccctgattaccgatttcaagatgttcgtaaccactagttacctgatctccctgtttctcataatcaatagttccgcaaaccctatcatttatttctttgtgggcagcctgaggaaaaagcggctgaaggagagcctccgagtgattcttcagcgggccctcgcggacaagcccgaggtgggtcggaacaagaaggcggccgggatcgacccaatggaacagccgcacagtacccagcacgtcgaaaacctcctgccaagggagcacagggtggatgtggagacatag

SEQ ID NO: 123456 - DNA, 1137 bp, synthetic construct
  misc_feature 1..1137: note = Description of Artificial Sequence: Synthetic coding sequence
  source 1..1137: mol_type = other DNA
atggtgtggggcaagatatgttggttctcacaacgcgccggctggactgtgttcgcagaatcacaaatttctctttcctgctccctatgtttgcactccggggaccaagaggctcagaacccaaatttggtctctcagctgtgtggtgtgttcctccaaaatgaaactaacgagaccatacatatgcaaatgtcgatggccgtgggccaacaggctctgcctctgaacatcattgcccccaaagccgtgcttgtgagcctctgtggcgtgttgctgaatggcacagtattctggttgctctgttgtggggcaaccaatccatacatggtgtacattctccacctcgttgcggcagacgttatctacttatgctgctccgcggtgggctttctgcaagtcactttgttgacataccatggcgttgtcttcttcatcccagatttcctggctatactatctccgttcagctttgaggtttgtctttgcttgctggtggctatctcgaccgagcgctgtgtttgcgtattgttccctatatggtacagatgtcaccgacccaagtatacttctaacgtagtctgtacactgatctgggggctgcctttttgcataaatattgttaaatccctgttcctgacctattggaagcatgttaaggcttgcgtcatttttttgaagctgtccgggctctttcacgccatcctgagtttggtcatgtgtgtgtccagcttgacactactcatcagatttctctgttgctcacagcagcagaaggccactcgtgtgtacgccgtcgtgcagataagtgccccaatgttcttgctgtgggctctccctctgagcgtagcaccactgataacagattttaaaatgtttgtgaccacatcttatttgatctccctgttcttaattatcaactccagcgcgaacccaatcatttattttttcgtcggtagtctgaggaaaaaaaggctgaaggagtcactgagggtaatactgcaacgggctctggctgacaaacctgaggtcggacgaaacaagaaagccgccggtatcgaccctatggaacagccacactccactcagcacgtggaaaacctgttgccacgggagcatcgcgtcgatgtcgaaacctag

SEQ ID NO: 123457 - DNA, 1137 bp, synthetic construct
  misc_feature 1..1137: note = Description of Artificial Sequence: Synthetic coding sequence
  source 1..1137: mol_type = other DNA
atggtctgggggaagatctgttggttctcccaacgggccggatggacagtctttgccgagagccaaatttcgctgagctgttctctgtgcttgcactcaggcgaccaggaggctcagaatcccaacttggttagccagctatgtggagtctttctgcaaaacgagaccaatgagactattcatatgcagatgtccatggctgtgggccaacaggccctgcccttaaacattatcgccccgaaagccgtgcttgtgagcctctgcggcgtgctgttaaatggcacagtattttggctgttgtgctgcggagctacaaatccatacatggtgtatattctacatctggtcgccgccgacgtcatctatctttgttgtagcgctgtcggctttcttcaggtcaccctgctgacataccatggcgtagttttcttcatccctgacttcctagcgattcttagtccttttagctttgaggtgtgcctctgtctcctggtcgctatctccactgaaagatgcgtctgcgtgctgttccccatttggtaccgctgtcataggccaaagtataccagtaacgtggtgtgtactctgatttgggggctgcctttctgtataaacattgtcaagtccctgtttctaacgtactggaaacacgtgaaggcttgcgtaatcttcctgaagcttagcggcctgttccacgccattctgtcactggtgatgtgcgtgagttcactgaccctgctgatccgtttcctgtgttgcagtcagcagcaaaaggcgaccagagtatatgctgtggtgcaaatctctgcaccaatgtttcttctgtgggctctgcctttatctgtcgcgcctctcattaccgacttcaaaatgtttgtgacaactagctacttgattagtctttttcttataattaactccagtgcaaatcctataatctacttctttgtgggctcactgaggaaaaagcggcttaaagaaagtctacgcgtgatcttgcaaagagccctggctgataagcctgaagttggcagaaataaaaaggccgcaggaattgaccccatggagcagcctcactccactcaacatgtggagaacctgctgccccgagagcatagagtggacgtggagacctag

SEQ ID NO: 123458 - DNA, 966 bp, synthetic construct
  misc_feature 1..966: note = Description of Artificial Sequence: Synthetic coding sequence
  source 1..966: mol_type = other DNA
atgaatcagaccctcaatagctcaggaaccgtggaatctgcactgaactacagtcgggggagtaccgtacatacagcatatttggttctgagtagtctggccatgtttacatgcttgtgtggcatggccggcaacagcatggtcatctggcttctggggtttaggatgcatcggaatcctttctgcatttatatccttaacctggcagccgccgatctgttgtttctgtttagtatggcatcaaccctgtcactggaaacccagccactggtgaataccaccgacaaggtacacgagctaatgaaaagactgatgtacttcgcctacacagttggactgtctcttttgaccgcaatctcaactcagcggtgcctctccgtattgttcccaatctggtttaagtgtcaccggccacgacacttaagcgcctgggtttgtggcctgctgtggactttatgtttgttaatgaacggtctgacttcttccttttgtagtaaatttctgaagtttaacgaggatcgttgtttccgggtggacatggtgcaggctgccttgatcatgggcgtgcttaccccagtcatgacgttgtcgagtctcaccctttttgtgtgggtcagacggtcctcacagcagtggagacgtcagccaacacgattgtttgtggtggtcttagcctcagttcttgtgtttcttatctgttcactccccttgtcaatctattggtttgtcctgtactggctgagtctcccacccgagatgcaagtgctctgctttagtttatctcgcctgagctcaagcgtgtccagcagcgcgaacccagtgatctacttcctggtcggctcgcggaggtcccataggctcccgacacggtcattgggcaccgtgctgcagcaggcactcagggaagaacccgagttagagggaggtgagacccccaccgtcggcacaaacgaaatgggcgcatag

SEQ ID NO: 123459 - DNA, 936 bp, synthetic construct
  misc_feature 1..936: note = Description of Artificial Sequence: Synthetic coding sequence
  source 1..936: mol_type = other DNA
atggagcctcgcgaggcaggacagcatgtcggggccgccaacggcgcacaagaggacgtggctttcaacttgatcatactcagtcttacagaaggactgggactggggggcctgctgggtaatggggctgtgctgtggttactgtcctcaaatgtgtatcgaaatccgttcgccatctacttactcgacgtggcctgcgctgatctgattttcctcggatgtcacatggtggccattgtgccggacttgctccagggacggctggattttccaggatttgttcagacttcgctagccacactgagattcttctgctatatcgtaggtctgtccctgctggcggcagtctcagtggagcagtgcctcgccgccctttttcccgcttggtatagttgcagacgtccgcggcacctaacgacctgcgtgtgcgctctcacgtgggcattatgtttgttactgcacttacttctctctggagcctgtacgcagtttttcggggagccctcccggcacctctgcaggactctgtggttggtggcagctgtcctcctggctctgctgtgctgcaccatgtgtggcgcttcccttatgctactgttaagagttgaaagaggtccacagaggcctccacccaggggttttcctggcctgatcctgctgacagtgcttttattcttgttctgtgggctccccttcggaatatactggctttctcggaatctgctctggtacatcccccactacttctatcacttcagcttcctgatggccgccgttcattgcgcagccaagccagtggtgtatttctgcctgggatcagcccaggggcgtagacttccactcaggctggttctgcaacgagccctcggagatgaagccgagctgggggctgtaagagaaacaagccgtaggggtttagtagatattgccgcctag

SEQ ID NO: 123460 - DNA, 939 bp, synthetic construct
  misc_feature 1..939: note = Description of Artificial Sequence: Synthetic coding sequence
  source 1..939: mol_type = other DNA
atgatggagccgcgggaagctggtcagcacgtcggcgccgccaacggggcacaggaggatgttgcctttaacctgattatcctgtccctgactgaaggcctggggctcggcggactgttaggaaatggagctgtcctgtggttactctcttccaatgtgtataggaatccgttcgctatttacttgttggacgtcgcctgcgctgatctgatcttcctgggctgtcacatggtggctatcgttcctgatttactacagggtcggttggacttccctggctttgtccaaactagtctggcaacgctgaggtttttctgctatattgttggactgagtctgctagcagccgttagtgttgagcaatgccttgctgccttgttcccagcgtggtacagttgtcgccgccctagacatctgacgacttgcgtgtgcgccctcacttgggctctgtgtcttctgctacatctgcttctgtccggagcatgcacccagttctttggtgaaccgtctcgccatctgtgcagaacgctttggctggtcgccgcggtgcttctcgcgctcttgtgttgtactatgtgtggggcatccttgatgcttctgctgagagtggaaagagggccacaaagaccccctccccgtggttttcctggcctgattctactcacagtgctcctgtttctgttttgcggtctcccattcgggatctactggctgtctagaaatttattatggtatattccacactatttctatcacttttcctttctaatggcagccgtgcattgtgctgccaaacctgttgtgtatttctgccttggctccgcccagggtcgaagactacctttgcgcttagtgctgcagagagctttaggagacgaagctgaactcggagctgtccgggaaacttccagacgcggactcgtggacatagccgcatag

SEQ ID NO: 123461 - DNA, 1032 bp, synthetic construct
  misc_feature 1..1032: note = Description of Artificial Sequence: Synthetic coding sequence
  source 1..1032: mol_type = other DNA
atggcgggaaattgctcttgggaagcccacccaggtaataggaataaaatgtgcccgggattaagcgaggcccccgagctttactcaagaggattccttacaatagagcagatcgccatgctacctccaccagccgttatgaactacatattccttcttctgtgtctctgtgggttggttggaaacggtctggttctatggttctttgggttctctatcaaacggaatccattcagtatctactttctgcacttagcatctgctgacgtgggctatctgttcagcaaagccgtgttctctatcttaaacaccgggggtttcctgggaacctttgccgactacattaggtctgtctgcagggttctgggcctctgcatgtttctgactggggtctccctcttaccagctgtctccgccgagagatgcgcgagcgtgatcttccccgcctggtattggcggcgacgtcctaagcgcctcagcgccgtggtatgcgccctcctgtgggtgttatcgttgctggtgacatgtctgcacaattacttctgtgtgttcctggggcgcggggcacctggagctgcgtgccgacatatggacatatttctgggcatcctcctgttccttctctgctgccctctgatggtcctgccatgcctggcactgattcttcatgtagaatgtagagcccgccgacgccagagatcggccaaactcaaccacgtgatactggccatggtgagcgtgttcctggttagtagcatttatttaggaattgactggttcctcttttgggtttttcagattcctgccccttttcctgaatatgtcaccgatctgtgtatctgcataaactcctctgccaagcccatcgtgtattttttggccggcagggacaagtcacagaggttatgggaacccttgagagtcgtgtttcagcgggcactcagagacggcgctgagctcggagaagcaggcgggtcgacacctaacaccgttaccatggagatgcaatgcccaccaggcaacgcctcgtag

SEQ ID NO: 123462 - DNA, 948 bp, synthetic construct
  misc_feature 1..948: note = Description of Artificial Sequence: Synthetic coding sequence
  source 1..948: mol_type = other DNA
atggctggcaactgctcctgggaggcccatcctggtaacaggaataaaatgtgccctgggttgtccgaggcacctgagctttatagccgaggatttctgacaattgagcaaatcgccatgctcccacccccagctgtgatgaactatatcttcctgttactgtgtctttgcggattggtcggaaacggactggttttgtggttcttcggcttcagcattttgaacacgggcggttttctgggtaccttcgctgactatatccgatctgtgtgccgggtcctgggtctctgcatgttccttaccggtgtatccctgctccccgctgtctccgctgagaggtgtgcgtctgtgatattcccagcctggtattggcgacgtcgtcccaaacggctatcggccgtcgtatgcgcactgctgtgggtgctctcgctgctggtgacttgcctgcacaactacttttgcgtgttccttggaaggggggcacctggagcggcctgtcgccatatggacattttccttggcatccttttgttcctcctgtgctgcccattaatggtgcttccgtgcctggcactgatactgcacgtagaatgtcgcgctcggcgtaggcaacgatccgccaagctgaaccacgttatccttgccatggtgagcgtgtttctggttagttctatttacctgggcatcgactggttcctgttttgggtctttcagatccctgcgcctttccctgagtatgttaccgacctgtgtatctgtatcaatagctccgccaaacccattgtttactttttagcgggacgcgataaaagccagcgactctgggagccactccgggtcgtgtttcagcgcgctctgagggacggggcagaactgggggaggcaggcggatcgaccccaaacacagtaaccatggaaatgcagtgtccacccgggaatgcctcttag

SEQ ID NO: 123463 - DNA, 1032 bp, synthetic construct
  misc_feature 1..1032: note = Description of Artificial Sequence: Synthetic coding sequence
  source 1..1032: mol_type = other DNA
atggccggcaactgtagctgggaagctcacccaggtaacagaaacaagatgtgtccaggattatctgaggctccggagctgtactctcgggggttcctgacaatagaacagattgccatgctcccgcccccagcagtgatgaattatatcttcctgcttttatgtctttgtggattggtggggaatggccttgtgctctggtttttcggctttagcataaaaagaaaccccttctcaatctacttcctccacctcgcatccgcggacgtcggctacctcttctccaaagctgtgttcagcatactgaacaccggtggttttctcggcacatttgctgattacattcgaagtgtgtgtcgggtgctcgggttgtgtatgttccttaccggtgtttctttactgccggctgtgagcgcggagagatgcgcatctgtgattttccctgcctggtattggaggcgtcgacccaaacggctcagtgcggtggtgtgtgctcttttgtgggtactcagcctgctggtcacttgccttcataactacttctgcgtgttcctcggccggggagctcctggggccgcttgtagacatatggacatcttcctgggcatcttgctctttttgttgtgctgtccactgatggtgctaccttgcctcgcactgatcctgcacgtggaatgtagagctaggcgacgacagaggagcgcaaagcttaaccacgtaattctcgcaatggtgagcgtcttcttagtgtcaagcatctacctcggtattgactggtttctcttttgggtgttccagatccccgcccccttcccagagtacgttaccgacctgtgcatctgtattaacagctctgcaaagcccattgtttattttttggcagggagggacaaatcacagaggctctgggagcctcttcgggttgtcttccagcgggcccttagagacggcgctgaactgggggaggccggcgggtctactcctaatacggtaactatggagatgcagtgccccccaggaaatgcttcgtag

SEQ ID NO: 123464 - DNA, 870 bp, synthetic construct
  misc_feature 1..870: note = Description of Artificial Sequence: Synthetic coding sequence
  source 1..870: mol_type = other DNA
atgtttgggctcttcgggctttggcgtacctttgattctgtggtattttacttaacactcatagtcggactcggcggacctgtaggaaatggcctcgtgttgtggaacctaggctttcgtatcaaaaaaggtcctttctctatctatctgctccatctcgcagctgcagactttctattcctgtcttgccgagtcggcttctccgttgcacaagcagcactgggggcccaggatacactctatttcgttttgacattcctctggttcgcggttgggctgtggttattggccgctttctctgtcgagcggtgcctgagcgatctgtttcccgcctgctatcagggatgtaggccccggcatgcctccgctgtcctgtgcgcactggtgtggacgccaactttacccgccgttccactccccgccaacgcttgtgggttgctcagaaactccgcctgtccgctggtttgcccacggtatcacgtcgctagcgtgacctggtttttggtgctggcaagggtagcatggaccgctggtgtggtcctattcgtgtgggtcacatgttgttccactaggcctaggccccgcctttatggtatcgtgctcggtgcgctgttgttattgttcttttgcggactcccatccgttttctactggagtctgcagccgttgctgaacttcctgctccccgtgtttagccccctggcaaccctcttggcatgcgtgaactccagttctaagcccttgatctattctggcctggggcgacagcctggcaaaagagagcccctgcgatccgtactcagacgggcactcggggaaggtgcagagctaggagcaaggggacagtcactccctatgggcttactgtag

SEQ ID NO: 123465 - DNA, 969 bp, synthetic construct
  misc_feature 1..969: note = Description of Artificial Sequence: Synthetic coding sequence
  source 1..969: mol_type = other DNA
atggatccgactatcagtacactggacacggagctgactcccattaatggcactgaggagaccctttgctataagcagactctatctctcaccgtgcttacttgtatcgtcagcctggtgggactcacaggaaatgccgtcgttctgtggctcctgggatgtcgcatgcgacgcaacgctttctccatctacatcttaaacctcgccgccgcggacttcctatttctcagcgggcgcctcatttattccttgctgagcttcatatcaattcctcacaccattagcaagatcctctaccccgtcatgatgtttagctactttgctggactctcatttctgtccgctgtgtccacagagagatgcctgagtgtactgtggcccatatggtacagatgtcacagacctacccatctgtctgctgttgtgtgcgtgctgctgtgggccctgagtctgcttagatctatcctggagtggatgctgtgcggttttctgtttagcggcgctgactccgcgtggtgccagacttcagactttattactgtggcttggctgatatttttatgcgtagtgctttgcgggagttccctggtccttttaatcagaatcctgtgcgggtctagaaaaatccctctgacacgactgtatgtgacgattcttctgaccgtgctggtgttcctgctgtgtggactgccctttggcatacagtttttcctgttcctgtggatccacgtcgatcgtgaagtgctgttctgccacgtgcaccttgtgagtatattcctgtctgccctgaattcatctgccaatcctattatctactttttcgtcggaagcttccgacagcggcagaataggcagaatctgaagctggtgctgcagcgagcactacaagatgcgtcagaggtcgatgaaggaggcgggcaactccccgaagaaatcttggagctgtccggctcacgactagagcagtag

SEQ ID NO: 123466 - DNA, 993 bp, synthetic construct
  misc_feature 1..993: note = Description of Artificial Sequence: Synthetic coding sequence
  source 1..993: mol_type = other DNA
atggaccccaccactcctgcctggggcactgagtccacaaccgtgaacgggaatgaccaggcactacttctcctgtgcggtaaagagaccctcatccccgttttcctgattctcttcattgcgctggtgggtctcgtaggaaacggcttcgttttatggctacttggatttcggatgcgtcggaatgccttttccgtctacgtcctgtccctggcaggagccgactttctgtttctctgtttccaaatcattaattgcctggtttatctctcaaatttcttctgcagcatatcgatcaatttcccatcctttttcactacagtaatgacctgcgcatatctcgctggactctctatgctctcgaccgtgtctaccgagcgctgtctgagtgtcctttggcccatttggtacaggtgtcgtcggcctcggcacctgagtgccgtcgtgtgcgttctgttgtgggccctatccctgctgttgtctattcttgagggaaagttctgcggcttcctgttttctgatggagacagtgggtggtgtcagactttcgatttcattacggctgcatggctaatatttcttttcatggtgttgtgtgggagttccctggctctgctcgtgagaatcttatgcggtagcagaggcctcccattgacccgcctgtaccttacaattctgctgactgtactggtgtttctgctttgtggcttaccttttgggattcagtggttcctgatcctctggatctggaaggatagtgacgtgctgttttgtcacattcatcctgtgagcgttgtgttgagtagcttaaactcaagcgcgaaccccattatctacttcttcgtgggatcattccgaaaacagtggcggcttcagcaacctatactgaagctggcactccagcgtgctctccaggatatcgcggaagtcgatcactcagagggatgttttcgccagggaactcctgaaatgtctcggtccagcctggtgtag

SEQ ID NO: 123467 - DNA, 969 bp, synthetic construct
  misc_feature 1..969: note = Description of Artificial Sequence: Synthetic coding sequence
  source 1..969: mol_type = other DNA
atggacagcaccatcccagtgctgggcacagagctgacgcccatcaacggacgggaggagacaccatgttacaagcagacgctatcatttaccgggttgacttgcatcgtaagtcttgtcgccctgaccggcaatgccgtggtgctgtggctgttggggtgcaggatgcggaggaacgcagtaagcatctacattcttaacctcgtcgcggccgacttcttatttttgagtggacatattatttgtagccccctgagattgatcaacatccgacatcctatctccaagattctgtctcccgtaatgacatttccatacttcatagggctttcgatgctgtccgccattagcacagagcgctgtttgtcgattttgtggcccatatggtaccattgcagacggccgcgatatctgtcctccgtaatgtgcgttctgctgtgggccctgtctctgctaagaagtatcttggagtggatgttctgcgattttctcttctcaggagccaatagcgtgtggtgcgagacatctgacttcataaccatagcatggctcgtgtttctgtgcgtggtcttgtgcggttcttctcttgtgcttctggttagaattctgtgtggatcacgcaaaatgccactcacaagactttacgtcaccattctactgacagtgcttgtctttttattatgtggactcccctttggtatccaatgggctctgttttctcggatccacttggattggaaggtcttgttttgccacgtccacctggtcagcatctttttgtctgcactgaactccagtgctaatccaattatatacttctttgtgggttcattcagacaacgtcagaaccgacagaatcttaagcttgtgttgcagagagccctccaggacaccccggaagtggacgagggcggggggtggctgccacaggaaactttagagctgagcggatcaaggttagaacagtag

SEQ ID NO: 123468 - DNA, 741 bp, synthetic construct
  misc_feature 1..741: note = Description of Artificial Sequence: Synthetic coding sequence
  source 1..741: mol_type = other DNA
atggactcaacaatcccggtgttgggcacggagctgactccaatcaatgggcgcgaggaaactccttgctataaacagaccctgtcctttacaggcctgacatgtatcgttagtttggtggctttgaccgggaatgctgtcgtgctgtggctgctcgggtgcaggatgcggcggaacgcggttagtatatacattctgaatctggtggcggcagacttcctctttttatctggtcatattatatgtagcccactgaggctgatcaacatcaggcaccccatatccaagattctgtcccccgtaatgaccttcccctatttcattggcctttccatgctgtctgccatctctacggagaggtgcttgtccattctctggccaatctggtatcattgcagaagaccccggtatctctcatctgtaatgtgcgtgttgttatgggcactgagccttctccggtccattcttgaatggatgttttgtgactttctattttcaggtgccaacagcgtttggtgcgaaacatccgattttatcactatcgcctggctcgtctttctgtgtgttgtgctttgcggttcatcactagtcttgctggttcgtattctctgcggaagtcgtaagatgccgctgactcggctgtatgttacaatcctacttaccgtgctggtattcctcctatgtggtctgccctttggtatccagtgggccttgttcagccgcatccatctcgactggtag

SEQ ID NO: 123469 - DNA, 969 bp, synthetic construct
  misc_feature 1..969: note = Description of Artificial Sequence: Synthetic coding sequence
  source 1..969: mol_type = other DNA
atggaccccacagtgccggtttttggcaccaagctgacacctatcaatggaagagaggaaacgccatgctataaccagacactgtcctttaccgtcctgacgtgtattatcagccttgtgggcctcacaggcaacgcagtggtgctctggctgctgggttatcgtatgcgccgcaacgctgtgtcaatctacatcctgaatttggctgccgctgacttcctgtttctgtcattccagataataagactccctcttaggctgatcaatatctctcacttgatcaggaagatcttggtgtccgtgatgaccttcccatactttacagggctttccatgctgtccgccatttctacggaaagatgcctgagcgttttgtggccgatctggtacaggtgcagaaggcccacccatctctcagccgtggtgtgtgtgctgctctgggggctgtccctgttattcagcatgctggaatggagattttgcgactttctcttcagtggggctgatagtagctggtgtgagactagtgacttcatccccgttgcttggcttatattcctttgcgtagtgttatgcgtgagtagtctcgtgttgctcgtgcggatcctgtgcgggtcccggaagatgccccttacgagactttatgttaccatcctgttgaccgtactggtgttcctgctctgtggattgcccttcggcatattaggggcgctgatctatagaatgcatctcaaccttgaggttctgtactgtcacgtgtacctcgtttgtatgtctctgtcttctctcaattcatcagcgaacccaattatctatttctttgtgggatccttccgtcaaaggcaaaatagacagaatctgaaattggtgctccagcgtgccctccaggataaacctgaagtcgataaaggagagggtcagttgcctgaagagtcacttgaactgtccgggtctagacttggcccatag

SEQ ID NO: 123470 - DNA, 3051 bp, synthetic construct
  misc_feature 1..3051: note = Description of Artificial Sequence: Synthetic coding sequence
  source 1..3051: mol_type = other DNA
atggtcctgcccacatgtcccatggctgaatttgccctgcctagacacagcgccgttatggaacgccttcgaagaagaatcgagctttgccggcggcaccactcaacttgcgaggcacgctacgaagccgtttcacccgagaggcttgaactagagagacagcacacttttgccctgcaccaacggtgcattcaggccaaagcaaagcgcgcagggaaacatagacagccccccgcggcgactgcccctgcacccgcggccccagctcccagactggacgcagctgacgggccagagcatggacgccctgctacccatttacacgataccgtgaagagaaacctagatagtgctacttccccccagaacggagatcagcagaatggctacggggacctctttccaggacataagaagacccggcgagaggcaccactcggcgtggcaatctccagtaacggccttccaccggcctctcccctcggtcagtccgacaaaccttctggagccgacgccctccagtcttcagggaagcatagtctcgggctggactccttgaataagaagaggctggcagattccagtctacacctgaacggtgggagtaatccctctgagtcatttcctctttcgttgaacaaagagcttaaacaagaaccagtggaggacctaccatgtatgattactggcaccgtgggtagtattagccagagtaatctcatgcccgatctgaatctaaacgagcaggagtggaaggaattgatcgaggagctgaaccgcagcgtgccagacgaggacatgaaagatctgtttaatgaggatttcgaagaaaagaaagaccctgaatccagcggttcagccacgcaaacaccattggctcaagacattaacattaagaccgagttttcacctgccgcgttcgaacaagaacagctcggatctcctcaggtccgcgcagggtctgctggacagacttttctgggcccatcctccgctcccgtgtcaactgacagcccatccttaggaggaagccagactctattccacaccagtggacagcctcgtgctgataatccaagccccaatctcatgcccgccagtgcgcaagctcaaaacgcgcagcgggccttggcaggagtggttttgccctcccaggggcccggcggcgcctccgaattgagcagtgcccatcaactgcagcaaatcgccgccaagcagaagcgtgagcagatgctgcaaaacccacagcaagcgacccccgctccagcccccggccagatgtccacatggcaacagacaggaccgtcccatagctccctggacgtaccctatcccatggagaagcccgcaagtccatcatcttataagcaagatttcactaactccaagctgctgatgatgccttctgtaaataagagcagccctagaccagggggcccctatctgcagcccagccacgtaaacttgctgtctcatcagcctcctagcaatcttaaccagaacagcgctaataatcagggcagcgtgctagactatggcaatacgaagcctttaagccactacaaggcagactgcgggcagggttcccccggaagcggacagtctaaaccagccttaatggcatacttaccacaacaactcagtcatatctctcacgagcaaaacagtcttttcctgatgaagcctaagccaggaaacatgccattcagaagtttagtcccccccgggcaggagcaaaacccttccagcgtgcctgtccaagctcaggctacctccgtgggcacccaacctcctgccgtctccgtggcttcttcacacaactcctccccatacctgagtagccaacagcaggcagccgttatgaagcaacaccagctcttactggaccaacaaaagcaacgggaacagcagcaaaagcatctccagcaacaacagtttctgcagcggcagcagcacctgttagccgagcaggagaaacagcagtttcagagacatcttacccgcccaccacctcagtatcaggacccgacacaggggagcttcccgcagcaagtaggtcaattcaccggcagctctgccgctgtgcctggcatgaataccctcggaccatcaaactctagttgccccagagtttttccccaggctggcaatctcatgcctatgggccctggccacgcgtccgtgtcttccttgcctaccaactcgggtcagcaagatagaggcgtcgctcagtttcctggatcccagaacatgccccagtcaagcttgtacggcatggcctctgggattacccagattgtcgcccagccacccccccaggccaccaacggccatgcccacattcctcgccagactaatgtgggacaaaacacatcagtgagcgccgcctacggacagaattctctcgggagcagcggcctgagccagcagcataataagggcaccctgaatccaggtctcactaagccccctgtgcccagggtatcaccggctatgggcggccagaacagttcttggcagcatcagggtatgccgaacctgagtgggcagactccaggtaatagtaatgtgagcccatttaccgccgcttcaagctttcatatgcagcagcaggcacacttgaaaatgtcctccccccagttttctcaggctgttcccaacaggcccatggcccccatgtcgtccgccgcagccgttgggagtctcctgccgccagtgagcgcacaacagcgaactagcgcccctgcccctgctccaccccctaccgcaccccagcagggcctgcccggactcagtcccgccgggccagaactgggggcattcagccagtcccctgcctctcagatggggggccgcgccggtcttcactgcacacaggcctatcccgttcgcaccgcaggacaagagcttcccttcgcctactccggtcagccaggaggctctggtttatcatccgtcgccggacacactgacttgattgatagcttgttgaaaaatcggacaagcgaggaatggatgtccgacctggacgatcttttaggctcccagtag

SEQ ID NO: 123471 - DNA, 2286 bp, synthetic construct
  misc_feature 1..2286: note = Description of Artificial Sequence: Synthetic coding sequence
  source 1..2286: mol_type = other DNA
aggggtaaacagtggggtcggggcggtggtgagagaccccgtcttgaagttggctctaaacgacgcttgggtgtcggaccttccggagccgggggtaaaccagccgccgcacgtgaacccgctcccttgccatcaggcgcctggaggggccgcgaggcagagcggggttccagaggggagcgaagcccccaatgccagcccgcccctagagggccggctcccggacccgctagggccgcccgcggcccctggtgttgtcctcccgcgccttggaggtcctcacgttgtcggggaacagcccgcagctggtcggcatttgctggggcgtcctcttgcgccggagccaccaccgcgccggcaaggcccgctgccccggcccccaggttagatgcagccgacggcccagagcatggtagaccagctacgcacttgcacgataccgtgaagcggaatctggattctgcaacttccccacagaacggagaccagcagaacgggtacggagatttgttccccggccataaaaagacaagacgtgaagctcctctgggcgtagcaatctcgagcaacgggctgcctcctgctagtccacttggccagtcagacaaaccgtcgggcgccgatgctctacaatcctctgggaaacacagcctgggcctggactccttgaataaaaaaagactggctgatagcagcctgcatctgaacggcgggtctaacccttccgagtcatttcccttgtcgctgaataaggagctcaagcaagagcctgtggaggacctgccctgcatgataacggggaccgttggctccatttcccaatccaaccttatgcctgatctgaatctaaacgagcaagagtggaaggagcttatcgaggagcttaacagaagtgttcctgacgaggacatgaaggacctgtttaatgaagatttcgaggagaagaaggatccggagtcatcggggagtgcgactcaaacccctctcgctcaggacatcaatataaagactgaatttagcccagcagcgttcgaacaagaacagctggggtccccacaggtgagagctgggtcagccgggcagaccttcctggggccctcttctgccccggtgtccaccgacagtccctcgctgggcggctcccaaactttgtttcataccagtgggcaacccagggcggataatccatcccctaatctgatgccagccagcgcacaggcccagaacgcgcagcgcgctctagctggagtagtgctaccatcccagggccccggcggcgcatcagaactgtcaagcgcccaccagctgcagcaaatcgccgcaaagcagaagcgtgagcaaatgctccaaaaccctcagcaggccaccccagccccagcgccaggacagatgagcacatggcagcagactggtcccagccattcatcgctggatgtgccttaccccatggagaaacctgccagcccgtcttcctacaagcaggacttcacaaatagtaagctgttgatgatgcctagtgtgaacaaaagttcacccagacccgggggcccctacctgcagcccagccacgtgaacctcttgagccatcaacctccttcgaacttgaatcaaaactcggctaacaaccaggggtccgtactcgactatggaaacacgaaaccgttgtcacactacaaggcagactgcggccagggcagccccggatcaggccagtccaagccggcattgatggcctacctaccacagcagctctctcatatttcacacgaacagaattcactctttctcatgaagcctaagccaggcaatatgccttttcggtccttggttcccccaggccaggaacaaaacccctcatctgtacccgtgcaggcgcaggccacgagtgtgggcacacagccgcctgcagtgagcgtggcctcttcccataattcaagtccgtatttgagctctcagcagcaggcggcagtgatgaaacaacatcagttattgctcgaccagcagaagcagagagaacaacagcagaagcacctgcagcaacagcaatttctccagaggcaacagcaccttcttgctgagcaggaaaaacagcagttccagcgtcacctgacgagaccacctccccaatatcaggatccaacccaagggagctttcctcagcaagtaggccagttcactgcgcagggcctgtcatgcgctctcccaatgatccactccactgaagtgctgatttcctcgttatgtaatggatctgcaggcctgagcgccgctcagcgaagctggtag

SEQ ID NO: 123472 - DNA, 3471 bp, synthetic construct
  misc_feature 1..3471: note = Description of Artificial Sequence: Synthetic coding sequence
  source 1..3471: mol_type = other DNA
atgggtgatactgcgcccccacaagctcccgccggtggtctggggggggcttctggtgccgggcttttgggaggaggctcagtaacccccagggtacatagtgccatcgtggagcgtctgagagcacggatagctgtgtgtaggcagcatcatctctcttgtgaagggcggtacgagagagggcgagccgagagctctgatcgggagcgtgagtccactcttcagctgctgtccctagtgcagcacggtcagggcgctaggaaggctgggaagcacactaaagccactgcgacggccgccacaaccacagccccacccccgccgccagctgcgcccccagcggctagtcaggcggccgctactgccgcaccaccccctccacctgattaccaccaccaccatcagcagcatctgcttaattcaagtaacaatggcggctcaggagggatcaacggagagcagcagccccccgcttcgacccccggcgaccaacgaaactcggcccttattgccctgcaagggtctctgaaacggaagcaagtggtgaacttaagcccagcaaattccaagcgacctaatgggttcgttgataatagcttcttagatatcaaaagaattcgggtgggggaaaacttgtcggctgggcagggcggattgcaaattaataacggccagagccagatcatgtccggaacgcttcccatgagccaggcaccgctgcgcaagacgaacactcttccttcacacacccattcacctggtaacgggctttttaatatgggtttgaaggaagtcaagaaggagccgggcgagacgctgtcctgctctaagcacatggacggacaaatgacccaggagaacatttttcccaatcgctatggtgatgacccaggcgagcagttaatggatcctgaactgcaggagcttttcaacgagcttacaaatatcagcgtcccacccatgtccgatttggagctcgaaaatatgataaacgccaccatcaagcaggatgatccatttaatatcgatctcggtcagcagtcccaacgatctacacctaggccgagtcttcctatggagaaaatagtcataaaaagcgaatatagccccggactcacccagggcccgtccggatcaccacagctgcgccctccttctgcagggcccgctttttccatggccaattccgccctgtcaacaagtagcccaattccctctgtgcctcagtcacaagcacagccacagaccggttcaggagcctcccgcgcacttcctagctggcaagaagtcagtcacgcccagcagctgaaacagattgcagctaaccgccaacaacacgcccgcatgcagcaacatcaacagcagcatcaacccaccaattggtcagccctgccgtcgagcgcagggccgagcccaggaccattcggacaggagaaaatcccaagccccagttttggacagcagacattctctccacagagttcaccaatgcccggtgtggcaggaggtagtggccaatctaaagttatggccaactacatgtacaaggccggacccagtgcacaagggggtcatctggatgtcttgatgcagcagaaaccacaagatttgagtcggtccttcattaacaatccacaccctgctatggagcctaggcaggggaacaccaagccattgtttcacttcaactcggaccaggccaaccagcagatgccttcagtcttacctagccagaacaaaccaagtttattgcattacacccagcagcagcagcagcagcagcagcagcagcagcagcagcagcaacagcagcagcaacagcaacaacagcagcagcagcagcagcaacagcagcagcagcagtcctccatcagcgcccagcagcagcagcagcagcagtcctccatcagcgcccagcagcagcaacaacaacaacagcagcagcagcaacagcagcaacagcagcagcagcaacagcagcaacagcagcaacagccctcgagtcagcctgcacaaagcctgccttcccaacctctgctgcgttcccctctgccgttacagcaaaaactcctgctgcagcagatgcaaaatcaaccaattgcagggatgggatatcaggtaagtcaacaacagagacaggatcaacacagcgtggtcgggcaaaacactggaccatccccttcacccaacccttgttctaatccaaatactggatctggctacatgaactcacaacagagccttctaaaccagcagctcatggggaaaaaacagaccctacagcgacagattatggaacagaagcaacagctactgcttcagcagcagatgttggcagacgctgagaagattgccccgcaagaccagatcaatagacacctgtcacgacccccccccgattacaaggaccagcggcgcaacgttggcaacatgcagcccactgcccagtactccgggggatcttctaccatctccttgaactcaaaccaggccctagcaaatcccgtgtcaacgcatactattctgaccccgaatagttccttattatcaacctcccatggcacccgcatgccttccctcagtactgctgtgcagaacatgggcatgtatggtaacctgccctgcaatcagccaaacacctattccgtgacatccgggatgaatcagctgacacaacagagaaacccgaagcaactgctggccaaccaaaacaaccccatgatgccgagacctccaacactcggcccaagcaataacaataatgtcgcaacgttcggggccggaagtgtggggaactctcagcagctgcgaccgaacctcacgcacagcatggcctccatgcctccgcaaagaacctcaaacgtgatgattacttcaaacacaaccgcaccaaattgggcttcacaagaaggaacaagcaaacagcaggaagccttaaccagcgccggagtgagatttcctacaggcaccccagcagcttacacaccgaatcagtcccttcagcaagctgtaggaagccagcagtttagccagcgggctgtggccccccccaaccagcttacccccgctgtgcagatgagacctatgaatcaaatgagccaaactctaaacggccagaccatgggcccactgagagggctcaatttgagaccgaaccagctgtctacccagatcctgcctaaccttaatcagagcggcaccggtctaaaccagtcccgaaccggtatcaatcaacccccatctctcactccatcgaacttcccttcgccaaatcagtcatcacgagcatttcagggaacagatcactctagcgatttagctttcgattttctctctcagcagaatgataacatgggacctgctctcaacagtgacgccgattttattgacagcctgttaaagacagagcccggaaatgatgattggatgaaagatatcaatctggatgaaatcttagggaataatagctag

SEQ ID NO: 123473 - DNA, 3471 bp, synthetic construct
  misc_feature 1..3471: note = Description of Artificial Sequence: Synthetic coding sequence
  source 1..3471: mol_type = other DNA
atgggagacaccgcaccacctcaagcaccagccggcggccttggtggcgcctccggtgccggccttctggggggaggatcggtaactccaagagttcactctgcaattgttgagagactcagggccaggattgctgtctgtaggcagcatcacttatcttgcgaaggtaggtacgaaaggggcagggccgaaagctctgaccgcgaacgcgaatccacacttcagctcctttcgctcgtgcaacacggacaaggcgccagaaaggccggcaagcacaccaaggctacagcgacagccgctacaacaactgcacctccaccaccaccagcagcgccaccagctgcttctcaggccgcagcgaccgccgcccctccgcctccaccagactaccaccaccatcaccagcagcatctgcttaatagttccaacaatggaggctctggtggtatcaatggagaacagcagccaccggcatcaacacctggagaccaaagaaactccgcgctcattgcgctgcagggtagcctgaagcgtaaacaggtcgtaaacctgtcacccgcgaattctaagaggcccaatggcttcgtagataatagctttctagacattaagagaattcgtgttggcgaaaacttgtccgctgggcagggtggacttcagatcaacaatggtcaatcacagatcatgagcggcactctccccatgagccaggccccactgaggaagactaatactctaccgtcacacacccacagtcccggtaatggcctgttcaatatgggcctgaaagaagtgaagaaagagcccggcgagaccctgtcttgtagcaagcatatggatggtcagatgacccaggaaaacatcttcccaaatcgctatggtgacgatccgggcgaacagctgatggacccggagttgcaggaactcttcaacgagctgacaaacattagcgttccccctatgtccgaccttgaactggaaaacatgataaatgctaccattaaacaggacgaccccttcaacatcgatctcggtcagcagtcccagcggagcacacctcgcccctcactgcccatggagaaaatcgtgattaaaagcgaatactcccccgggctgactcagggcccaagtggctcacctcagctgagacctccaagcgccggacccgccttctcaatggctaatagcgccctttccacctcctcacctatcccatcagtcccccaatcccaagctcagccccaaacaggctctggggcatctcgagccctgcctagctggcaggaagtgtcacacgcacagcagctaaagcagattgcggctaatagacagcagcacgctcgcatgcaacaacaccagcaacaacaccagcccacaaactggtcagctctgcccagtagtgctggcccaagcccaggccccttcggccaggaaaagataccgagcccaagcttcggccagcaaactttcagccctcagagttccccaatgccaggcgtagccgggggaagcggccaaagcaaagtgatggccaactacatgtataaagctggaccaagtgctcagggcggccacctcgacgtgcttatgcagcagaaacctcaggatctgtctcggagttttattaataacccgcacccagccatggaaccaaggcaaggcaatacgaagcccttattccatttcaactctgaccaagctaaccagcaaatgcctagcgtccttccatcccagaataagccctcactattacattacacacaacagcagcagcagcagcagcaacaacaacagcagcaacaacagcagcagcagcagcagcagcagcagcagcagcagcagcaacagcaacagcagcagcagtcgtccattagcgcccagcagcagcagcagcagcagtcatcaatctctgctcagcagcagcagcagcagcagcaacagcagcaacagcaacagcagcaacagcaacagcaacagcagcagcagcaacagcaaccaagttcccaacccgcacagtcacttccttcccagcccttgttacggagccctttgccattacagcagaagctcctgctgcagcagatgcagaaccagccaatagccgggatgggttatcaagtgtctcagcagcaaagacaggaccaacactccgtcgtaggccagaatactggtccctcacctagtccaaatccttgctccaacccaaatactggatccggttacatgaactcacagcagtctctactgaaccagcagctgatgggtaagaagcaaaccctccagaggcagattatggaacaaaagcagcagctgctgctgcagcagcagatgttggccgatgcagagaagatcgccccgcaggatcaaattaacaggcacctgagcagaccgcccccggattataaagaccaacgacggaacgtaggtaacatgcaacctactgcacaatatagcggcggatcctcaaccatcagccttaactccaaccaggcactagcgaatcctgtaagcacgcacactatcctgactccaaattctagtctgctgtctacctctcatggcactcgaatgcctagtctcagtactgccgtgcagaatatgggaatgtatgggaatctgccctgtaaccagcccaatacgtactcagtcacatcaggtatgaatcagttaacccagcagcggaatccgaaacaactgctggctaaccaaaacaatccaatgatgcccaggccacccacactaggcccaagcaataacaacaatgtcgcaacctttggtgccggctccgtcggtaattcccagcagctacgccccaaccttacccatagtatggcctccatgcccccacagcggacctcaaacgtgatgatcaccagtaacaccacagccccaaactgggctagtcaagagggtacatcaaagcagcaggaagcactcacctccgccggcgttcggtttccaaccggtacccccgccgcttatacgccaaaccagtctctccagcaggccgtgggatcacagcagttctcacagagggcagtcgctccccctaatcagcttactcctgctgtccagatgcgtccaatgaatcagatgagtcagacgctgaatggtcagaccatgggcccccttcggggattaaacctgcgcccaaatcaactgagtacccagatattacccaatctaaaccagtcaggcactgggttgaatcaaagccgcacagggattaatcagcccccttcactaacacccagcaacttcccatcaccaaatcaaagcagtagagcgtttcaaggtaccgaccactcatccgatctcgcgttcgatttcctttcccaacagaatgacaacatgggcccggcactcaactccgacgccgatttcatcgatagcctgttgaagacagaacctggaaatgacgattggatgaaagacatcaatctcgacgagatacttggcaataacagctag

SEQ ID NO: 123474 - DNA, 1632 bp, synthetic construct
  misc_feature 1..1632: note = Description of Artificial Sequence: Synthetic coding sequence
  source 1..1632: mol_type = other DNA
ttacaagagactgtcaaacggaagttagagggagccaggagcccgctgaacggggatcaacagaatggggcgtgcgatgggaatttctcgcctaccagtaaaaggatccggaaggacatcagtgctggaatggaggccatcaacaatctaccgtctaatatgccactgccctctgctagccccctgcaccagttggacttgaaaccatcgctcccgctccaaaattcagggacacatacgcctgggctgctcgaagatctgtcgaagaatggcagacttccggaaattaagcttccagtcaatggatgtagcgacctcgaggactccttcacaattctgcaaagcaaggatctcaaacaggagcccctcgatgaccccacgtgtatcgacactagtgagacaagcctctcaaaccaaaataaactgttcagcgatatcaacttaaacgaccaggagtggcaagagcttattgatgagttggctaacactgtgcctgaggatgacatccaagaccttttcaatgaggatttcgaggaaaagaaagagcccgagttcagccagcccgcgactgagacgcccctctcccaggagtctgctagcgtgaagagcgatccaagccactcacctttcgcacacgtctctatggggtccccacaagcacgcccatcctcgtcagggcctcccttctcaaccgtttctaccgcgacatctctgccatcagttgcatccaccccagccgcacccaatccggccagctcgcctgccaattgcgcggtgcagtccccgcaaacccccaatcaggcacatacgcctggacaagctcccccgaggcctggtaatggctatttacttaatcctgctgccgtgactgtggctggttcagcaagtggccctgtggcagttcctagtagcgacatgagtccggccgagcagctgaaacagatggccgcccagcagcagcaacgggccaagctgatgcagcaaaagcaacagcaacaacagcagcagcagcagcagcagcaacagcagcagcaacagcaacaacagcagcaacaacagcagcactccaatcagaccagcaactggagccctctgggaccacccagcagtccctatggcgccgctttcactgcagaaaagccaaattcccccatgatgtacccacaggcatttaacaatcagaaccctatagtcccccccatggccaacaatctacagaaaacaacaatgaacaattatcttcctcagaaccatatgaatatgatcaatcagcagcccaacaacttaggcaccaacagtttgaataagcaacataatatactcacatacggtaacaccaagccactcacacattttaacgccgatctcagccaacggatgactcctcccgtggccaaccccaataaaaatcctctgatgccatacatccagcagcagcagcagcagcagcagcagcaacagcagcaacagcagcaacagcagcccccacccccacaactccaggcacctcgcgcccacctctccgaggatcaaaagaggctactccttatgaaacagaagggagtaatgaatcagccgatggcctacgctgctctgccctcccacgggcaggagcagcagcctgttgggtag

SEQ ID NO: 123475 - DNA, 831 bp, synthetic construct
  misc_feature 1..831: note = Description of Artificial Sequence: Synthetic coding sequence
  source 1..831: mol_type = other DNA
atgtctcccgcggagcagctcaaacagatggctgcccagcaacaacagcgggctaagctgatgcagcaaaagcagcagcagcaacagcagcagcagcagcaacagcaacagcagcattctaatcagacttcaaattggtcccccctggggccacccagttccccttacggagcagcttttaccgcagaaaaacccaattcccctatgatgtaccctcaggcgttcaacaaccagaacccgatcgtgcctccaatggctaacaacctacagaagaccaccatgaataattacttacctcagaatcacatgaacatgattaaccagcagcctaataacctggggaccaacagtctgaacaaacagcataacatcctgacttatgggaacacgaaaccgctcacacactttaatgctgacctttcacagaggatgacacctccagtcgccaacccaaataaaaatccactgatgccctacatacaacagcaacagcaacaacaacagcagcagcaacagcagcagcagcagcagcagcccccaccgccccagctccaggcccctagagcccatctgagcgaggatcagaaacgcctgttactcatgaagcagaaaggcgtgatgaaccagccaatggcctacgcagccctccctagccatggacaggtctctgtaaaggtgacgcattctagctcctcttcttgcggtgcctttgattgtagatgcgtcatgttttataaatctaccgtggtcggatccaattgtctgcagaaaactagtctccatccacaggtggttgcacgttttggagtctttttttttcacttcagttag

SEQ ID NO: 123476 - DNA, 3417 bp, synthetic construct
  misc_feature 1..3417: note = Description of Artificial Sequence: Synthetic coding sequence
  source 1..3417: mol_type = other DNA
atgggagatttcgctgcccctgccgccgcagcaaacgggagctccatctgtataaactcttctcttaactcgtccctgggcggggcgggaatcggagtgaataatacccctaactctacccccgccgctccctcttccaatcaccctgctgccggcggatgtggcgggtcgggagggccaggaggcgggtcagctgcagtaccgaagcatagtactgttgtggaacgcctgaggcagaggattgaaggttgtagaagacaccacgttaactgtgagaacaggtatcagcaggcccaggtggagcagttggaactggagaggagggacactgtgtcattgtaccagcggaccctggaacagcgcgctaagaagtccggggcaggaactggaaaacaacagcacccgagcaagcctcagcaggacgccgaagctgcctccgccgaacaaagaaaccacaccctgatcatgctccaggaaaccgtaaagcggaaactggaaggtgcccgctcacctctgaatggagatcagcagaacggcgcttgcgatgggaactttagccccacatcgaaacgcattcgaaaggacatctccgcaggaatggaggccatcaataacttgccttccaacatgcccctcccctctgcctccccgttacatcagcttgatcttaaaccctctcttcctttgcaaaactctggcacacatacccccgggcttctcgaggatctgtccaagaatggccgactcccagaaattaaactccccgtcaacggctgttcagacctcgaggatagcttcacaattctgcagtcgaaggacctgaagcaggaacctctagatgatcccacttgcatagatacttccgagacgtccctatcaaatcagaacaagctgtttagtgatatcaaccttaatgatcaggaatggcaggagctgatagatgaactggcaaacactgtgccagaggatgacatacaagatttgttcaacgaggatttcgaagaaaagaaggagcccgagttctcacagcccgccaccgagaccccattgtcccaggagagtgcatccgtcaaatcggacccatcccattccccgtttgcacacgtatcaatgggctcccctcaggcccggcctagctctagtggtcccccgttctctaccgtgtccacagctacttcactaccaagtgtcgcaagtacaccagcggcacccaatcccgcttcatctccagccaattgcgctgtacagtcgccacagaccccgaatcaagcgcatactccgggacaggcccctccaaggccgggtaacggatacctgttgaacccagccgcagttacggttgccggatctgcttcagggcctgttgccgtcccatcttcggacatgagccctgcagagcaactgaagcagatggccgctcagcagcagcaacgggccaagctgatgcaacagaaacaacaacaacaacagcaacaacagcagcagcaacaacagcagcagcagcagcagcaacaacaacaacaacagcagcactcgaaccagacctctaactggtctcccctaggacctccctcatctccttatggcgcggcatttacagcagaaaaaccgaatagtcccatgatgtacccccaggcatttaataaccagaatccaatagtgcccccaatggccaacaatctccaaaagaccacaatgaacaattacctgccacagaaccacatgaatatgattaaccagcagcccaacaatctgggcacaaatagcttgaacaaacagcacaacattctgacatatggaaatacaaagccactgacacactttaacgcagacctgtctcaacggatgacgcctcctgtggcgaatcccaataagaacccccttatgccatatattcagcagcagcagcaacagcaacagcaacaacagcagcagcagcagcagcaacagcccccccctcctcagcttcaagctccaagagcccacctttccgaggaccagaagaggctgttgctaatgaaacagaaaggtgtaatgaaccagccgatggcttatgccgcgctcccatctcatggacaagagcaacatccagtaggactaccaagaaccactgggccaatgcagagcagcgtcccccctggtagtggcggcatggtcagtggggcctcgcccgccggccccgggtttctgggctcccagccgcaggcagctatcatgaaacaaatgctgatcgatcaaagggcccaactgatcgagcagcagaagcagcagtttctcagagagcagaggcagcaacaacagcagcagcagcaacaaattctggccgaacaacagttgcaacaaagccacctccctcgccagcacttgcaaccccagcggaatccatacccggtgcagcaggttaaccagttccagggctccccacaagacatagctgcagtccgcagccaggctgctcttcaaagcatgagaacctcaaggctgatggcacagaacgctggtatgatgggcatcggcccaagccagaaccctggcacaatggccacggcggcagcccagtccgagatggggctcgcaccttacagtactacccctacctctcagccgggaatgtataacatgtccactggtatgacacaaatgctacaacaccccaaccagtccggcatgagcatcacacataaccaagcacaggggccccggcaacccgcctctgggcaaggggtgggaatggtgtcaggttttggtcagagcatgctggtgaactctgcaattactcaacagcaccctcagatgaaggggcctgtcgggcaggccttgcctcggcctcaggccccacccagattacaatctttaatgggaaccgtgcagcagggagcccagtcctggcagcagaggagcctgcagggtatgcctgggaggacctccggagaacttggaccatttaacaacggtgcttcgtatcccctgcaggcgggccagccccggctgactaaacagcattttcctcagggactaagtcagtcagtcgtggatgcaaatacgggtacagttcggaccctgaatccagctgctatgggacgacagatgatgccgagtcttccaggacaacagggcaccagtcaggccaggcctatggtgatgagtgggctcagccagggcgtgccagggatgccagcgttttcgcagccacccgcacagcagcagatcccaagcgggtcgtttgccccttcgtcacagtctcaggcctacgaaaggaatgcgcctcaggacgttagctataattacagcggcgatggtgccggaggctcatttccgggtctgccggacggggcagatctggtcgactcgatcatcaagggcggcccaggagatgaatggatgcaagagctggatgagctgttcggcaacccctag

SEQ ID NO: 123477 - DNA, 1338 bp, synthetic construct
  misc_feature 1..1338: note = Description of Artificial Sequence: Synthetic coding sequence
  source 1..1338: mol_type = other DNA
gaacaacatccagtgggtctgccacgcactacgggacccatgcagtctagcgtgccccctgggagcggcgggatggtttccggagcttccccggccggacctggttttcttggcagtcagccccaggcggccatcatgaagcagatgttgatagaccagagagcccaattaatcgagcagcaaaagcagcagtttctcagagaacagcgacagcagcagcagcagcagcaacagcagattctagccgagcagcagctacaacaatcccacctcccacgtcaacacttgcagccacagaggaatccctatcctgtgcagcaggtcaatcagttccaaggctcacctcaggatatcgccgccgttcgcagtcaggccgctctgcagtctatgagaacatctaggctcatggcacagaacgccggcatgatgggtatcgggccatcgcagaaccccggaacgatggctacagccgccgctcagagcgagatggggttggccccgtactctactaccccaacttcacagcctggtatgtacaacatgtcaactggaatgactcaaatgctgcagcacccaaatcagtcagggatgtcaatcactcataaccaagcccaggggccccggcagcccgcaagtgggcagggcgtcgggatggtgtccggatttgggcagtccatgttggtaaattctgccattacccagcagcatcctcagatgaaggggcccgtgggtcaggccctccctaggcctcaggcacctcctagattacaaagcctgatggggacagtccagcagggggcccaatcctggcagcagaggtccctgcaaggcatgcctggtcgaacaagtggcgagctagggccgtttaataacggagcctcctatcctctgcaggctgggcaacctaggcttactaaacagcactttccgcagggcctttctcagtccgttgtggacgctaataccggtaccgtccgcacattgaatccagccgctatgggcaggcagatgatgccatcccttcctggccaacaggggactagccaagcgcgtccaatggttatgtctgggttgagtcaaggggtccccgggatgcctgcattctcccagccaccagcacaacagcaaatcccatctggcagctttgcccccagctctcagagccaggcgtacgaacggaatgcccctcaggacgtaagctacaactacagcggggacggagccgggggatccttccccggcctgcctgacggagccgatctggtcgattccattatcaaaggcggccccggcgacgagtggatgcaagaactcgacgagctgttcggcaacccctag

SEQ ID NO: 123478 - DNA, 2325 bp, synthetic construct
  misc_feature 1..2325: note = Description of Artificial Sequence: Synthetic coding sequence
  source 1..2325: mol_type = other DNA
atggacgactggaagtctaggctggtgataaaatcaatgttgccccattttgcgatggttgggaaccgccaggagccaagaaagctgcaggagagtggtaagaagccgagctggatggaggaagaagacctgagctttttatataagagcagccctggcagaaagcaccagggcacagtgaaaagaagacaggaagaggaccatttccagttccctgatatggctgatggaggatatcccaacaagattaaacgcccctgtctggaggatgttacccttgccatgggacctggcgcccacccaagcaccgcctgcgctgaactccaggtaccccctctaaccatcaatccgtcgcccgccgctatgggcgtcgccggacagagcctgctgctcgaaaataatcctatgaacggcaatattatgggctctccattcgtcgtcccccagactacagaggttggcctaaaagggcccaccgtgccctactatgagaagattaatagcgtgcccgcagtggaccaagagttgcaagagctgctcgaagaactcacgaagattcaggacccaagcccgaatgaacttgacctggagaagattctgggcacaaaaccagaggagccattggtgctggatcatccacaggccaccctatcaacaacccctaaaccaagtgtccagatgagccatcttgaatccctagcatcgagcaaggagtttgctagttcttgctctcaagtaaccgggatgtctctccagattccaagctcatccacaggtatttcttattcaatcccttcaaccagcaaacaaatagtctccccctcgtcctctatggctcagagcaagagtcaggtacaagcaatgctgccagtggcattgccgcctctgccagtgccccagtggcaccacgctcatcaacttaaagcgctggcggccagtaagcagggaagcgctaccaagcaacagggtccaaccccgtcctggtctggcctccccccccctggcctgagccccccgtatagacctgtgccgtccccccatcctccccccctcccgcttcctcccccgcctcctccattttccccgcagtcactgatggtttcatgcatgtcttcaaataccctgtccggctcaactctgagaggaagtcccaatgcactgctgagcagtatgacaagctccagtaatgcagccctgggtcccgctatgccctacgctcctgagaagctcccttcacccgccctgactcagcagccccagttcggtccacagagcagtatcctcgctaatctgatgtcctccactataaagacaccacagggccacctgatgtccgctctccccgcttccaatcctggccctagccctccttaccggcctgaaaaactgagttcacccggactgcctcagcagagcttcaccccacagtgttccctgatcagaagtctcacccccacctcaaatttactctcccagcagcagcaacagcagcagcaacagcaacaggccaacgtgatattcaagcctatttccagtaattcatcaaagactctttcgatgatcatgcagcagggtatggccagctccagcccgggtgccaccgaacctttcacattcgggaatactaaacctcttagccactttgtctccgaaccaggacctcaaaaaatgccatctatgcctaccacttctcggcaaccatctttgctccactacctgcagcaacctacacccacccaggcctcaagtgcgactgcatccagtacagcaacggccacactacagcttcaacaacagcagcagcagcagcagcagcagcccgaccactctagcttccttctacagcagatgatgcagcagccacagagattccaaaggtctgtagcaagtgacagcatgcctgcccttccccggcaaggatgttgtcatctcttcgcctggacctccgctgctagttccgtgaagccccagcaccagcatgggaattccttcacctctcgccaggatcctcagcctggggatgtctctccctccaatatcacccacgttgacaaagcctgcaaactgggggaagcccgacaccctcaggtgagtctgggtaggcagcctccctcgtgccaggcactgggatccgaatcttttctgcctgggagtagctttgcccacgaactcgcccgtgtcacttcgtcatattccacaagcgaagctgctccctgggggagctgggaccccaaggcatggcggcaggtccccgctcctctactgccctcttgcgacgccacggcccgagggaccgagattaggtcttacgggaacgatccctag

SEQ ID NO: 123479 - DNA, 411 bp, synthetic construct
  misc_feature 1..411: note = Description of Artificial Sequence: Synthetic coding sequence
  source 1..411: mol_type = other DNA
atggatgactggaagtctaggctggtgatcaagtccatgctgccacactttgctatggtgggaaacagacaagagcccaggaaactgcaggagtctggcaaaaagccctcttggatggaggaagaagacctgtcattcctgtataagagttctccaggccgcaagcaccaaggtacagtcaaacgacgccaggaagaggaccactttcagtttcccgacatggccgatggtgggtatcctaataaaatcaaaaggccgtgcttggaagacgtaacactggccatggggccgggcgcgcatccctcgaccgcctgcgccgaactgcaagttcctcccctgacaataaatccttctccggctgccatgggcgtggcaggtcagtccctcctgctggagaacaatccaatgtag

SEQ ID NO: 123480 - DNA, 2325 bp, synthetic construct
  misc_feature 1..2325: note = Description of Artificial Sequence: Synthetic coding sequence
  source 1..2325: mol_type = other DNA
atggatgattggaagtcgcgactggtgatcaaatcaatgctgccacattttgcgatggtaggtaataggcaggagccgcggaagctccaggagtccgggaagaagcctagttggatggaagaagaggacctctctttcctgtataagagcagccctggccgaaaacaccagggcacagtaaagcggaggcaggaagaggaccactttcagttcccggacatggcggacggcggttacccaaacaagataaagagaccatgtctggaggatgtaaccctggccatggggcccggtgcccatccctccaccgcatgcgcagagctgcaagtcccaccccttaccatcaatccctcccccgccgccatgggcgtcgcaggccagtcattgctgctggagaataaccccatgaacggaaacattatgggttcgccattcgtggtgcctcagactactgaggtgggactaaagggcccaactgtgccatactatgaaaagattaactcagtgcccgcagtggaccaagagcttcaggagttactcgaggagctgaccaaaatccaggacccgagccctaacgagctggacctcgaaaagatactcggcactaaaccagaagagcccctagttctggatcaccctcaagcaaccctgtctacaaccccaaaaccgtcggtccagatgtcacacctggagagtttagcttcatctaaggagttcgcatcatcttgtagtcaggtcactggtatgtccctgcagattcctagttcttcaacaggtatttcctacagcatcccgagtacctccaagcagatcgtaagcccttctagcagcatggcacagagtaagagccaggtgcaagcgatgttgccagtcgccctgccccctctgccagttccccaatggcatcatgcgcatcagctaaaagccctggccgcctccaagcaaggctccgctactaagcagcagggcccaaccccatcatggagtgggctccccccgcctggcctatcccccccataccgccctgtgcccagcccacaccctccccctcttcccttacccccaccaccaccgcccttttcaccccagtctctcatggtgtcttgtatgagtagtaacacattgagcggctccacactcagggggtcaccaaacgccctgctctcatctatgacctccagtagcaacgccgcactcggccctgccatgccttatgccccggaaaaactgccaagtccagcactgacacaacagccgcagttcggaccgcaaagttccatcctggctaatttaatgagctctactattaaaacgccacaaggccatcttatgtccgctctgcctgcctccaaccctggcccatcacctccataccgtcctgagaagctgagctcccctgggctcccacagcagagctttacaccccagtgttctttgattcgatctcttacacctacaagtaacctgctcagtcagcagcagcagcagcagcagcagcagcaacaggcgaacgtgatatttaagccaatcagttccaactcctcgaagactttgtctatgataatgcaacaagggatggcttcttcaagtcctggcgctaccgagcccttcacattcggcaacaccaagccactgagtcactttgtgtccgaaccagggccccaaaagatgccctcaatgccgacaacatctaggcagccatctttgttgcactacctccagcagcccacacctacccaagccagcagtgcaactgcaagctccacagcaacagccacactgcagctccagcagcagcagcagcaacagcagcaacagcctgaccatagttccttcctgctgcaacagatgatgcagcaacctcagcggtttcagaggtccgtcgcctccgatagcatgcccgctctccctagacaaggatgctgccatctgtttgcctggacgtctgcagcttctagcgtgaaaccccaacaccagcacggaaatagctttacctcaaggcaggacccacagccgggcgatgttagccccagcaacatcacgcacgtagacaaagcatgcaagcttggtgaagcgcgtcatcctcaggtttcactagggagacagccgccaagctgtcaggctctcggcagcgaatcgttcctgcctggttctagcttcgcacacgagctcgcccgggtaaccagctcctatagcacatcagaagcggccccctggggctcctgggaccctaaagcatggaggcaggtccccgcacccttattgccctcatgcgatgccaccgctagaggaaccgagatccggagctatggtaacgacccatag

SEQ ID NO: 123481 - DNA, 2250 bp, synthetic construct
  misc_feature 1..2250: note = Description of Artificial Sequence: Synthetic coding sequence
  source 1..2250: mol_type = other DNA
atggacgattggaaatcgaggttggtcattaaaagcatgctgccccacttcgccatggttggcaacagacaagaaccgaggaaactgcaagagtctggaaccgtcaagcgtaggcaggaggaagatcacttccaattccccgatatggccgacgggggatatccaaacaaaataaagcgaccttgtttggaggacgtgacattagccatgggccccggagcccacccaagtactgcttgtgcagaacttcaggtgccccccttgaccatcaatccctcgccagccgcaatgggggtcgccggccagtctctcctgttagagaataaccctatgaacggcaatataatgggatcaccctttgttgtcccccagaccaccgaggttggacttaaaggaccaactgttccatactacgaaaagatcaacagcgtgcctgcggtcgatcaagagctgcaggagctgctggaggagcttacgaaaatccaggatccgtctccaaacgagttggatctggagaaaatcctgggcactaaacctgaggagcctctggtcttggaccaccctcaggccacgctgtccactacccctaaaccatcagtccagatgtcacatcttgagagcctcgcctcatctaaagaatttgcgagttcatgtagtcaggtaacggggatgtccctgcagatcccctcatccagcacaggaatctcttattctatccctagtacctctaagcaaattgtgtcacctagttcaagcatggctcaatccaagagtcaggtccaggccatgttgcccgtggcgttgcccccactgccagttcctcagtggcaccacgctcatcagcttaaagcattggcagcaagcaagcagggtagtgccaccaagcagcagggaccgacaccatcatggagcggcttaccaccgccaggcctgtcaccgccctacagacctgtgccaagtccccatccgccgccccttccactcccccccccgccgcctcccttttctccacagagcctcatggtctcatgcatgtcgtccaatactttgtccggatccacactccgcggctctccgaacgctctgctgtcttctatgacatccagcagcaacgccgccctgggtcctgctatgccgtatgctcccgagaagctgccttcgccagcactgactcagcaaccccagtttggacctcagtcctcaattctcgctaatctcatgagctctacaattaaaacaccacagggacacttaatgtctgctctcccagcctcaaaccccggtccgtcacccccctaccgccccgagaagcttagcagtccagggttgccccagcagtctttcacacctcagtgctccttaatacggtctctaacaccaacaagtaatctgctatcccagcagcaacaacagcagcagcagcagcagcaagccaatgtgatcttcaagccaattagctctaattcctccaagactctgtctatgatcatgcagcagggaatggcgagctcctcaccaggggccaccgagccctttacattcgggaacactaagcctttatcgcattttgtaagcgagcctggcccacaaaagatgccatcaatgcctaccacctcacgccagccctctttgctgcattacctgcagcagccaactccaacgcaggcatcctcagccacggctagttcaactgctaccgcaacgctccagcttcagcagcagcagcagcagcaacagcaacaacctgatcacagcagctttcttttacagcagatgatgcagcagccacagaggtttcaaagatcagtggcatccgacagcatgcccgcgctgccccggcaaggctgctgtcatctcttcgcatggacatccgctgcctcttcggtcaagccccagcaccaacacggcaattccttcacatcccggcaggacccccagccgggcgacgtgagcccaagtaatattactcacgtggataaggcctgcaagctgggtgaagctcgacacccccaagtgtctcttggcagacagccacctagctgccaggccctgggttctgagtcgttcctccccggctcttccttcgcacacgaattggcaagggtgacctcttcatactctaccagtgaggctgccccttggggcagttgggatcccaaggcttggcggcaagtccccgcgcccctcctgccatcatgtgacgcaacagcccgtggtacagaaatacgctcttatggaaacgatccatag

SEQ ID NO: 123482 - DNA, 2997 bp, synthetic construct
  misc_feature 1..2997: note = Description of Artificial Sequence: Synthetic coding sequence
  source 1..2997: mol_type = other DNA
atggatgactggaagtccaggcttgtcatcaaatctatgctgccccacttcgccatggtaggaaataggcaggaaccacggaaacttcaggagtccggaactgtaaagcgtagacaggaggaagaccatttccagttcccagatatggcggatgggggatatcccaacaaaatcaagcgcccttgtctggaggatgtgacactagccatggggccgggcgctcacccttctaccgcttgtgccgagctgcaggtcccccccctgacaatcaatccttctcccgctgcaatgggcgtggctgggcaatccttactgctggagaacaatcctatgaacgggaacattatgggctcaccttttgtggtgccacaaacgacagaagtgggattaaaagggcctacagttccgtactacgaaaagatcaattcagtgcctgcggtagaccaggaactgcaagagctgcttgaggaactcacaaaaatacaggacccaagcccaaatgagctggatcttgagaaaatactgggcaccaaaccggaagagccactggtgctcgatcacccacaggctacacttagtaccactcctaagccctctgttcagatgtcacacctagagtccctggcgagttctaaggagttcgctagcagttgttcccaggtgaccggcatgagcctgcagatcccctcgagctcaactggcatatcctacagcatcccctccacctctaaacagatcgtctcccctagctcctccatggcacagtccaagtcacaggtgcaggccatgcttcctgtcgccctccctcccctcccggtccctcagtggcaccacgcccatcaactgaaggccctggctgcctctaaacaggggagcgcaaccaaacagcagggacctactccatcctggtccggattaccccccccgggactcagtcctccctacaggccagtcccctctccccatccaccacctcttcccctgccacctcccccccctccattctcaccccaatccctgatggttagttgcatgagttccaacacactatccggaagcactctgagaggtagtcccaatgctttgctgtccagcatgacctccagcagcaatgccgccctgggccctgctatgccctatgcaccagaaaagttgccctcgcctgcattgacacagcagccacaattcggaccacagtcaagcatccttgccaacctgatgagcagtacaattaaaacaccacaaggccacctcatgtcagccctgccggccagtaatccagggccctctcctccctataggcccgaaaagttgtcgtcaccaggactcccccagcagtctttcactccgcaatgttccctgattaggagcctgacacccactagcaacctgctgtctcagcagcagcaacagcagcaacaacaacagcaggccaacgtcatttttaagccaatctctagcaatagcagcaaaactcttagcatgataatgcagcagggcatggcctccagttcaccaggcgctaccgagccgttcacattcggcaataccaaaccgctgtctcactttgtgtccgagcccggcccacagaaaatgccaagcatgcctaccacttcgcgacaacctagcctcctgcattacctgcaacaaccaacaccaacccaggcatcctctgctaccgccagctccacggccaccgccaccctgcagctgcaacaacaacagcagcagcagcaacagcagccggaccacagttcctttctgctgcagcagatgatgcagcagccacagcggtttcagcggtccgtggccagcgactcgatgccagccctgccgcgacagcaggaggagcagaggtccggtctgatggctatgacacccgagcgccaaaacgcatacattagtcaacagatgagcccattcgaggcagtccaagagcaagttacctccaagtgctccagaatcaaagcctcgccccccagctctaagcacctcatgcccccacgcaccggcctactgcagaacaatttgagtccgggcatgatccccctgactcgccaccagtcatgtgagggaatgggagtgatcagtcctacactcgggaagcgacaagggatctttaccagcagtccgcagtgtcccatcctcagtcactcgggccagaccccccttggccgtttagatagcgtatgtcaacacatgcaaagccccaaggctactccccccgaggtacctctgcccggattctgcccctcatcccttggtacgcaaagcctctctcctcaccagcttcgccggccatctgttccccgaatgcccactgcgttcaataacgccgcttgggtgactgccgctgctgctgtgaccacggctgtgtctgggaaaactcccctatctcaagttgacaactctgtacagcaacattccccatccggccaagcttgtctgcagcgccccagcgactgggaagcacaggtgccagccgcaatgggcactcaggtgccactcgcaaataatccttccttctctttactggggagccagtcccttcgtcagagtcctgtgcagggacccgttcctgtcgccaatacaacaaagttcctgcaacaggggatggcttcatttagccctctgtcgcccatccagggtattgagcctccctcctacgtcgccgccgccgccacagcagccgctgccagcgcagtggccgccagccagttcccaggccctttcgaccgaaccgatattcctcccgagctacctcctgctgactttttgaggcagccgcagccccccctgaacgacctgatttcctccccagattgtaacgaggtcgatttcattgaggctctcctgaaagggtcctgcgtgtctcccgatgaagattgggtgtgcaatctgcggctcatcgatgatattttggagcagcacgcggctgcgcaaaacgcgacagcacaaaacagcgggcaagtgacgcaagacgccggcgctctttag

SEQ ID NO: 123483 - DNA, 1941 bp, synthetic construct
  misc_feature 1..1941: note = Description of Artificial Sequence: Synthetic coding sequence
  source 1..1941: mol_type = other DNA
atggaggaggaggacctctcatttctctacaaatcaagccctgggaggaagcatcaggggactgtaaagagaagacaggaggaggatcacttccaattccctgatatggccgacggcggctatcccaacaagatcaaaagaccctgcctggaggacgtgaccttggctatgggcccaggtgcgcatccttctactgcatgcgctgaactgcaggtgccccccctgacaattaacccgtcaccagccgccatgggggtggcgggtcagagtttgctgctggaaaacaacccgatgaacgggaatatcatggggtctccattcgtggtgccccagactacggaggtcggcttgaaaggccctactgtcccctattacgaaaaaatcaacagtgtccctgccgttgatcaggagctccaagaacttcttgaggaattgactaagattcaggacccctcccccaatgaattagatttggaaaagatcctgggcaccaagccggaagaaccccttgttcttgaccacccacaggccaccttgtccactacgccgaagccttccgttcagatgtctcacttagagagtctcgcttcatccaaagagtttgcatccagctgctcacaggtgactggaatgtctctgcagatcccctcttcatctacaggaatttcttactccatcccttccacaagtaagcagatagtaagcccatctagctccatggcacaatcaaaatcgcaggtgcaggctatgctgcccgtggcattacctcccctacctgttccccagtggcaccatgcacaccaattgaaggcgctcgccgctagcaagcagggatctgccacaaagcaacaaggccctacgccaagctggagcggactgccccccccaggcctctcacccccatatagacccgtcccgtccccccacccacccccgctgcccctgcctccaccacctcccccttttagtccacagtctctaatggtgtcatgtatgtctagtaataccctctccggctctacgctgcggggctcacccaacgcgcttttatccagcatgactagctcttcaaacgcggcccttggaccggctatgccttatgctccagagaagttgccctcccctgccctgactcaacagccacagttcggaccccagtcgtcgatcttggctaacttaatgagcagtactatcaagaccccacaggggcacctcatgtctgcccttcctgcaagcaaccctggtccctctcctccatacagacccgaaaagctctcaagtcctggcctaccccagcagtccttcaccccccaatgctccttgctgcactatcttcagcagcccacacccacccaagcatcttcagctacggccagcagcactgctacagctactctgcagctgcagcagcaacagcagcaacagcagcagcagcctgaccatagttccttcttacttcagcagatgatgcagcagccacaaaggtttcagagatctgttgcctcagattctatgcccgctctcccccggcagggctgttgtcacctgttcgcatggacgtcagcggcctcaagtgtcaagccccagcaccagcatggaaactcctttacttctaggcaagatccccagccgggtgatgtgagtccctcgaatatcacgcatgtcgacaaagcatgtaaactcggtgaggcgcgtcatcctcaggtgtccctagggagacagccgcccagctgccaggcgctgggctctgagagcttcctgccaggaagtagtttcgcccacgagttggcacgcgtaactagcagctacagcacctctgaggccgcgccgtggggatcgtgggacccaaaagcatggcgccaggtgcctgctccccttctgccctcatgtgatgctactgcccgcggaacagaaattcgcagctatggaaacgacccttag

SEQ ID NO: 123484 - DNA, 645 bp, synthetic construct
  misc_feature 1..645: note = Description of Artificial Sequence: Synthetic coding sequence
  source 1..645: mol_type = other DNA
atgataatgcagcagggaatggcatcgtcgagtccaggtgcgacggaacccttcacttttgggaataccaagcccctatcccatttcgtgagtgagccaggaccgcagaagatgcctagtatgcctaccacctctagacagcctagccttctccattatctgcaacagccaaccccaacccaggcaagttctgcaactgcttcgtccaccgccacagccactttgcagctccagcagcagcagcaacagcagcagcagcagccggaccattcgtcgtttctcctccaacagatgatgcaacagccgcagaggttccagaggtcggtagcctcagactctatgccagccctgccacgccaaacccacgtggacaaggcctgtaagcttggcgaggcacggcacccacaggtgagcttgggacgccagccgccctcttgtcaggcattaggctccgagtccttcctgccaggatcctcctttgcccatgagcttgctcgggtgacgtcttcctactccactagtgaagctgccccatggggaagctgggacccaaaggcatggcgccaggtaccagcccctttattaccctcctgtgatgctaccgcccgaggcaccgaaatacgcagttacggtaatgacccatag

SEQ ID NO: 123485 - DNA, 1956 bp, synthetic construct
  misc_feature 1..1956: note = Description of Artificial Sequence: Synthetic coding sequence
  source 1..1956: mol_type = other DNA
atgaaggactatgatgaactgctgaagtattacgaattacacgagaccattggaactggcggtttcgcaaaggtaaaattggcttgccacatcctgacaggtgagatggtcgcgatcaaaatcatggataaaaataccctgggatctgacttgcctcgaatcaagaccgagattgaggcgttaaagaacctccgccaccagcatatatgtcagctgtaccacgtgctcgagactgccaataaaatcttcatggtgctggaatactgtccaggcggtgaattgtttgactatatcatcagtcaggaccgactaagcgaagaggagaccagagtggtgtttcggcagattgtgagtgcagttgcctatgttcactcccaagggtacgcccatcgcgacttaaaaccagagaatctgctttttgacgagtatcataagctcaaactgatagactttggtctgtgcgccaaacctaaaggcaacaaggattaccacttgcaaacatgttgcgggtcactcgcatatgccgccccagagctgatacagggtaagtcttaccttggtagtgaggcagacgtttggagcatggggatcctgctctatgtgctaatgtgtggcttcctcccctttgatgacgataacgtcatggcgttgtacaagaagataatgcgcggaaaatacgacgtcccgaaatggcttagcccctcaagcatactcctgcttcaacagatgcttcaggtggacccgaagaaacgaatctcaatgaaaaacctcctgaatcacccatggatcatgcaagattacaattatccggtggaatggcagagtaagaatccatttatccatctggacgatgattgtgtaactgaactgtccgtacaccacaggaacaatcgccagaccatggaggatctcatttccctttggcagtacgaccacctgacagccacctacctgctattattagcgaagaaagcccgggggaagccagtcagactgagactctcctctttctcctgtgggcaagctagtgcaacgccctttaccgacatcaaatccaataattggagcctggaagatgttactgcgagcgataagaactacgtcgccgggctgatagactacgactggtgcgaagatgacctctccaccggcgctgccacgccacggaccagccaattcactaaatattggacagagtccaacggcgttgaaagcaaatctctcacccccgccctgtgcagaacccccgcaaacaagttgaaaaacaaggaaaatgtgtacacacctaagtctgccgtcaaaaatgaagaatatttcatgtttccagagcccaagacgcctgtgaataaaaaccagcataaaagagagatcttaacaacaccgaaccggtatactactccatcaaaagccagaaaccagtgcctgaaggagacgccaatcaaaattccggtgaactcaactgggactgacaagttgatgaccggggtgatctctccagagcggcgctgccgtagcgtggaactggatcttaaccaggcccatatggaggagactcctaagcgcaagggtgcaaaagtgttcggttctttggaaagaggcctagataaggtgattaccgtgctcaccaggtccaaacgaaaaggatccgcccgcgacggcccccggaggcttaagttacactacaacgtaacgactacaaggttggtgaaccctgaccaattgctgaatgaaatcatgtcaatactgccaaaaaagcatgtagattttgtccagaagggatacaccctgaagtgccagacacagtcagacttcgggaaggtaaccatgcagttcgagctcgaggtgtgccagctgcaaaagccagacgtggtcggtatacgaagacagcgcttaaagggtgatgcctgggtgtataagagactggtcgaggacattctctcttcatgtaaagtgtag

SEQ ID NO: 123486 - DNA, 1743 bp, synthetic construct
  misc_feature 1..1743: note = Description of Artificial Sequence: Synthetic coding sequence
  source 1..1743: mol_type = other DNA
atgatgaacttctccaacattatgaactacatgaagctgttaggacaatattgcccgggaggcgagctgttcgattatatcatttcacaggatagactatcggaggaggagaccagggtcgtattcaggcagatcgtctctgccgttgcttacgtgcactcacagggctacgctcatcgcgacctcaaacccgagaacctgctgttcgacgaataccataaactgaagctgattgacttcgggctatgtgccaagcccaagggaaataaggactaccacctgcagacttgctgcggctccctcgcctatgccgcccccgagctgatacaagggaaatcctatctcggttcagaagccgatgtgtggagcatgggtattcttctatacgtgctaatgtgcggttttctgccattcgatgatgacaacgtaatggcgttatacaagaagatcatgaggggcaaatacgatgtccccaagtggttatctccatcgtccattttgctattacaacagatgctgcaggtcgatcccaagaaacggatctcgatgaagaaccttttgaaccacccctggatcatgcaggactataattacccggtggaatggcagtctaagaacccctttattcacctcgacgacgactgtgtgaccgaattgtccgtacatcatagaaataacaggcagaccatggaggacctcattagtctgtggcagtacgaccaccttaccgcaacctatcttctgttactcgccaagaaggctaggggcaagcccgtccgcttacgcctctcttctttcagctgtgggcaggcctctgccactccctttaccgacatcaagagcaataattggagtctagaagatgtgacagcctcagacaagaattatgtcgcggggctcattgactacgattggtgcgaagacgacctgtcaacaggggcagccacccccagaaccagccagtttacaaaatactggactgagagtaacggagtggagtccaagagtctcacccctgcactgtgtcgcactcctgctaataaactaaagaacaaggaaaatgtatacactcctaaaagtgcagtcaagaatgaggagtactttatgtttcctgagccaaagactcctgtaaacaagaaccagcataaaagagagatacttacgaccccaaataggtataccaccccaagcaaggctcgcaaccagtgcctcaaagagaccccaataaaaattcccgtcaattccaccggcaccgacaaattgatgaccggtgtgatttcaccagagcggcgatgccgcagtgtggaactcgatctaaaccaggcccacatggaagaaactcccaaaagaaaaggggccaaagtgttcgggtctctggaaagaggactcgacaaagtcattacagtccttacacgcagcaagagaaaggggtctgcaagggacggtccacggaggctgaagttacactacaatgtgaccacaactcgactggtgaacccagatcagctcctgaatgagattatgagtatcctgccaaaaaaacacgtcgatttcgtgcaaaagggatacacactcaaatgtcaaacccagtcggacttcggcaaagtcactatgcagtttgaacttgaagtatgccagcttcaaaagcccgatgtggtggggattagacgccagcgcttgaaaggagacgcctgggtctacaagcgcctcgttgaagatatcctgagcagctgcaaggtgtag

SEQ ID NO: 123487 - DNA, 1812 bp, synthetic construct
  misc_feature 1..1812: note = Description of Artificial Sequence: Synthetic coding sequence
  source 1..1812: mol_type = other DNA
atgaaggattatgacgaactgctgaagtactacgaattgcatgagaccatagggaccggtggctttgccaaagtgaagctcgcctgccacattctgacaggcgaaatggttgctatcaaaatcatggacaaaaatacactgggcagcgacctccccaggattaagactgaaatcgaagccctcaagaacctgcgccatcagcacatatgccaactgtaccatgtgctcgaaaccgcaaacaaaatttttatggtcctggaggaaaacctcctgtttgacgagtaccataagctcaaactcattgattttgggttgtgtgctaaaccaaagggtaacaaggactaccacctgcagacgtgctgcggatccttagcctatgctgccccagagctcatacagggtaagtcttacctgggttccgaggccgacgtttggagcatgggcatccttctctacgtgctcatgtgcggctttttaccatttgatgatgacaatgtcatggcattgtacaaaaagattatgaggggcaaatacgacgtgcccaaatggctgtccccctcttctattctgctcttgcagcaaatgctgcaggtggatcctaagaaacggatctccatgaagaatttgcttaatcacccctggatcatgcaggactacaactatccggtcgagtggcagagcaagaacccctttattcatctggatgacgattgcgtcactgagctatccgtccaccaccgcaataaccggcagacaatggaagatttgatatctctgtggcaatacgaccaccttactgcgacgtacctccttcttttggccaaaaaagcaaggggtaaacctgtgagattgagactttcttctttctcctgtggacaggcttccgccactccttttactgacattaagtcgaataactggtctttggaagacgtgacagcaagcgacaagaattacgtggccggactgattgactatgattggtgtgaggatgacctgagcaccggagcagctacaccccgaactagccaatttacaaagtattggacagagagtaatggagttgagtctaaatctctgacgcctgctctgtgtcggacacctgctaacaagctgaagaacaaggagaatgtttacacacccaaaagtgccgttaaaaatgaagaatatttcatgttcccagagcccaagactccagtcaataagaatcaacataagcgggagattctgacaacaccaaaccggtacacgactccttcgaaagcccgcaaccagtgcctcaaggagaccccgatcaagatacctgtgaattccacaggcacagacaaactgatgactggcgtgatctctccagaaagaagatgcaggtctgtggaactagacttgaatcaagcccacatggaggagaccccaaagcgcaagggcgccaaggtgttcggctcgctcgagcgcgggctggataaggttatcaccgttctgactagatctaagagaaagggaagtgcaagggacggccctcgacgtctcaaactgcattacaacgtaacgaccacacgcttggttaaccccgatcagttgttgaatgagataatgagtattctgcctaagaagcatgtcgatttcgtacaaaaagggtacactctgaagtgtcagacacagagcgatttcggaaaggtgacaatgcagtttgagctggaagtttgtcagctgcagaagccagacgtggtggggatccgtcgtcagcgactgaaaggggacgcctgggtatacaagaggttggtcgaagacatactctcgtcctgtaaggtatag

SEQ ID NO: 123488 - DNA, 1563 bp, synthetic construct
  misc_feature 1..1563: note = Description of Artificial Sequence: Synthetic coding sequence
  source 1..1563: mol_type = other DNA
atggtacttgaagagaacctgctctttgacgagtatcacaagctgaagttgattgattttggactctgtgccaagcctaagggcaacaaggattatcacctccagacttgctgtggctctctggcttacgcggcacctgaactgattcaggggaaaagttatctgggctcagaggcagatgtgtggagcatggggatacttttatatgtcctgatgtgcgggtttcttccattcgacgacgacaatgttatggccctgtacaaaaaaataatgaggggaaaatacgacgtccccaaatggttatcaccatcctcaatccttctcttgcagcagatgttgcaagtggacccaaagaaacgcatctcaatgaaaaacttgcttaaccatccatggattatgcaagactacaactaccctgtggagtggcaaagcaagaatcctttcattcaccttgatgatgactgcgtgacagagctgagtgtacaccaccgaaataaccgtcagacaatggaggacctcattagtctttggcaatatgaccatctgaccgcaacatacctgctgctgctcgcaaagaaggcaagaggaaagccagtcagattgcggctctcatccttcagttgtggccaagcttccgccacccctttcactgatattaaaagcaacaactggagtctcgaggacgtcaccgcctcagacaagaattatgttgcgggcctgattgactatgattggtgtgaggatgacctcagcaccggcgctgcgaccccaagaacaagtcagtttacaaagtactggactgagtccaacggtgtggagtctaaaagccttacccccgccctgtgtcgaactccagcaaataagctgaaaaacaaagagaatgtctatacccccaagtccgccgtgaagaacgaggaatattttatgtttccggagcccaaaacaccagtaaataaaaaccagcataaacgagagatcctgaccaccccaaaccgttatacgaccccctcaaaggcccgtaatcaatgtctaaaggaaacacctatcaaaattcctgtgaattctaccggcacagataaattgatgaccggcgtgattagccccgagaggcggtgtcgatccgtcgagctggatctgaaccaggcccatatggaagagaccccaaaacgcaagggagccaaagtgtttgggagtcttgagaggggattagataaggtcatcaccgtactgaccagaagcaagcgtaaagggtcagcgcgtgatggaccaagacgcttaaaactccactacaatgtaaccactacacgattggtgaaccctgatcagctgttgaacgaaattatgtcaatcctcccgaaaaaacacgtggatttcgtccagaaaggttacacgctaaagtgccagactcagagcgactttggaaaggtgactatgcagttcgagctcgaggtctgccagttacagaagcccgatgttgtcggcatcagaagacagaggctcaagggtgacgcctgggtctataaaagactggtggaggacattctgagctcgtgtaaggtgtag

SEQ ID NO: 123489 - DNA, 1374 bp, synthetic construct
  misc_feature 1..1374: note = Description of Artificial Sequence: Synthetic coding sequence
  source 1..1374: mol_type = other DNA
atgggcattctcctctacgttctaatgtgtggatttttaccttttgacgatgacaacgttatggcactatataagaaaattatgagagggaagtatgacgtgcctaaatggttgagcccctctagcattcttctcttgcagcagatgctgcaagtggacccgaagaagcggattagtatgaagaacctgctgaatcacccatggatcatgcaggattataattatcccgtggaatggcagtctaaaaacccctttattcacctcgatgacgactgtgtgacagagcttagcgtgcaccaccgcaacaataggcaaaccatggaggacctcatatctctgtggcaatatgaccatctgactgccacctacttgttgctgcttgccaaaaaggcacgcggtaagcctgtccgactgcggttatcaagtttttcttgtgggcaggcgtctgcgactccgttcaccgatattaagagtaataactggagcttggaagatgtgaccgctagcgataagaactacgtggccggtttaattgactacgattggtgtgaggatgatctgagcacgggggcggcgacaccccgcactagccagtttacgaagtattggacagagagcaacggagtagaatcaaagtctctgaccccagccctttgccgaacaccagccaacaaactgaagaataaggagaacgtttacactcctaagtctgccgttaaaaatgaagaatactttatgtttccggagcccaagactcctgttaataaaaaccagcataagcgggagatcctcaccacacccaatcgatataccacgccttctaaggccaggaaccagtgcctcaaggagactccgattaaaatccccgtgaattccactggtaccgacaaactgatgactggcgtgatttctcccgagagaagatgtagaagcgtggagctggatctgaaccaagcccacatggaggaaacccccaagcgtaaaggagccaaagtctttggctcactggagagaggattggacaaggtgatcaccgtcctgacaagaagcaagcgaaaggggagtgcgcgggacggacccagacgcttgaaattgcactacaatgttacaaccaccagactggtcaaccctgatcagttgttgaacgagatcatgagtatactgccgaagaaacatgttgattttgtccagaagggctacactctaaagtgtcagacacagagtgacttcgggaaagtgacaatgcagtttgaacttgaagtgtgtcaactccaaaagccagatgtggtcggcatacggaggcagcggctgaaaggtgacgcctgggtatacaagcgtctcgtggaagacatcctcagcagctgtaaggtgtag

SEQ ID NO: 123490 - DNA, 1833 bp, synthetic construct
  misc_feature 1..1833: note = Description of Artificial Sequence: Synthetic coding sequence
  source 1..1833: mol_type = other DNA
atgaaggactacgacgagcttctgaagtactacgagctgcacgaaacaatcggaactgggggctttgcaaaggtaaagctggcctgtcatattctgactggggaaatggtggccattaaaatcatggataagaacacattagggtccgacttacccagaattaagacagagattgaggccctcaagaacctcagacatcagcatatttgtcagctgtatcacgtcctggagacggctaacaaaatatttatggtgctagagtattgccctggcggagaactatttgattatatcatatcccaggaccgattatccgaggaagagacccgcgtggtgttccgtcagattgtgtccgccgttgcttatgttcattcccaggggtacgcacaccgcgatctaaagcccgagaacctgttgttcgatgagtatcataaattaaaactgatagactttggcctgtgtgccaagccgaagggaaacaaagactaccacctacagacctgctgtggctccctggcctatgcagcgcctgagctcatccaaggcaaaagctacctgggctcagaagcggacgtgtggagtatgggcatcctgctgtatgttctgatgtgcggttttttgccttttgatgacgataacgtgatggcgctgtataagaagatcatgagaggtaagtacgacgtgcccaaatggctctccccttcctccatcctgctactgcaacagatgcttcaggtggaccccaagaaaaggattagcatgaagaacctgctgaatcacccgtggatcatgcaggattataactaccctgtcgagtggcagagtaaaaaccctttcatccacctggacgatgactgtgtaacggagctctctgtacaccatcgtaataaccgtcagaccatggaggacttgatatcgctgtggcagtatgaccatttgactgcaacgtacctgctactgttggccaagaaagcccgcgggaagcctgtgcgactgcggctctcctctttctcctgtggccaagcatccgcgactccgttcacagatatcaagtttaccaagtactggacagagagtaatggagtagagtccaagagcctgacccccgcattatgtcgtactcccgctaacaagctaaaaaataaggaaaacgtgtacacccccaaaagcgccgtgaagaacgaggagtatttcatgtttccagagcctaagaccccagtcaataagaatcagcacaagcgggaaattttgaccacccctaaccgctatactacaccctcaaaagccagaaaccagtgtctgaaggagactccaatcaaaatccctgttaacagcaccggcacggacaagctgatgacaggcgtaatatctccagagcgccggtgtcgaagtgtggagctggatctgaatcaggcacatatggaggagacaccaaagagaaaaggcgcgaaggtgtttggctccctggagaggggcctcgataaagtgatcaccgtgctgactaggtccaaacgaaaaggatccgcccgggacggccctcggagattgaagcttcactacaatgttacgacaacaaggctggttaaccccgaccaattactcaacgaaataatgagtatcctcccgaaaaaacacgtcgactttgttcagaagggctatacgctgaagtgtcaaacgcagtccgactttgggaaagtgactatgcagttcgaactggaagtttgtcagctgcagaaaccagatgtcgtcggtattagaagacagcggttgaagggggacgcttgggtttataagcggctcgtagaagatatactgagctcgtgtaaagtgtag

SEQ ID NO: 123491 - DNA, 1860 bp, synthetic construct
  misc_feature 1..1860: note = Description of Artificial Sequence: Synthetic coding sequence
  source 1..1860: mol_type = other DNA
atgatgaacttctcgaacatcatgaactatatgaagcttctgggacagtccgacttgcccaggatcaagaccgagatcgaggcacttaaaaatctgcgacaccagcacatttgtcaactctaccacgtcctggagacggcaaataagatcttcatggtgttggaatactgccccgggggcgagctctttgattatatcatctctcaggacagactcagtgaagaagagacaagagttgtgttccgtcagatcgtgtctgccgtagcttatgtgcattctcagggttacgcccatagggacctcaaaccagagaacctattgttcgacgaatatcacaaactgaagctgattgattttgggttatgcgccaaacccaagggcaacaaggattaccacctccaaacatgttgcggaagcctggcttatgccgctcctgaattgattcaagggaagagctacctgggcagtgaggcggacgtgtggtcaatgggcattctgctgtatgttttaatgtgcggatttttgcctttcgacgatgacaacgtgatggcgctgtataaaaaaatcatgagaggtaagtacgatgttccaaagtggctttctccaagttccattttactcctccagcagatgctccaagtggatcccaagaaacgtatttctatgaaaaacttgctaaatcacccttggatcatgcaggactacaactaccctgtggagtggcagtctaagaacccctttattcacctggatgatgactgcgtgacggagctgtctgtgcaccatcgcaataacaggcagaccatggaagatctaatttcactctggcagtacgatcacctgaccgctacttatctactgctccttgccaaaaaggcaagggggaaacctgtcagattgcgcctcagctcattttcgtgtggacaggcgagcgcgacacctttcaccgacatcaaaagcaacaattggagcctggaagacgtgaccgctagtgacaagaattacgtcgccggcttaattgactacgactggtgcgaggatgacctttcaactggggctgctacacctcgcaccagccagtttacaaagtattggacagaatccaatggggtggagtctaaatccctgacacccgctctttgtaggacacctgccaataaactcaagaacaaggagaatgtctacaccccgaagagcgctgtaaagaacgaggagtactttatgttcccagagccaaaaactcctgtgaataaaaaccagcacaaacgggaaattctgacaactcctaataggtacaccaccccctctaaggctcgcaaccagtgtctgaaggagactcctataaaaataccagtgaacagcaccgggaccgacaaattaatgacaggggtgattagcccagaacgacgctgcagaagtgtggaactggatctgaatcaggcccatatggaggagacacccaagcgtaagggcgcgaaggtctttggatctcttgagcgtggcctggataaggtcatcactgtcttgacccgctcaaagaggaaggggtctgcgcgggacggaccccgtagacttaaactgcactataatgttaccaccacgcgcctggtcaaccccgatcagctactgaatgaaatcatgtcgatcctgccaaagaaacacgtcgactttgtgcagaaagggtatacactgaaatgccagacacagagcgactttggaaaggtcacaatgcagttcgagctcgaggtgtgccaacttcagaaacccgacgtcgtggggattcgccgacaaagattgaagggggacgcttgggtctataaaaggttagtcgaggatatccttagctcctgcaaagtgtag

SEQ ID NO: 123492 - DNA, 1743 bp, synthetic construct
  misc_feature 1..1743: note = Description of Artificial Sequence: Synthetic coding sequence
  source 1..1743: mol_type = other DNA
atgaaggactatgacgagctgctgaaatactacgagcttcacgagaccatcggtacaggcgggttcgccaaagtgaagctggcctgtcacattctgactggcgaaatggttgcaattaagataatggataagaacactcttgggagtgacctgccaaggatcaagactgagatcgaggcactcaagaatctgagacaccagcatatttgtcagctttatcatgtgctcgagacagctaataagattttcatggttctcgaagggaacaaagactatcatttacagacatgctgtgggtcactggcgtacgccgcccccgagctaattcagggtaaatcttacttggggagtgaggcagacgtttggtctatgggcattttgctttatgtgctgatgtgtggcttcctcccttttgatgacgataacgttatggcattgtacaaaaagattatgcgagggaagtacgatgtccccaaatggctgtccccgagctcgatcctccttctgcaacagatgctacaggtcgaccccaagaaaaggatctctatgaagaatctactaaaccatccttggattatgcaggactacaactaccccgtggagtggcaatccaagaatcctttcattcacttggacgatgattgtgtcacagagctaagcgtgcatcatcgaaataacagacagacaatggaggacctgatctcactgtggcaatacgatcatctcactgcaacctatctgctgcttttagccaaaaaggctagggggaagcctgtccgtctgcgcctcagtagtttttcttgcggccaagctagcgccactcccttcacggatatcaagtccaacaactggtcccttgaggacgtgaccgcctctgataaaaactacgtcgcgggactgattgactacgattggtgcgaagacgacttgtcaaccggcgccgccaccccacgaacatcacaatttaccaagtactggaccgagagtaatggcgttgagagcaagtctctgaccccagcgctctgtaggactccggcaaataagcttaagaacaaggaaaacgtatacaccccaaaatcagccgtcaagaacgaggagtactttatgtttcctgagccgaagacccctgttaataagaaccaacataagcgcgagatcctaaccacccccaaccgttacaccacaccttcgaaagctaggaatcagtgcctgaaagagacccccatcaaaatccccgtgaacagcaccggaaccgataaattgatgaccggcgtgatttccccagaacgccgttgcaggtctgtggaactagatctgaaccaggcacatatggaggaaacgcctaagcgtaagggagctaaagtttttgggagcctcgagcgcggtcttgacaaagtgattacagtgcttacaaggtccaaacgtaagggaagtgccagggacgggcctaggagactcaaactacattacaacgtcaccactactcggcttgtgaatccagatcagctgctgaacgagatcatgagcattcttcctaagaaacatgtggactttgttcaaaaaggatatactctaaagtgccagacccaatcagatttcgggaaagtgactatgcaatttgagctggaggtgtgccagctccagaagcccgacgttgtgggtatccgccggcaaaggctgaagggcgatgcgtgggtgtacaagcggctggtggaagatattctatcttcatgtaaagtatag

SEQ ID NO: 123493 - DNA, 1491 bp, synthetic construct
  misc_feature 1..1491: note = Description of Artificial Sequence: Synthetic coding sequence
  source 1..1491: mol_type = other DNA
atgcgagttctgagcggcacctctcttatgctatgttccctgctattattgctgcaggcattgtgttctccagggctagcaccacagagccgggggcacctatgcagaacgaggcccacagatctagttttcgtggtcgattctagtcgaagcgtgcggcccgtggagtttgaaaaggtgaaggtctttctctcacaggtgatagagtccctggatgtaggaccaaacgccacaagggtcggcatggtgaattatgcttcgacagttaagcaggagtttagcttgagagctcatgtttcaaaggccgcgttattgcaggctgtccgtagaatccagccgttgtccacgggtaccatgacaggtctggccatccagttcgccattaccaaagcttttggcgatgctgaaggggggcgaagccggtcacctgatatctccaaggtcgtaatcgtggttactgacggtagaccccaggatagcgttcaggatgtgtccgcccgtgctagagctagcggtgtggaactgttcgccatcggcgtaggttctgtagacaaggccaccttgcggcagatcgcatcggaacctcaggacgaacacgttgactacgttgagtcgtactccgtgatcgaaaagttgtccaggaagttccaggaagcattctgcgttgtatctgacctttgtgctaccggggaccacgactgcgagcaggtgtgcatttcctccccgggatcttatacatgcgcctgccatgaagggtttactttgaattccgacgggaaaacctgcaatgtctgcagcggcggcgggggtagtagtgctacagatttagtctttttgattgacggatcaaagtccgttcgcccagagaacttcgagcttgtgaagaagttcatcagccaaatcgttgacacccttgacgtcagcgataaactggcccaggttgggctcgtccagtactcttctagtgtaagacaggagttcccgctggggagatttcacaccaaaaaggacatcaaggcagccgtgcggaacatgtcatatatggagaaagggactatgacaggcgctgcccttaaatacctcatcgacaattcctttactgtgagtagtggcgcccggcccggagctcaaaaggtcggcatcgtgtttacagatgggaggagtcaagactatatcaatgacgccgctaaaaaggccaaagacctcgggtttaagatgttcgctgttggcgtgggcaacgccgtggaagacgaactgcgggagatcgcaagtgaaccagtggcagagcactatttctacaccgccgatttcaagaccatcaaccagatcggtaagaagcttcagaaaaaaatctgtgtggaggaggatccctgtgcttgtgagagcctggtgaaatttcaggccaaagtcgaagggttattgcaggctctgacgcggaagttagaagccgtttctaagagacttgcaattctggagaatactgtagtttag

SEQ ID NO: 123494 - DNA, 2874 bp, synthetic construct
  misc_feature 1..2874: note = Description of Artificial Sequence: Synthetic coding sequence
  source 1..2874: mol_type = other DNA
atggaaaagatgctggctgggtgttttttgctgatactgggacagatcgtccttttacccgcagaagcccgcgagagatcccgtggccgaagtatttcacgggggagacacgcacggactcacccccagacagctttgctcgaatccagctgcgaaaataagagggctgatcttgttttcatcattgacagcagtagaagtgtgaacacccacgactacgctaaagtgaaagagtttatcgtggacatcctccaattcctcgacatcggacctgacgttacgcgcgtgggattgctgcagtacgggtctaccgtcaagaacgagttttccctgaaaacatttaaacgaaagtccgaagtggagagagccgtcaagaggatgcggcatctgtctaccggaactatgaccggactagctatccagtacgcactgaacatcgcattttccgaggcagagggagccagacctctgcgggagaatgtgccccgcgttatcatgatcgttactgatggccgtccccaggattcagtggcagaggtggcagcaaaagccagggacacgggaatattgatctttgcgatcggcgttgggcaggtggatttcaacactctgaagtcaatcgggtccgaaccacacgaggaccatgtgtttttggtcgctaatttttcacagatcgagactctcaccagtgtcttccaaaagaagctgtgcacagctcacatgtgtagcaccctcgagcacaattgtgcacatttttgtattaacattcctggatcatacgtttgtcgttgcaagcagggatacatccttaactccgatcagaccacatgtcgaatccaggatttatgtgcgatggaggatcataactgtgagcagctctgtgtgaacgttcctggctcatttgtatgccagtgctactctggctatgcacttgctgaagatggcaaaagatgcgtagctgttgattactgcgcatctgaaaaccacggatgcgaacacgagtgtgtcaatgccgacggatcctacctttgccaatgccacgaaggtttcgcactgaacccagataagaaaacctgcaccaaaatcgactactgtgctagctccaaccacggctgtcagcacgaatgcgttaataccgacgacagctacagctgtcattgtctgaagggatttaccctgaaccctgacaaaaagacttgccgccggataaattactgtgctctcaacaaacctggctgcgagcatgagtgtgtaaacatggaggaatcctattactgtagatgtcatcgggggtatactctcgaccccaacggcaaaacctgctcccgcgtggatcattgcgcccagcaggaccatggctgtgaacagctgtgcctcaacaccgaggactcctttgtttgtcagtgtagcgaggggtttctcattaacgaggacctgaaaacatgctctagagtggactattgcttgctgagcgaccacgggtgtgaatactcgtgtgtcaacatggacaggtcttttgcctgccagtgtcccgaaggccatgtgctgcgatcagatggaaaaacttgtgcaaagctcgactcgtgcgccctcggggatcacggatgcgagcatagttgcgtgagcagcgaggacagttttgtttgtcagtgttttgagggctacatcttgcgggaagatggcaagacgtgtcgtagaaaggatgtatgccaggctatagaccacggatgtgaacacatctgcgtgaactccgacgacagttatacatgcgaatgcctggaggggttccgcctggccgaggatgggaagcgttgccgcaggaaagatgtgtgcaaaagtacccaccacggctgcgaacatatctgtgtgaacaatgggaattcctacatctgcaagtgtagtgaagggttcgtgctggctgaagacggtcggcggtgcaagaagtgcacagaggggcctattgaccttgtctttgtcattgatgggagcaaaagcctgggcgaggagaactttgaggtggtaaagcagttcgtgaccggcataatcgacagcttaactatctctccaaaagctgcccgcgtgggactgctccagtactccactcaggtgcacactgagttcaccttacggaactttaacagcgcaaaggacatgaagaaagctgtcgcccacatgaaatacatggggaaagggtctatgaccggcctagccctgaagcacatgttcgaaagaagcttcacacaaggggagggcgctcgcccactgagcacacgtgtgcctagggccgcgattgtgttcacagatggcagggctcaggacgatgtgtccgaatgggcgagtaaggccaaggcgaacggaataaccatgtatgctgtgggcgtcggcaaggccatagaggaggaactgcaggaaattgctagcgagcccactaacaagcatctgttttacgcggaggacttctccacgatggacgaaatttcggagaagttgaagaagggaatttgtgaggccctcgaggacagtgacggccggcaggactcacctgccggagaactgcccaagactgtccagcagcccaccgaatccgagcccgtgacgataaacattcaggacctcctttcttgttctaacttcgccgtgcagcaccggtatctcttcgaggaggacaacctcctgcgttccacacagaagctgtcccattctaccaaaccctctggaagtccactcgaggagaaacatgaccagtgcaagtgtgaaaatttaatcatgttccaaaatcttgctaatgaagaagtccgcaagttaacccaaagactgttggaagaaatgactcagcggatggaagctctagagaataggctgcgataccgttag

SEQ ID NO: 123495 - DNA, 2754 bp, synthetic construct
  misc_feature 1..2754: note = Description of Artificial Sequence: Synthetic coding sequence
  source 1..2754: mol_type = other DNA
atggagaagatgctggctggctgttttctcctgattctgggccaaattgtcctcttacctgcagaggctcgtgagaggagtcgaggacggtctatctcacgaggacggcacgctcggacgcatccgcagaccgcgctcctggagtccagctgtgaaaacaaaagagcagacttggtgttcatcatcgatagctctagaagtgtcaacacccacgattacgcaaaagtgaaggaatttatcgttgatatactgcaatttctcgatatcgggcctgatgtcacaagagtgggtctgctgcagtacgggtcaactgttaaaaacgaattttccctgaagacatttaagcgcaagagcgaggttgaaagagccgtgaagcgaatgcgccatctatccacaggtaccatgactggcttggccattcagtatgctttgaatatcgctttttcagaagccgagggtgcacgtcccctcagggaaaatgtaccccgggtcatcatgatcgtgactgacggacggccacaagatagtgtcgccgaagtggctgctaaggcgcgggacaccggcattctgatttttgccatcggggtgggccaggtggactttaacacgctcaagtcaatcggctccgagccacacgaagatcacgtgtttctggttgcaaacttctctcagatcgaaacactgactagcgtgttccagaaaaagctatgcacagcccatatgtgttctacactcgaacacaactgcgcccatttctgcatcaacattccaggatcttacgtttgtaggtgcaagcagggctacatcttaaacagcgaccaaacaacatgccgaattcaggatttgtgtgcgatggaagaccacaactgcgaacagctgtgcgtcaacgtgcctggttcattcgtatgtcagtgttactccgggtacgccttggcggaagacggcaagcgatgcgtggccgtggactactgtgctagtgaaaaccacggatgcgaacacgagtgtgtcaacgctgatggaagctatctgtgtcagtgtcatgagggctttgctctgaaccctgataagaaaacctgtacccggatcaactactgcgccctaaacaaaccaggttgcgagcacgagtgcgtcaacatggaggaaagctattactgtcgctgtcatcggggatacaccctcgacccaaacgggaagacctgtagtagagtggaccattgcgcccaacaggaccatggttgtgaacaactctgtcttaataccgaggactcttttgtgtgtcagtgctcggagggttttcttatcaatgaggacctaaaaacatgctctcgagtcgactactgtttactgagcgaccacggctgcgaatactcctgcgtcaacatggaccggagcttcgcttgccagtgcccagagggacacgtcctcagaagcgacggaaaaacttgcgctaagctcgactcatgcgcactaggggatcacgggtgtgaacactcctgcgtctcatctgaagacagttttgtgtgtcaatgctttgagggctacatcctccgggaagacgggaagacctgtcgtagaaaagacgtgtgtcaagcgatcgaccatggctgtgaacacatctgcgtgaactcagatgactcatacacttgcgagtgcctggagggatttaggctggcagaggatgggaagaggtgccgccggaaagacgtctgtaaatcaacacatcacggatgcgagcacatctgcgtcaataacggcaactcatatatctgtaaatgttctgaaggatttgtccttgctgaggacggacgaaggtgtaaaaaatgtacagaaggacccatcgatcttgtttttgtgatcgacgggagcaagtccctgggcgaggaaaacttcgaagtcgtgaagcagtttgttactgggatcatcgacagcctaacaatttcgcctaaggcagccagagtgggcctcctccagtattctactcaggtgcacaccgaattcaccctgcgaaattttaatagcgcaaaggatatgaaaaaggcagtcgcccacatgaaatatatgggcaaggggtccatgacaggcttggccctgaagcacatgttcgaaaggagcttcactcagggggaaggcgcgaggccgctgtcgacgcgcgtgccccgagctgcgatagtcttcacagacggccgcgcacaggacgatgtgtctgagtgggccagtaaagcgaaggccaacgggatcacaatgtatgctgtgggagtcggaaaagccattgaggaagaactgcaagagattgcatctgagccaactaataaacacctcttttacgccgaggatttttccaccatggacgaaatctccgagaagctcaaaaaagggatttgcgaggcgctggaggattccgatggtcggcaggatagcccggctggcgagctaccgaaaactgtccagcaaccgacagaaagcgagcctgttaccataaacatacaagaccttctctcctgttccaactttgccgtgcaacaccgatacttgttcgaggaggataatcttctccgctctacgcagaaactatcacactccactaagccttccggaagcccactcgaggagaagcatgaccagtgcaagtgtgaaaacctgattatgttccagaatctggccaacgaggaagtccggaagttaactcagcgctacctgcttgaagagatgacccaaagaatggaagccctggagaatcgcttgcggtatcgttag

SEQ ID NO: 123496 - DNA, 348 bp, synthetic construct
  misc_feature 1..348: note = Description of Artificial Sequence: Synthetic coding sequence
  source 1..348: mol_type = other DNA
atggaagaccacaactgcgagcaattgtgcgtgaatgtgcccggctcttttgtgtgtcagtgttatagtggttacgccctcgccgaggacggcaaacgatgtgttgcagtagattactgcgcaagcgagaatcacggttgcgaacacgagtgtgtcaacgcagacggctcatatctctgccaatgtcacgaggggtttgctctgaatcccgataaaaaaacgtgtacgaagatcgattattgcgcaagcagcaaccacggctgtcagcacgagtgcgtaaatacagatgacagctacagttgccactgcctgaagggatttaccctcaatcctgacaagaaaacctag

SEQ ID NO: 123497 - DNA, 2871 bp, synthetic construct
  misc_feature 1..2871: note = Description of Artificial Sequence: Synthetic coding sequence
  source 1..2871: mol_type = other DNA
atggagaaaatgctagccggctgcttcctacttattctcgggcaaatagttcttctcccagccgaggcgcgggaaagatcccgcggccgatccatatccagagggcgtcacgctcgaactcaccctcaaaccgcgttactggagagtagctgcgaaaataagagggcagacctggtattcatcatcgactcttcaagaagcgtgaatactcacgactacgcgaaagtaaaggagttcatcgtggacatcttacaatttttagacatagggcctgacgtgacgagagtgggactcttacagtacggctctaccgttaaaaacgaatttagtttgaaaaccttcaagcgcaaaagcgaggtagagagggcggtgaaacgcatgagacacctgagcacgggcaccatgaccggattggcaatacagtatgcgcttaatatcgctttcagtgaagccgagggcgcccggcccttgcgtgaaaatgtgcctcgagttataatgatcgtgacggatggtagaccgcaggatagtgtggcggaggtcgccgccaaggccagggatacaggcattctcatcttcgcaatcggagtgggccaggtcgacttcaacactctcaaatcaattgggagcgagccccatgaggaccacgtgtttctcgtggcaaatttctcgcaaatcgagactctgacttctgtgtttcagaaaaaactctgtaccgctcacatgtgtagcaccttggagcataattgcgcacacttttgcattaatatacccggctcttatgtttgtaggtgtaaacagggctatatcctcaactccgaccaaacaacatgccgtatccaggacctttgtgcgatggaagaccacaattgcgaacagctgtgcgttaacgttccgggaagcttcgtgtgtcaatgctactccggttatgccctggcggaggacggcaagaggtgcgtcgccgtggactactgtgcatctgaaaaccacggctgtgaacacgaatgtgtaaatgctgacggatcctatctatgccagtgtcacgaggggttcgctctgaatccagacaagaagacctgcacgaagatcgactactgcgcaagctcaaaccatggctgtcagcacgaatgcgtgaataccgacgacagctactcctgtcattgcttaaaaggtttcaccctcaacccagacaagaaaacgtgtaggcgtatcaactactgtgctctgaacaagcccgggtgcgagcacgagtgcgttaacatggaggagagttactactgccgctgccatagaggctacactctggatcccaatggaaagacctgttcccgggtcgaccattgtgctcagcaggaccatggctgcgagcagctatgcctcaacacggaggacagttttgtgtgccagtgttccgaaggcttcctcatcaacgaggacctgaagacctgtagtagggtagactactgcctgctcagcgatcatggttgtgagtattcttgtgtgaatatggacagatcctttgcatgtcagtgccctgaaggacacgttctgcggtccgatggaaagacctgcgcaaagctagattcctgcgccctgggcgaccacggttgcgagcattcatgcgtgagttctgaagactcatttgtatgccagtgtttcgaaggttatatcctccgcgaagatggaaagacctgtaggcgaaaggacgtgtgccaagccatcgatcatggctgtgagcacatatgcgtaaacagtgacgacagctacacttgtgagtgtctcgagggctttcgtcttgcagaggacggtaaacggtgcagaagaaaagatgtatgcaagtccacacaccacggttgcgagcatatctgtgttaataacggtaactcctacatctgcaaatgctctgaagggttcgtgctcgcggaggacggacgtcgatgcaaaaagtgcacggaaggtcctattgatctcgtgttcgtgattgacgggtctaaatcactgggcgaagagaattttgaggtcgttaagcagtttgtcacaggaattattgacagcctgacaatctcccctaaagccgcacgagtgggcttgttacagtattccacccaggtccacacagagttcacactgcgaaattttaactcggccaaagatatgaaaaaggccgtcgcacacatgaagtatatggggaaaggtagcatgaccggacttgctttaaaacatatgttcgagcgctcctttacacagggggagggagcccgacccctttcaacccgggtgcctagggcggccattgtgtttaccgacggacgcgcacaggatgacgtgtcagaatgggcatccaaggcgaaggcgaacggtattaccatgtacgccgtcggcgtgggaaaagcaatcgaggaggaattacaggagatcgccagcgaacctaccaataagcacttgttctacgcagaagacttttctacaatggacgagatcagcgaaaagctcaaaaaggggatctgcgaggcgctggaagattcagacgggaggcaggacagtccagcaggagagttgccaaaaaccgtgcagcagccaacggaaagtgaacccgtgaccataaacatccaagacctcctgtcttgctcaaatttcgccgttcaacaccgatatctgttcgaggaagataacttgctgcggagtacccaaaagttaagccactccaccaaacccagtggttctcccctagaggagaaacatgaccagtgtaaatgcgagaatctgatcatgttccaaaatctagccaacgaggaggtgcgcaaactcacacaaaggctagaagaaatgacccagagaatggaggctctggagaaccgcttgcgctatcgctag

SEQ ID NO: 123498 - DNA, 2814 bp, synthetic construct
  misc_feature 1..2814: note = Description of Artificial Sequence: Synthetic coding sequence
  source 1..2814: mol_type = other DNA
atggagaagatgctggcaggctgctttttgcttatcctgggacagattgtcctgctgccagccgaggctagagagagatccagaggtcggtccattagcaggggccgacacgccaggacgcatccacagactgctctgcttgagtcctcgtgcgaaaacaagcgagcggaccttgtgttcattattgacagctctagaagtgtgaatactcatgattacgcaaaggtgaaagagttcattgtggacatccttcagttcctggatattgggcctgacgttactagagttggactcctccagtacggatctactgttaagaatgagttttccttaaagaccttcaaacgcaagtcagaagtcgagagggccgtgaagcgcatgagacacctgagcaccgggactatgacaggcttagccattcagtacgctctcaacatagcattcagcgaggctgagggtgcccggcccctacgcgaaaacgtacccagagtaatcatgatcgtgacagacgggcggccgcaggatagcgtggccgaggtggccgctaaggcccgcgataccggcattcttatatttgccattggcgtgggacaggtggatttcaacacactaaaatctataggctcagaaccccacgaggatcatgtcttcttggtagccaacttctcccaaattgaaacgctaacatcggtatttcaaaaaaaactgtgcacagctcacatgtgtagtactttagaacacaattgtgcccacttttgcataaatattcctggaagctatgtctgcaggtgtaaacaggggtacatactgaattcggaccagacaacctgtaggatccaggacttgtgcgctatggaagatcacaactgtgagcagctgtgcgtgaacgtgcccgggtccttcgtgtgccagtgttacagcggttacgcactcgctgaggatggcaaacggtgtgttgctgttgattattgcgcgtcggagaatcacggatgtgagcatgaatgcgtgaatgctgatgggagttacctgtgccaatgccacgagggattcgcactgaatcccgacaagaaaacatgcaccaaaatcgactactgtgctagtagtaaccatgggtgccagcatgagtgcgtgaacacggacgattcatatagttgtcactgcctgaaaggattcacactcaacccagataagaaaacttgtagaagaattaattactgtgccttaaacaagcctggctgcgaacatgagtgtgtgaatatggaagagagttactactgcagatgtcaccgcggatacaccttggatcctaatgggaaaacgtgctcccgagtcgaccactgtgctcaacaggatcatgggtgtgaacagctgtgtctgaacaccgaggacagctttgtgtgccaatgttcagaaggcttcctgatcaatgaggatcttaagacatgtagccgagttgactactgcctgctgtcagatcacgggtgcgaatatagttgtgtgaatatggacaggtcctttgcctgtcagtgtcccgaggggcatgtgttgcggtccgatggcaaaacgtgtgccaagctcgatagttgcgccctcggcgatcacggatgcgagcattcttgcgtgtcttcggaagacagcttcgtgtgtcagtgctttgaaggctatatattgagggaggacggaaagacttgtcgtaggaaagatgtgtgtcaggctatagaccatgggtgtgaacacatctgtgtgaacagcgacgactcttacacttgcgaatgtctggagggtttccgtctcgctgaagatggaaagaggtgcaggaggaaagatgtttgcaagtcgactcaccacggttgcgagcacatctgcgtaaacaacgggaacagttatatttgcaaatgtagcgaggggttcgtgctggctgaggacggacgcaggtgtaagaagtgtaccgagggtccgatagaccttgtatttgtgatagatggtagcaagagtctgggagaggaaaatttcgaagtggtaaaacagttcgtgactggaatcattgactcgcttacaatcagtccgaaggcagccagagtaggcctcctgcagtacagcacccaggtgcataccgagttcacactgcggaacttcaactctgccaaggatatgaaaaaggccgttgctcatatgaagtacatgggaaagggttccatgactgggctagcacttaaacacatgtttgagcgtagttttactcaaggggaaggtgcaagaccactctcaacacgggttccccgcgccgccattgtgtttaccgacggcagagcccaagacgatgtgtccgaatgggctagcaaggcaaaggcgaatggaatcaccatgtacgcagtaggagtcgggaaggctattgaagaggaattgcaggagatcgccagtgagccaaccaataagcacctattctacgcagaggacttcagcaccatggatgagatctctgaaaaacttaagaagggtatttgcgaggctctggaggatagcgacgggcggcaggatagtcccgcaggggagctacctaagaccgttcagcagccgacagtccagcacagatatctgttcgaggaagacaatcttctgaggtccacacaaaagcttagtcactccaccaagcccagcggatccccactggaggaaaagcatgatcagtgcaagtgcgagaacctgattatgttccagaacctggctaatgaagaggtgagaaagctgactcaaaggctcgaggagatgactcagcgcatggaggccctggagaacagattacgttatcgctag

SEQ ID NO: 123499 - DNA, 2019 bp, synthetic construct
  misc_feature 1..2019: note = Description of Artificial Sequence: Synthetic coding sequence
  source 1..2019: mol_type = other DNA
atggaggatcacaactgtgagcagctgtgtgtgaacgtacctgggtcatttgtctgccaatgctacagcggctacgccctggccgaggatggtaagagatgcgtagcagtagattactgtgcgagtgagaaccatgggtgcgaacacgagtgcgtgaatgctgacggaagttatttgtgccagtgtcacgagggatttgcgctcaatcccgataagaaaacctgtacgaaaattgattattgtgccagctcaaatcacggctgccagcatgaatgtgtgaataccgatgactcttactcgtgccactgtctaaaaggctttactcttaatccagacaagaagacttgcaggaggatcaattactgcgccctgaataaaccaggttgcgagcacgagtgcgtcaatatggaagagagctactactgtcgatgccataggggttatactctggaccctaatggcaaaacatgctctcgggtagatcactgtgctcaacaggatcatgggtgtgaacaactgtgccttaataccgaggactcctttgtgtgtcagtgttcagagggctttctgatcaatgaggacctgaaaacatgctcccgcgtggactactgcctgctcagcgatcacggctgcgagtacagttgtgttaacatggatcggtcttttgcttgtcagtgtcccgaggggcatgtgttgagatctgacggcaaaacgtgcgccaaactagactcttgtgccctgggagaccacggctgtgagcactcctgcgtgagcagtgaggactccttcgtgtgccagtgctttgagggctatattctccgcgaagacggcaagacatgtcgtcggaaggacgtgtgccaggctatcgaccacggctgcgagcacatctgtgtaaactcagacgatagctacacttgtgaatgcctggaaggctttcgcctagcagaggacggcaagcggtgtaggcgcaaagacgtctgcaagagcacccaccacggctgcgagcacatttgcgtaaataacgggaactcatacatttgtaagtgctcagaggggtttgtgcttgccgaggatggtcgcagatgcaaaaagtgtaccgaggggccaatcgatcttgtgttcgtcatcgatggtagtaaaagtctgggggaggaaaactttgaagtggtgaagcaattcgtgaccgggatcattgactctcttactatttcccccaaagccgcacgcgttgggctgctccagtattctacgcaagtgcatacagaattcacactgaggaattttaacagcgccaaggatatgaagaaagccgtagcccacatgaaatacatgggtaaggggagtatgaccgggctggccctgaagcacatgttcgagaggtcatttacgcagggagagggcgcgcgccctctgagtacccgagtcccgcgcgcagctatcgtcttcactgacgggcgtgcacaggatgatgtgagcgaatgggcctctaaagctaaagctaatggcattacaatgtatgccgtgggcgtgggtaaggcgattgaagaagaactccaggagatagccagtgagccaactaacaagcatctgttttacgctgaggatttttcaactatggacgagatttccgagaagctgaaaaagggcatttgcgaagccttggaagacagcgatggcaggcaggacagtcccgctggcgagctgcctaaaacagtgcagcagccaactgagtcagaacctgtgacgattaatatacaggacctcctgtcttgctctaacttcgcggttcagcataggtatctgttcgaggaggataatctcctcaggtctactcagaagctctctcactccaccaagccctccggttcccccttggaggagaaacatgatcagtgcaaatgcgaaaacttaattatgtttcaaaatcttgccaatgaagaggtgcggaaactgacacaaaggctggaagaaatgacccagcgaatggaagccttagagaacaggctgcgttataggtag

SEQ ID NO: 123500 - DNA, 2748 bp, synthetic construct
  misc_feature 1..2748: note = Description of Artificial Sequence: Synthetic coding sequence
  source 1..2748: mol_type = other DNA
atggaaaagatgctggctgggtgttttttacttattcttggccagatagtccttctgccagccgaagcacgcgagcgctcacggggccggtctatctccagagggaggcacgctcggacacaccctcagaccgctctgctcgaaagctcttgtgagaacaagcgggccgatcttgtgttcatcatcgactcttcccggtcggtcaacactcatgattacgccaaagtgaaagagttcatcgtggatatactgcagttcctcgatattgggcccgacgtgacccgtgtcggcctgcttcagtatggatcaaccgttaaaaacgaattttccctcaaaacttttaagcggaagtctgaggtggagcgcgccgtcaagcggatgagacatctgtccactgggaccatgactgggctggcaatacagtacgctctgaacattgccttctctgaggctgagggggccaggcccttacgcgagaacgtcccgagagtgatcatgattgtgacggacgggaggccccaagacagtgtagccgaggtagccgctaaggcccgtgataccggtattctgatcttcgctattggggtggggcaggtcgatttcaacacccttaagagcataggttccgagccacacgaagaccacgtgttcctggtcgccaatttcagccagatcgaaaccctgacatctgtatttcaaaaaaagctttgcactgctcatatgtgctcaaccctcgagcacaattgcgcgcacttctgcatcaacattccaggctcttatgtttgtagatgcaaacaggggtatatccttaattctgaccagacaacatgtcgaatacaagacctttgtgctatggaagaccacaactgcgaacagctttgcgtgaacgtgccaggctccttcgtgtgccagtgctacagcggctacgctctagccgaggacggaaaaagatgtgttgcagtcgactattgcgcttccgagaatcacggctgtgagcacgaatgcgtaaacgctgacggatcctatttgtgtcagtgtcatgaaggattcgcactgaatccagacaagaagacgtgtacaaggataaactattgcgcccttaataaaccgggctgcgaacatgagtgtgtgaatatggaagagagctactactgtcgatgtcatagaggctatacactcgaccccaatggcaagacatgtagtagagtggaccattgcgctcaacaggatcatggctgtgaacaactgtgtctgaatactgaggattcatttgtttgccagtgttcagaggggtttctcataaatgaggacttgaagacctgctctagagtagattattgcctgctttcagatcatgggtgtgagtactcatgcgtgaatatggatcgaagtttcgcttgccagtgccctgaagggcacgttcttcgctcagatgggaagacatgcgcgaagctggactcctgcgcactcggagatcatgggtgtgaacacagctgtgtttctagtgaagattcatttgtgtgccagtgctttgagggttatatccttagggaggacggaaagacttgcaggagaaaggacgtgtgccaggcaatcgatcatggctgcgagcacatctgcgtcaactcagacgattcttatacctgcgagtgcctagagggttttcggttggccgaagacgggaagcgatgtaggcgtaaggacgtctgtaagagcacccaccacggatgcgaacacatttgtgtcaataacggcaactcttatatctgtaaatgtagcgaaggctttgtgttagccgaggatggaagaagatgcaaaaagtgcacggagggccctatcgaccttgtcttcgtgatagatggctccaaatcgttgggcgaagagaatttcgaagttgtcaagcaatttgtgacaggtatcattgatagtctgaccatttccccaaaggcagcacgggtgggccttttacagtactccacccaggtacatactgagttcacattgcgaaattttaatagcgccaaggacatgaagaaagctgttgcccacatgaagtacatggggaaagggtcaatgaccggacttgcactcaagcacatgttcgagcgtagtttcacccagggagagggcgctaggcccctgagcaccagagtgcctagagccgcaatcgtgtttacagatggtagggctcaggatgacgtgtctgagtgggcatccaaggcaaaggccaatggaataaccatgtatgcagtaggggtgggcaaagcaatcgaggaagagttacaagaaatcgctagtgagccaacaaacaagcacctgttttatgcggaggatttttccactatggatgagatctcagagaagttgaaaaagggaatatgtgaggccctcgaggattccgacggaagacaagatagcccagcaggagagctgcccaagaccgtgcagcaaccaacagaaagcgagcccgttactataaacattcaggacttactcagctgctcgaactttgctgtgcagcaccgctacctgttcgaagaggacaaccttctgcggtcaacccaaaagctgtcgcactctactaaaccgagcggatctcctttagaggaaaagcatgatcagtgcaaatgcgaaaacctgatcatgtttcagaacctggctaacgaggaggtgaggaaattgacacagcgattggaagagatgactcagcgcatggaagctctggagaaccggttacgctacagatag

SEQ ID NO: 123501 - DNA, 1461 bp, synthetic construct
  misc_feature 1..1461: note = Description of Artificial Sequence: Synthetic coding sequence
  source 1..1461: mol_type = other DNA
atgccacgacctgcccccgcgagacgtttgccagggttactgctcctgttgtggcctctcctcctcttaccgagcgccgcacccgatccagtcgcgcgcccaggttttagacgtctcgagacccggggccccggaggaagccctggtagaaggccatccccagctgcaccagacggcgccccggcgtctgggactagcgaacctggcagagctcgcggtgccggggtatgtaaaagtcggcccctcgacctggtgtttattattgattcctccagatcagtgaggcctctagagtttacaaaagttaaaacttttgtgagccggataatcgacaccctggacattgggcccgccgatacacgtgtcgccgtcgtgaattacgccagcacagtgaagatcgaattccaactgcaggcctatacagacaagcaatctctgaagcaagcagtgggaaggatcaccccccttagcacgggaactatgtccggcctggctatccagactgcaatggatgaagcctttaccgtcgaggcgggagcgagggaaccatcctcaaacattcctaaagtcgccatcatagtgactgatggccggcctcaagatcaggttaatgaagttgccgcccgggcacaggcctctggtattgagctgtatgcagtgggagtagatcgggccgacatggctagccttaagatgatggcaagtgagccactggaggaacatgtgttttacgtggaaacatacggagtcattgagaagctgagtagccgctttcaggagaccttttgcgccctggacccttgcgtgctgggaacacatcagtgtcagcacgtgtgtatttctgatggtgagggtaagcaccattgcgagtgctcacagggatacacgttgaacgctgacaagaaaacctgctcagcactcgacaggtgcgccctgaatactcatgggtgtgaacatatttgtgtgaatgaccgcagcggatcataccattgtgaatgctacgaaggatacaccctaaatgaagaccgcaaaacttgcagcgcccaggataagtgcgccttaggaactcacggatgccaacacatatgtgtgaatgacaggaccgggagtcatcactgtgagtgctatgagggatatacgctgaatgccgataaaaaaacgtgctccgtgcgagacaaatgcgctctgggttcacacggctgtcagcacatctgcgtatcagacggagccgcctcctaccattgtgactgttatcccggctacacacttaacgaggataaaaagacctgcagcgctacagaagaggccaggcgcctagtgagcactgaggatgcttgtgggtgcgaagcgactcttgcgttccaggataaggtaagctcctatctgcaacgcttgaataccaaactggacgacatactcgagaagctgaaaataaacgagtacggccaaatacaccgctag

SEQ ID NO: 123502 - DNA, 1335 bp, synthetic construct
  misc_feature 1..1335: note = Description of Artificial Sequence: Synthetic coding sequence
  source 1..1335: mol_type = other DNA
atgccacgccctgccccagcacgccgccttcccggactcctcctgcttctgtggccattattgctcctgccttccgctgcgccagatcccgtggcaaggccagggtttaggagactggagactagaggtcccggcggatctcccggccgtcgcccaagtcccgccgcaccagacggggcaccggccagcggcacctccgaacccggtcgagcacgcggcgctggagtgtgcaagtcccgccctctggacctagtgttcatcatagattcatctcggtctgttaggcctcttgagtttacaaaagtgaagacatttgtgagcagaattattgatacgctggacattggccccgcagataccagggtagccgtcgtaaattatgccagtaccgtcaagatcgagtttcagctccaggcttacactgacaaacagtctcttaaacaggccgtcggcaggataacgcccctgtcaaccggtactatgagtggtctggccatccagaccgcaatggatgaagcctttactgtagaggctggtgcacgagaacctagctccaatatccctaaggttgctatcatcgtgactgatggaagaccccaggaccaggtgaacgaggtggctgccagggcacaggcgagcggtattgagttgtacgccgttggcgtggatcgcgctgatatggcttccctgaagatgatggccagtgaacccttagaggagcatgttttttatgtggaaacatatggcgtgatcgagaaactgagtagtaggtttcaagaaaccttttgtgcattggaccgctgcgctctgaatactcatggctgtgaacatatctgcgttaatgacaggagcgggtcataccattgcgagtgttacgagggatacacgctaaatgaggaccgtaaaacgtgttccgctcaagacaagtgcgctctcgggacccatggatgtcagcatatttgtgttaatgacaggactggctcacaccactgtgagtgctacgaaggctacacccttaacgctgacaagaagacctgtagtgtcagagacaagtgcgccctgggtagccacggatgtcagcacatttgcgtctccgacggagcagcgtcataccactgcgattgctaccctggctatacactgaatgaggataaaaaaacgtgcagcgcaacagaggaggcccgccggctggtctctactgaggacgcttgcggatgtgaagccaccctggccttccaggacaaagtcagttcctatctgcagaggctcaacacaaagttggatgacatccttgagaaactgaagatcaacgagtacggacagattcaccgctag

SEQ ID NO: 123503 - DNA, 1869 bp, synthetic construct
  misc_feature 1..1869: note = Description of Artificial Sequence: Synthetic coding sequence
  source 1..1869: mol_type = other DNA
atgcgcgggctcctctgttggccagttctgctgctgctgctgcagccttgggaaacacaactgcagcttacgggcccgagatgccacactggaccccttgaccttgttttcgtcatagatagctcaaggtccgtgagaccctttgagtttgagaccatgagacagtttctgatgggcttactgcgcggcctcaatgttggtccgaacgccaccagggttggagtgattcaatactcgtctcaggtgcagtccgtcttcccactccgggctttctcacgtagggaagatatggagcgcgcgataagagacttggtgccattagcccagggcacaatgactggcctagcaatccagtacgccatgaatgtagcttttagcgtggccgaaggcgcgaggcccccagaagagagagttccacgcgtggctgtcatcgttactgatggaagaccccaagatagggtggcagaggtggccgcacaagccagggcccgcggaatcgagatctatgccgtgggagtccagcgcgctgacgttgggtcgctgagagccatggcttcacccccactggatgagcatgtgtttctggtggagtctttcgacctgatccaagaattcggcttgcagttccagagtaggctgtgtggtaaagaccagtgcgctgaggggggtcacggttgtcagcaccaatgtgtcaatgcctgggcgatgtttcactgcacctgtaatcccggctataagctggctgcggacaataagagctgcctcgctattgacctgtgcgctgaaggcactcacggctgcgagcatcactgtgtcaacagccctggaagctatttctgccactgtcaggttggctttgtcctgcagcaagaccagcggagctgtagagcaatcgattattgttcctttgggaaccattcttgtcagcatgagtgtgtgtcaacccctggaggaccacgctgtcattgtcgcgaagggcatgatctgcagccggacggacgctcatgccaagtgcgcgacctgtgcaacggtgtcgatcatgggtgcgaattccaatgtgtgtctgaaggcctgagctaccgctgtctttgtcccgaaggtcgtcagctgcaggcagacgggaagtcttgtaaccggtgtagagaagggcatgtggacctcgtgctgctggtcgatggcagcaagagtgtgcgcccgcaaaactttgagttggtaaaacgttttgttaaccagatcgttgactttctggacgtctccccagagggcacacgagttggcctcgtacagtttagttccagggtaagaaccgaatttcccctcggtcggtacgggaccgccgccgaagtcaagcaggcagtgctggctgtggaatatatggaacgcggcacaatgaccggactggccctgcgccacatggtggaacactcctttagtgaagcccagggcgcacgtcccagagctttgaacgtaccacgggtgggcctcgtgttcactgatggcaggtcacaagacgatatttccgtgtgggctgccagggcaaaagaggagggtattgttatgtatgccgtgggggtcgggaaggcagtggaggctgagttacgagagattgcatcagagcccgccgaattgcatgttagttatgcccccgacttcggtactatgacccatctgctggagaacctgaggggttcgatttgccctgaggaagggatcagtgcaggaactgaactgcgttccccctgcgaatgtgagagtttggtcgagtttcaggggcgaactctgggcgcgctcgagtctctgacgctgaacctggctcagttgaccgccaggctggaggacctcgagaatcagctggccaatcagaagtag

SEQ ID NO: 123504 - DNA, 1746 bp, synthetic construct
  misc_feature 1..1746: note = Description of Artificial Sequence: Synthetic coding sequence
  source 1..1746: mol_type = other DNA
atgagagggctgctatgctggcctgtgctgctcctgttgttgcaaccatgggagacccagctacagctgactggaccccggtgccacacgggacctctcgacctcgtgttcgtaatcgatagcagtcgaagtgttcggccctttgagtttgagaccatgagacagttcctgatggggcttcttagaggcctaaacgtgggaccaaatgccacaagggtcggagtgatccaatatagctctcaggtacaaagtgtgttccccctccgggccttttctcgtcgcgaagatatggagcgcgccatacgggacttagtgcctttggctcagggcaccatgaccggcttagctatccagtacgcaatgaacgtggcattttcagttgcagagggagcccgtccgcccgaggagcgtgtgccgagagtggccgtgattgtgaccgacggaaggccacaagacagagtcgccgaggttgccgcgcaggcgagggcacggggcatagagatttacgccgttggggtgcagcgggctgacgtcggcagtctgcgagctatggcctctccccccctggatgaacatgtctttctcgtggagtccttcgacctgatacaggaattcggacttcaattccaatcacgcctgtgtgcaatagacttatgtgctgagggcactcacggttgtgaacatcattgcgtgaatagcccgggctcctacttttgtcactgccaggtagggttcgtgctgcagcaggaccaacgatcatgccgggccattgactattgtagtttcgggaatcacagctgtcaacatgaatgcgtgtcaacccccggggggcctcgctgccattgtagagagggacatgacttgcagccagatgggcgctcctgccaggtgcgagacctctgcaatggcgtggaccacggctgcgagttccagtgcgtgagcgaggggctgtcgtacaggtgcttgtgccccgaggggagacagcttcaggcagatggcaagagctgcaaccgttgccgggaaggccatgtggacctggtgcttctggtggatggaagcaaatcagtgcgcccccagaacttcgagttggtgaagcgctttgtgaaccagatcgttgattttctcgacgtgtctccagaagggaccagggtggggcttgtacaattctcttcccgcgtgcgtacagaattccctcttggcaggtacggcacagccgcggaagtaaagcaggcggttctagccgtggagtacatggagaggggaactatgacaggtctagcgctccggcacatggtcgagcattccttctctgaggcccagggtgcccggcctagagcactgaacgtgccaagggtcgggctcgtatttacagatggcaggagccaggacgacatatctgtttgggccgcaagagccaaggaggagggcattgtaatgtatgcagttggtgtggggaaagcagtggaggccgagttaagagagatagcctccgagcccgctgagcttcacgtgagctacgcccctgatttcgggaccatgacacacctgctggagaacttaagaggatctatctgccccgaagaggggatatcagctggtacagaactccgcagcccctgcgagtgtgagtctctggtggaatttcagggccgcacactgggggccctggagtccttaacattaaacctggcccaacttaccgcccgcttggaggatcttgaaaatcagttggctaaccagaaatag

SEQ ID NO: 123505 - DNA, 1500 bp, synthetic construct
  misc_feature 1..1500: note = Description of Artificial Sequence: Synthetic coding sequence
  source 1..1500: mol_type = other DNA
atgagaggcctgctttgttggcccgtgctgcttcttcttttgcagccctgggaaacccaactccagcttacaggcccaagatgccacaccggccccctggatctcgtgttcgttatcgacagctctcgctcagttaggccttttgagtttgagacaatgcgccaatttctgatgggcttgctgaggggcctgaacgtcggacccaacgccacccgagtgggcgttatccagtatagcagccaagtgcaaagtgtttttccactgagagccttctcccgtagggaagacatggaacgggccattagggatcttgttcctcttgcccaagggacgatgaccggcttggctatacagtatgccatgaacgtcgccttttccgtagccgagggtgcccgcccacccgaggaacgggtaccccgcgtggcagttatagttaccgacggcaggccccaggatagagtggctgaggtcgctgctcaggcgcgggcacggggcatagagatctacgctgtcggagttcagagggctgacgtgggaagtctgcgcgcgatggcatcgccccccctcgacgaacacgtgttcttggttgagagcttcgatcttattcaggaatttggcctgcaatttcagtctaggctctgcgtgcgggatctgtgtaatggcgttgatcacggctgcgagttccagtgcgtgagtgaagggctcagttacagatgtctgtgtcctgagggccggcagttgcaggctgatggcaaaagctgcaaccgctgtcgtgaggggcacgttgatttggtgcttttagtcgacggcagcaaatcagtgagaccacaaaacttcgaacttgttaagaggtttgtaaatcaaattgttgatttcttggatgtctcacctgagggtacgagagtcggactcgtgcagttttccagcagagtgcggacggagtttccactggggcggtatggaacagctgccgaagtgaagcaagcagttttggcggtcgagtacatggagagagggacaatgactggactagccctcagacacatggtcgaacatagcttcagcgaagcccaaggggcccggcctagagcattgaatgtcccccgggtgggactcgttttcaccgacggtcgttctcaggacgatatctccgtgtgggcagccagggctaaagaggaaggcatcgtcatgtacgccgtcggggttggcaaggccgtagaggctgagcttagagaaatcgcctctgagccagccgagctccacgtgagttacgctcctgactttggaactatgacacatcttctggagaacctgcgcgggtcaatctgtcccgaagaagggatttctgccggcacggaactgcggtccccctgtgagtgtgagtctcttgtagaatttcagggccgcacactgggggccctggaaagtctcaccctgaacctagcgcagcttacagccaggttggaggacctcgagaaccagctcgccaaccagaaatag

SEQ ID NO: 123506 - DNA, 1623 bp, synthetic construct
  misc_feature 1..1623: note = Description of Artificial Sequence: Synthetic coding sequence
  source 1..1623: mol_type = other DNA
atgcgaggccttctctgttggccagtgctgctacttctactgcagccctgggagacacagctgcagcttactgggccaagatgtcatacgggcccactggacctggttttcgtcattgactcctctagaagcgtgagacccttcgagttcgaaacgatgcgccaattcctcatgggacttcttcgggggttgaacgttggtcctaacgccacccgagtaggcgtgatccaatattcctcacaagtgcaatcagtgtttccattacgcgcattcagtcgccgggaagatatggaacgcgccattagggacctggtccccctggcacagggtacaatgacaggtctggctatccaatacgctatgaacgttgccttcagcgtggccgaaggcgcccggccacctgaggaaagggtgcctcgggttgcggtcattgtgaccgatgggcggccccaggatagagtagccgaggtagccgcccaggccagagcgcgcgggatagagatctacgccgtaggggtacagagggctgatgtgggttctctgcgtgcaatggccagcccaccacttgacgaacacgtgtttctcgtggaatcattcgacctgatccaagaattcggactccagttccagtccaggctgtgtgcaattgattactgctctttcgggaatcactcctgccaacatgaatgtgtttctacacccgggggaccccgctgccattgtagagaaggccacgatctccagcccgatgggcgctcctgtcaggtgcgtgacctgtgcaatggggtcgaccacggatgtgaattccagtgcgtttcagaaggtctctcatacagatgtctgtgccccgagggccgacagttacaggcagacgggaagtcctgcaatcgatgtcgggaaggacatgtagatttggtgctcttagtggacgggagcaagtcggtacggccccagaatttcgaactggtcaagaggttcgtgaatcagattgttgatttcctcgacgtgtcaccagaaggaactcgagtgggattggtgcagttcagctctagagtccggacggagtttcctctgggccgctacggtacagccgccgaagttaagcaggctgtgctggccgtggaatacatggaacgaggcacgatgaccgggttggccttgcggcatatggtggagcattcattttcagaggcccagggtgcccgcccgcgcgctttgaatgtgccacgagtgggcctcgtgttcactgatggaagatctcaggatgatatatcagtgtgggccgctagggctaaggaggagggcatcgtcatgtatgccgtcggtgtcggcaaggcagtggaggccgagctacgtgaaatcgcttctgagcctgccgagctgcatgtgagttacgcacctgattttgggaccatgacgcacctccttgaaaatctcaggggatccatctgccccgaagaggggattagcgccgggaccgagctccggagcccttgcgaatgtgagtcactggtcgagtttcagggaagaactctgggggcattggagtccctgacgctgaacctggcccagctcactgcgagacttgaagacctagaaaatcagctggctaatcagaaatag

SEQ ID NO: 123507 - DNA, 1299 bp, synthetic construct
  misc_feature 1..1299: note = Description of Artificial Sequence: Synthetic coding sequence
  source 1..1299: mol_type = other DNA
atgcgcggcctcttatgctggcccgtgctcctgctcttgcttcagccgtgggaaacacagcttcagctgaccggaaaggaccagtgtgctgaagggggccacggctgccagcatcagtgtgtaaacgcttgggctatgtttcattgtacatgcaacccagggtataagctggctgccgataacaagtcctgtttggccattgacctgtgtgcagagggcacacatggctgcgagcatcattgcgtaaactcacccggttcgtatttttgccactgccaagtcggatttgtgctccagcaggaccaacggtcgtgccgagcaatcgactattgttcctttgggaaccactcatgtcagcacgagtgcgtgtccacacctggggggccaaggtgccattgccgggaaggccacgatctgcaaccagacggccgcagttgtcaggtccgcgacttgtgtaacggagtggatcatggatgtgagtttcagtgtgtcagcgagggtctatcataccggtgcctctgccctgagggccggcaactgcaagcagatggaaagtcatgcaacagatgcagggagggacatgtggacctggtgctgttggtggacggatctaagtcagtgcgccctcagaactttgaattagtcaagcggttcgtcaaccaaatcgttgatttccttgatgtatcccctgagggcacaagagttgggctcgtgcagttcagtagcagagtccggacagagttccctctgggtcggtatggcactgctgccgaggtaaaacaggctgtgttggcagttgagtacatggagcggggcaccatgaccggcctggcgctgcgacacatggtggagcactccttttccgaggcccaaggcgcgcgcccacgggcattgaatgttccaagagtgggactggtgttcacagacgggcggagccaggacgacatctcagtttgggcagcgcgagcaaaggaagagggcatcgtgatgtacgcagtgggggtgggaaaagcagtcgaggccgaactgagggagatcgcttcggagcccgcggagctgcatgtttcatacgctcccgactttggaacgatgacccatctcctcgagaacctgagggggtccatatgtcccgaggaggggatttccgcaggcacggagctgagatctccatgcgagtgcgaatcccttgtggaatttcaaggacgcactcttggcgccctggagtccttaaccctgaatctagcccagctgacagctaggctggaagatttggagaatcaactggcaaaccaaaaatag

SEQ ID NO: 123508 - DNA, 1299 bp, synthetic construct
  misc_feature 1..1299: note = Description of Artificial Sequence: Synthetic coding sequence
  source 1..1299: mol_type = other DNA
atgcgaggactgctatgctggccagtgctcctcctactgctccaaccctgggagacacagcttcagcttacgggcaaagaccaatgcgccgaagggggacatggatgccaacatcagtgcgtgaatgcttgggccatgttccactgcacctgtaaccctggatacaagctggccgcagataataaaagctgcctggccatcgatctttgcgctgaaggcacacacgggtgtgagcatcactgtgtcaattcaccaggcagttacttttgccactgccaggtggggttcgtgctgcagcaagaccagaggtcctgccgggccattgactactgttcatttggtaatcatagctgtcagcatgagtgtgtcagcactcccggtggccctagatgccactgccgggaaggccatgacctccagcccgatggacgatcgtgccaggtccgagatctgtgtaacggagtggatcacgggtgtgaatttcagtgcgtctccgaaggcttgagttaccgatgtctatgccctgaggggaggcaactacaggccgacggcaaatcgtgtaacaggtgtagggaaggccacgtcgatctggtcttgcttgtggatgggtcaaaaagtgtacgtccccagaacttcgagctggtcaagagattcgtcaaccagattgtcgattttttagacgtgtccccagagggcactagagtgggactggtccaattctcctctcgcgtgagaacagaattccctctgggacgatatggcaccgctgccgaggttaagcaggctgtgctggcagtggaatatatggaaagggggaccatgacgggacttgcgctgaggcatatggtagagcattcattctcagaggctcagggcgctcggcctagggctctgaacgttcctcgggtggggctggtgttcacggacggcaggagccaggacgacatctccgtctgggcagccagagccaaggaagaaggcatagtgatgtacgcagtgggtgtaggaaaagctgttgaggccgagttgagggagattgcgagcgagccagccgaattacacgtttcatatgcacctgacttcggaacaatgacccacttgttagaaaacctgcggggttccatttgccccgaggaaggcatcagcgctggaaccgaattgcggtctccatgcgagtgcgagagcttagttgaattccagggccggacgctgggggccctggagtcccttaccttaaatttggctcagttaacagcacgactcgaagaccttgagaaccagctggccaaccagaagtag

SEQ ID NO: 123509 - DNA, 1869 bp, synthetic construct
  misc_feature 1..1869: note = Description of Artificial Sequence: Synthetic coding sequence
  source 1..1869: mol_type = other DNA
atgagagggttgctatgttggcctgtcttgttgcttcttttacagccgtgggagacccaactgcagctgacaggccctcgttgtcataccggccctctagatttagtctttgtaattgattcttccaggtccgtgcggcctttcgagtttgagactatgcgacagttcctgatggggcttttaagggggcttaacgtcgggcctaatgctacgcgcgtcggagtgattcaatactcttcacaggttcagtcggtgttccctctgagagccttttcaaggcgagaagacatggaacgtgccattagggatttggtcccattggcacagggcactatgaccggcctggctattcagtatgcaatgaatgtggccttcagtgtggccgagggggcccggccacctgaagagcgcgtcccaagagtggccgtgattgtcacggatggaagaccgcaggatcgcgttgctgaggtagcagctcaggcccgcgctcgcggcattgagatatacgcagtgggtgttcagcgagcagatgtgggatcgctgcgtgctatggcctcgcctcctcttgatgagcacgtgtttttggtcgagtcctttgacctaatccaggaattcggcctgcagttccagagccgactgtgtggaaaggaccagtgcgcagagggaggccacggctgtcagcaccagtgcgtgaacgcgtgggcaatgttccattgcacttgtaatccaggttacaaattggctgccgataataagagctgcctggcaatcgatctgtgtgccgaaggaacccatggctgtgaacaccactgcgtcaatagtccaggaagttatttctgtcactgtcaagtgggctttgtgcttcaacaagaccagcgaagttgtcgcgccatcgattactgttctttcggcaaccactcttgtcagcacgaatgcgtctctactccaggcggaccacgttgccattgccgggaagggcacgatcttcagcctgacggaaggtcttgccaagtccgagatctttgtaacggcgttgaccatggctgtgagttccagtgcgtgagcgagggactcagctacagatgtctttgccctgaaggtaggcagctccaggcagacggaaaatcctgcaatcgatgccgggagggacacgtcgacctggtactcctcgtggatggaagcaaatcagtacgtccccagaattttgagctggtgaagaggttcgtcaatcagatcgtggattttcttgatgtttccccagagggtacacgggtcgggctcgtgcagttctcttctcgggtgaggactgaatttcctttagggaggtacggtaccgctgctgaggtgaagcaggctgtccttgccgtggagtatatggagagaggaaccatgactggactggccctaaggcacatggttgagcactcattttcagaggcgcagggggcgcgtccacgggcgttgaacgtacctagagttggattggtgttcactgatgggcgctcccaggacgacatatctgtctgggccgccagggctaaagaggaaggaattgtgatgtacgctgtgggtgtgggtaaagccgtggaggcggagctgagagagattgctagtgagcccgctgagctccatgtgagctatgctcctgacttcgggacaatgacccatctcctggagaacctgcgaggctctatatgcccagaggagggaatctccgccggtaccgagctgcgctcaccatgcgagtgtgagagcttggtcgaattccaaggacggacactgggggccctcgagagcctcacactcaacctcgcgcagctgacagctaggctggaagacctcgaaaatcaactggcaaatcaaaaatag

SEQ ID NO: 123510 - DNA, 1746 bp, synthetic construct
  misc_feature 1..1746: note = Description of Artificial Sequence: Synthetic coding sequence
  source 1..1746: mol_type = other DNA
atgcgcggtttgctttgttggcccgtcttgctcctgctgttacaaccctgggaaacccagctgcagctcacgggacctcggtgtcataccggtcccctggatctcgtgtttgttatagacagctctagatcagtgcgaccctttgagttcgagacaatgcgacagtttctcatgggtctcctgagaggcctcaacgtggggcccaatgctacaagagtcggcgtgatacagtattccagtcaggtgcagtctgtgtttccacttcgagctttctcacgtcgagaggacatggaaagggctataagagatttggtgcctctagctcaggggactatgacgggcttggctatccaatatgctatgaatgtggctttttctgttgctgagggagccaggccacccgaagaacgagtacctagagtggcagttattgtcacggacggccggccccaagatcgggtggcagaggttgcagctcaggctagggcccgtgggatcgagatatatgctgtcggggtgcaacgggcggacgttggatctcttcgggctatggcatcccctccattggatgaacatgtgttccttgtcgagtcttttgacttaattcaggaatttggtttacagttccagtcacgtctgtgtgctattgacctctgtgcagaaggcactcacgggtgcgagcaccattgtgtgaacagtcccggctcctatttttgccattgtcaggtcggatttgtcctccagcaggatcaaagatcctgcagggctatcgattattgctctttcggcaatcattcctgccagcatgagtgtgttagcactcccggtggacctaggtgtcattgccgggagggacacgatttgcaacccgacgggcgaagctgtcaggttcgcgacctctgtaatggagttgaccacggatgcgaattccaatgcgtgagcgagggtctctcttatcggtgcttgtgccctgagggccgccagttgcaggcggatggcaaatcttgtaatcgttgccgagaggggcatgtggacttagtccttctagtggatggcagcaagtccgtccgaccccagaacttcgaactagtgaaaaggttcgtgaatcagattgtggacttcttagacgtttcgcctgagggcacaagggtcggtcttgtgcagttttctagccgcgtgcgcactgagttcccacttgggcggtatggtacagcagctgaagtgaaacaggctgtactcgctgttgagtacatggaacgcggcactatgacaggtcttgctctgagacatatggtggagcactctttttcagaggcccagggtgcacgtccccgtgccttaaacgtcccacgcgtgggtcttgtgttcaccgacggaaggtcacaggatgatatttctgtgtgggccgctcgggccaaagaagaaggcatcgttatgtacgcggtgggcgtgggcaaagccgtggaagccgaactgagggagatcgccagcgagccggcagaattacacgtaagctacgcgccggatttcggaacgatgacccatctgttagagaatctgcgcggaagtatctgccccgaggagggaatcagcgctggcacagagcttaggagtccttgcgaatgcgagtcactggtggagtttcaaggacggaccttaggcgcccttgagtcccttactcttaatctcgctcagctaaccgcccgcctggaagatcttgaaaaccagttggcgaaccagaagtag

SEQ ID NO: 123511 - DNA, 852 bp, synthetic construct
  misc_feature 1..852: note = Description of Artificial Sequence: Synthetic coding sequence
  source 1..852: mol_type = other DNA
atgtcaaaatcctttcagcagagttcactaagcagagacagccagggccacggccgcgacttgagcgctgccgggattggccttctggctgctgctacacagtccctctcaatgttgctggaaagcgaagatgaactactggttgatgaagaagaagctgcagcgctccttgagtcgggttccagcgtgggcgacgaaactgacctggcaaacctgggcgacgtcgccagcgatggaaaaaaggaaccatccgataaggccgtgaagaaggacggcagtgcaagtgccgccgcaaagaaaaagctgaagaagaggcgattcccaggctccatggagggatttgtgaccctcgacgaggtaggtgatgaggaagattctgaattacagaagcttaggaagagtggcatggccttcaaatccggagacaagaatgacgacggtcttgtggagattaaggtggacaaaattgaggaactggaccaggagaacgaggcagcactagagaatggcattaaaaacgaggagaacactgaacctggagcagaaagttctgagaacgccgacgatccaaataaagatacctctgagaatgctgacggccaaagtgatgagaacaaggacgactatactatcccggatgaatatcgtattggcccctatcagcccaacgtacccgtgggtatcgactacgttattcccaagactggattctactgtaaactgtgcagcctcttctataccaatgaggaagtcgccaagaacactcactgttccagcctgccacattaccagaaattgaagaaatttctcaacaagctggcagaggaaaggaggcagaaaaaagagacctag

SEQ ID NO: 123512 - DNA, 2544 bp, synthetic construct
  misc_feature 1..2544: note = Description of Artificial Sequence: Synthetic coding sequence
  source 1..2544: mol_type = other DNA
atgtcgaaatcctttcagcaatctagcctgtcccgcgactcccaggggcacggacgggacctctctgctgccggtatcgggttgctggctgccgctacccaaagcctgagcatgcccgcctctctgggccggatgaatcaggggactgctcgattggccagcctgatgaatctggggatgtccagcagtctgaatcagcagggagcccacagtgcattgtcttccgccagcaccagctcccacaatctacagtctatcttcaatatcggatcccgaggacctctgcccttatcctctcagcacagaggggatgcggatcaagcctctaacatccttgcatcctttggcctcagcgctcgggacttggatgagttgtctagataccctgaggataaaataacccccgaaaacctgccccaaattctgctgcagctcaaacgccgaaggacagaggaggggccgaccctttcatacggaagggatggacgttccgctacacgggaaccaccttacagggtgcctcgcgacgattgggaggagaaaagacactttcggcgcgattcctttgatgacaggggccctagccttaatcccgtgctggactacgatcacgggtccaggtcccaggaatccggctattatgacagaatggattatgaagatgataggttacgggacggggagcggtgtagagacgattctttctttggcgaaacctcacataactaccacaaattcgattccgagtatgagcggatggggagagggcccggacctctgcaagagaggtcgttgttcgaaaaaaaaaggggcgcccctcccagttccaatatcgaagatttccacggcctccttccaaaaggctacccgcacctgtgtagcatctgcgacctgccagtccatagcaacaaggagtggagtcagcatatcaacggtgcttctcattcccgcagatgtcagctgcttctggagatttatccagaatggaatccggataacgacacaggtcacacgatgggggacccatttatgcttcaacagtcaactaacccagcacctggcatcctaggacccccacctccaagtttccacctgggcggccccgccgtggggccccgtggcaatctgggggccggtaatggtaatctccaaggcccacggcacatgcagaagggcagggtagaaacaagtcgcgtggtccatattatggactttcagcgcgggaagaacctgagatatcagttattgcagctcgttgagccatttggcgtcatcagcaatcatctgatattaaataagatcaatgaggctttcattgagatggctaccactgaagacgcccaagcagccgtcgattattacactacaacgccggcattagttttcgggaagcccgtgcgcgtccacctgagccaaaagtacaaacgaatcaaaaaacccgaaggaaagcccgaccagaagtttgaccaaaaacaagagctgggtcgggttattcacctatccaacctgccccattccggctatagcgacagtgccgtcttaaagctggctgaaccctacggcaaaataaagaattacatcctaatgcgtatgaaaagccaggcattcattgaaatggaaactagagaagatgcaatggccatggttgatcactgcttgaaaaaggcgctgtggtttcaggggcgatgcgtgaaagtagacctcagcgaaaaatataaaaaattggtcctgaggattccaaacaggggcatcgatctgctcaagaaggacaaatcccggaagagaagttatagcccagacggcaaggagagcccttccgacaagaagtcaaaaaccgatgggtcccagaagactgaaagctccacagaaggcaaggaacaggaggagaaatctggtgaggacggagaaaaggacacaaaggacgaccagacagaacaggagcctaatatgctattggaaagtgaggacgaactgctggtagacgaagaagaagcagctgctcttctggagagtggatcaagtgtgggggatgagactgacctggccaaccttggagatgtcgcttccgatggaaagaaggagccaagcgacaaggccgttaagaaggacggcagtgcatctgcagccgcaaaaaagaagctgaagaaagttgacaaaattgaagaattggaccaagagaatgaggcggccctagagaatggtataaaaaacgaagagaacacagaacctggtgccgagtcaagcgaaaatgctgatgatccaaataaagatacgtctgagaacgctgacgggcagtcggacgaaaataaggacgactacacaatcccggatgagtaccgcatcggcccataccaacctaacgtccctgttggcatcgattacgtgattcccaaaactggcttctactgcaaactgtgtagcctattttacacaaacgaagaagtcgctaagaacacacactgctcaagccttccgcattatcaaaaacttaagaaattcttgaacaagctggctgaggagagacgccagaaaaaggagacctag

SEQ ID NO: 123513 - DNA, 2544 bp, synthetic construct
  misc_feature 1..2544: note = Description of Artificial Sequence: Synthetic coding sequence
  source 1..2544: mol_type = other DNA
atgtcaaagtccttccagcagtcatcactgagtagagactctcagggtcatggcagagatctctctgctgccggtattggccttcttgcagcagctacacaaagtcttagtatgcccgctagtctgggcaggatgaatcagggcacagccagactggcaagcctgatgaacctggggatgtcatccagtctgaaccagcaaggcgcacacagcgcactctcaagcgccagtacgtcctcacacaatttgcaatcaatcttcaacattggatctcgagggccattgcctctctcttcccagcacagaggcgatgctgatcaagcgtctaatatcctcgcaagcttcggccttagtgcgagggatcttgatgagctgtcccgctatcctgaggacaagattacacccgaaaatctgccacagatcctgcttcagttaaaaagaaggagaactgaagaagggcctacactaagctatggccgggacggacggagcgcaaccagggaaccaccgtatcgggtgccaagggacgattgggaagagaagaggcacttccgaagggattccttcgatgatcgggggccctctcttaatcccgtccttgactacgatcacggctccaggtcacaggagtccggatattatgatcgaatggactacgaagatgatcggcttagagacggcgagcgctgtcgagacgactcattcttcggcgaaacaagtcacaattatcataaatttgacagcgagtatgagagaatgggaagaggaccaggacctctgcaagaacggagccttttcgagaagaagaggggcgcaccccctagctccaatattgaggactttcatgggctgctcccaaaaggatatccacacctgtgtagtatttgtgatctcccggtccatagtaacaaggagtggtcccagcacataaatggagcttctcattcacgccggtgccaactgctgctcgaaatctatcccgaatggaacccggacaacgacacgggtcatactatgggggaccctttcatgctgcagcagagtaccaaccctgcccctggcatccttgggcccccaccacccagttttcacctgggcggccccgcagtgggacctcggggcaatcttggggcgggcaatggaaatctgcagggcccacgtcacatgcagaaaggtcgcgtggagacatctcgtgtggtgcacatcatggacttccagaggggtaaaaaccttaggtaccagttgttacagctggtggaacctttcggggtgatttctaatcacctgatcctgaacaagattaacgaagcctttatcgagatggccaccaccgaggatgcccaagctgcagttgactactatactactacacccgccctagtgtttggcaagccagtgagggtccacctgtcacagaaatacaagaggatcaagaaacccgagggcaagcctgaccagaagttcgatcagaagcaggaactgggccgggtgattcatctctccaatctacctcatagtggatacagcgattccgccgtcttgaagcttgctgagccgtatggtaagatcaaaaattacattcttatgcgcatgaagtctcaggccttcatcgaaatggaaacacgagaggatgcgatggctatggttgatcactgtctgaagaaagctctctggttccagggtaggtgcgtgaaagtggatctgtcagaaaaatataaaaaactcgtgctgagaatccctaacaggggtattgacctgctcaagaaggacaaaagccgtaagcggtcgtactcccctgacggaaaggagtctccctcagacaagaaatctaaaactgacgggagccagaagacagaaagcagcactgagggcaaagagcaggaggagaaatcaggtgaagatggtgaaaaagataccaaggacgatcagacagagcaggagcctaacatgcttttggagagcgaggacgaactcttggtggacgaggaggaggcagctgccctgctcgagtcagggagttcagtcggtgatgagacagatctagctaatctgggcgatgttgcatccgacgggaaaaaggagccctcggataaagccgtcaagaaggatggatctgcaagcgccgccgccaagaagaaattgaagaaggtggataaaatcgaagaactggatcaggagaatgaggcagcgctggagaacgggataaaaaacgaagaaaacacagaacctggagctgaatccagcgagaatgccgacgacccgaataaagacacaagcgagaatgcagacggacagagcgatgagaacaaggatgactatacaattccagatgagtatagaataggaccctaccagccaaatgtgcccgtgggcatagactacgtgattccaaagacaggtttctactgtaagctctgctcactgttctacacgaacgaagaggtggctaagaacactcattgcagttccctgcctcactatcagaaactgaaaaaattcctcaacaaactcgccgaagagagacgccagaaaaaggagacctag

SEQ ID NO: 123514 - DNA, 300 bp, synthetic construct
  misc_feature 1..300: note = Description of Artificial Sequence: Synthetic coding sequence
  source 1..300: mol_type = other DNA
atgtctaagtcatttcagcagtcctctctgagccgggattcacaggggcacgggcgtgacttgtccgccgccgggattggcctcctcgcagccgctacacagagcctgtctatgcccgcctccctggggcggatgaaccagggaaccgctcgtctcgcctccctgatgaacctcggcatgagtagcagtctgaaccaacaaggcgctcactccgcactgtcatctgcatccacctcctctcacaacttgcagagtatctttaacattggcagcaggggtcctctcccactatcttcttag

SEQ ID NO: 123515 - DNA, 1530 bp, synthetic construct
  misc_feature 1..1530: note = Description of Artificial Sequence: Synthetic coding sequence
  source 1..1530: mol_type = other DNA
atgggagacccctttatgctccaacagagcacaaacccagcgcctggtatcctggggccaccacccccttcttttcacttgggcgggcccgcggtaggacctcggggtaacctcggggccggaaatggtaatcttcaagggcctcgccatatgcagaagggccgagttgagacttcgcgggttgtgcacatcatggattttcagcgggggaaaaaccttcgctaccagctcttacaactggtcgaaccctttggagtgatatcgaaccatctgatcctcaataagattaatgaagcatttattgaaatggctactacggaagacgctcaagccgccgtggattattataccactacccccgcattagtgttcggcaagcctgtgcgggtccacctctctcagaaatataaacgcatcaagaaacctgaaggaaagcccgatcagaaatttgaccagaagcaggagttaggcagagtgatccacctttccaatcttccccactcagggtattcagactcggcggtcttgaagctagctgagccgtatggaaagatcaaaaattatattttgatgagaatgaaatctcaggcattcatagagatggaaacacgagaagatgcgatggctatggtggatcactgccttaagaaggccctttggtttcaggggaggtgcgtgaaggtggatctgtcagagaaatataagaagctcgttctgcgcataccaaacagagggattgacctgctgaaaaaagataagtcaaggaaaagaagttacagcccagacggtaaggagtctcccagtgataagaagtccaaaactgacggcagtcaaaaaacagagtcctcgactgaaggcaaagaacaggaggaaaagagcggggaagacggcgaaaaagatactaaggatgaccagacagagcaggaaccgaatatgcttctcgaatccgaagatgaacttttggtggacgaagaggaagcagcagcactgctggagtccggaagcagtgtgggagacgagaccgatctggcaaatctgggtgacgtcgcctcagacggcaagaaagaaccaagtgataaggccgtgaaaaaagacggcagtgcaagcgcagctgccaagaaaaagctgaagaaagtcgacaagatagaggagctcgaccaggagaatgaagccgccctcgaaaatgggattaagaacgaggaaaacaccgagccgggagcagagtcatccgagaacgcagacgacccaaacaaggacacatctgaaaatgcagatggacagtccgacgaaaataaggatgactatacaattccagacgagtacagaattggcccgtaccagccaaacgtgccagtcgggatcgactacgtcattccgaagactggattttattgcaaactctgctctctattttacaccaatgaggaggttgccaagaatacacactgctcatccctccctcattatcagaaactcaaaaagtttctgaataagctcgccgaggaacgacgtcagaagaaagaaacgtag

SEQ ID NO: 123516 - DNA, 264 bp, synthetic construct
  misc_feature 1..264: note = Description of Artificial Sequence: Synthetic coding sequence
  source 1..264: mol_type = other DNA
atgagcaaatccttccagcagtcatcgctctctcgcgattcccagggccatggacgggacttaagcgcagcaggaatcggcctgctggccgcagctactcagagcctctccatgcccgcatccctaggcaggatgaatcaggggaccgcccggctggcttctctgatgaacctgggaatgagctcttctctcaatcagcaaggtgcccacagcgcactatcatcagccagcaccagcagccacaatctgcagagtatattttag

SEQ ID NO: 123517 - DNA, 1680 bp, synthetic construct
  misc_feature 1..1680: note = Description of Artificial Sequence: Synthetic coding sequence
  source 1..1680: mol_type = other DNA
atgctaggggctcaatggcgtaggaaccagccgagccgcgccgctgaggaatggagccaacatattaacggcgcctcccactcgcgtcggtgccagttactactagagatctatccagaatggaatcctgataatgatactggacacacaatgggcgacccattcatgctgcaacagtccactaacccagctcccgggattctggggccaccacctccaagctttcacctggggggccccgccgttggtccacggggaaaccttggcgctggcaatggaaatcttcagggccctcggcacatgcagaagggccgggtggagacttctcgggtggttcacattatggactttcaacggggtaagaatcttcggtatcagctgctgcaacttgttgaacctttcggtgtcatctccaaccatctcattttgaataaaatcaacgaggcctttattgagatggccacgacggaggacgcccaagcagcagtggactattacacaacgacgcccgcactcgttttcggcaagcccgtccgggtacacctctctcagaagtacaagcggatcaagaaacccgaaggcaaaccagaccaaaaattcgatcagaagcaagaactgggccgcgtcattcatctgagcaaccttccacattccggatactcagactccgctgtgcttaagcttgctgaaccctatggtaagataaagaattatatcttgatgcgcatgaagtcacaggccttcatcgaaatggagacacgggaagacgccatggcaatggttgatcactgtctaaaaaaagctctctggttccagggtagatgcgtcaaagtcgacctgtccgagaaatacaaaaagctcgtgcttcggattcctaaccggggaattgatctgcttaaaaaggacaagtcgagaaagcgatcctattcaccggacggaaaagagtccccctcggacaaaaagtcaaaaaccgatggaagccagaagactgaaagctccaccgagggaaaggagcaagaagagaaatccggcgaggacggtgagaaggataccaaggacgaccagacagaacaggaacctaacatgctgctggaaagcgaagatgagctactcgtcgatgaggaggaagctgccgccctgctcgagtcgggcagttccgtgggggatgagacagacttagcgaacctgggcgacgtcgccagtgatggaaaaaaagagccctctgacaaggctgttaagaaagacggaagtgcctcggccgccgccaagaagaagcttaaaaaggtggacaagattgaggaactcgatcaggagaatgaggcagcactggaaaatggcattaagaacgaagaaaacactgagccgggtgccgaaagcagcgaaaacgctgacgatcctaataaggatacatccgagaacgccgatggtcagagcgatgagaacaaagacgattatactattcctgacgagtatcgcatcggcccatatcaacctaatgtgcctgtaggcatcgactacgttattcctaaaaccggcttttattgcaagctatgttccctcttctacacaaatgaagaggtggccaaaaatacgcactgttcatctttgccccattatcaaaaactcaaaaagttcctgaacaaactcgctgaggaacgcagacaaaaaaaggagacctag

SEQ ID NO: 123518 - DNA, 237 bp, synthetic construct
  misc_feature 1..237: note = Description of Artificial Sequence: Synthetic coding sequence
  source 1..237: mol_type = other DNA
atgagcaagagtttccagcagtcaagcctgagccgggactcacagggacacggacgagacctctcagccgctggcattggtctgctagccgcagccacacaatcactgtcaatgccagccagcctgggtcgcatgaatcagggtacagcccggctagcgagccttatgaatcttgggatgagctcttccctgaatcagcagggcgcccacagcgcactgtcgtcggctagcacatag

SEQ ID NO: 123519 - DNA, 1302 bp, synthetic construct
  misc_feature 1..1302: note = Description of Artificial Sequence: Synthetic coding sequence
  source 1..1302: mol_type = other DNA
atgagtaagagtttccaacagtcctctctgtcacgcgattcccagggacatgggagggatttgtcagccgcgggcattggcttgctcgctgccgctactcagagtctgtctatgcctgcctccctgggcagaatgaatcaaggcaccgccagactcgcaagtctcatgaatctcggcatgagctccagtctaaaccaacagggtgcccattcagctctttccagtgcgtcaacttctagccacaatctccaatcaatcttcaatataggttcaagaggcccactcccgctgtccagtcaacataggggcgacgcagaccaagccagtaatattctggcttcgttcgggctttctgcacgggacctggacgagctgtcccggtaccccgaggataagatcacccccgaaaatctgccacagatcctgctgcagctgaaaagacgccgcacagaggaagggcctacgctctcctatgggagggacgggaggtccgctaccagagagcccccctatagagtgcctagggatgattgggaggaaaagcggcatttcaggcgagacagcttcgatgaccgcggaccttccctgaacccagtcctggattatgaccacgggtcacggtcccaggagtctgggtattacgatcggatggactacgaagatgataggctccgagacggggagcggtgccgagacgactcctttttcggcgagaccagccataactaccacaagttcgacagtgaatatgagagaatgggcaggggcccagggcccctccaggaacgaagcctgttcgaaaagaagaggggcgcgccccccagtagtaacatcgaagatttccacggcctcttgcccaaggggtaccctcacctgtgctcgatttgtgatctcccagtccacagtaataaggaatggagccagcatatcaacggcgccagtcacagcaggagatgccagctgctgctagaaatctatcccgaatggaaccctgataacgataccgggcatactatgggggacccgttcatgctgcagcagtctacaaatcctgctccggggatcctgggccccccgccccccagctttcacctgggtgggcctgctgtgggcccgcgtggcaatctcggagcaggaaacggaaatctgcagggcccacggcatatgcagaaaggtagagttgaaaccagtagggttgttcatattatggactttcagcgcggcaaaaatctcagataccaactgctccagctggtggagcctttcggcgtgatttcaaatcaccttatactgaacaagtag

SEQ ID NO: 123520 - DNA, 1530 bp, synthetic construct
  misc_feature 1..1530: note = Description of Artificial Sequence: Synthetic coding sequence
  source 1..1530: mol_type = other DNA
atgggggacccttttatgctgcagcaatctacgaatcccgctcccgggatcctgggacctccgcctccatcttttcacttaggaggtcccgcagtgggccctaggggaaacctcggtgcaggtaacggaaatctgcagggaccgcggcacatgcagaagggccgcgtggaaactagccgggtagtccatatcatggactttcagaggggaaagaatctcagatatcagcttctgcaactcgtggagcccttcggggtgatttcaaaccacctgatcctcaacaagattaacgaggcgtttattgaaatggcaacgactgaggacgcccaggccgccgtcgactactacaccaccaccccagccctggtgttcggtaagcctgtgcgagtgcatctgtcccagaaatacaagcggattaagaaaccggagggcaaacctgaccagaagttcgatcaaaagcaggagttgggacgggtaatacacctgtcaaatctgccccacagcggctactccgatagtgcagttctaaaactcgctgaaccatacggtaaaatcaagaattacatattaatgagaatgaagagccaggcctttatcgagatggagactcgggaggacgccatggctatggtcgaccactgtctgaaaaaagcactgtggttccaggggagatgcgtgaaagttgatctgtccgagaagtataaaaaacttgttctgaggatccctaatcggggcattgacctgctgaagaaggataaatcccgtaaacgaagctactcacccgacggaaaggaaagcccttccgacaagaagtcaaagaccgatggaagccagaaaaccgaatcatccacagagggaaaggagcaagaagagaagtctggggaagacggcgaaaaagataccaaagatgaccagaccgagcaggagccaaacatgttgttggaaagcgaggacgagctgcttgtagatgaggaagaggcagccgccctgctagagagtggatcttccgtgggagacgaaaccgatcttgctaacctgggcgatgtggcatcagatggtaaaaaggagccgtccgataaggcggtcaaaaaggacggaagcgccagcgctgctgcaaagaagaagctcaagaaggtggacaaaatcgaagagctggatcaggaaaacgaggccgccctggagaacggaattaagaatgaggaaaatacggaaccaggggccgaaagctctgagaacgccgacgatccgaacaaggatacttccgaaaatgccgacggtcagagtgatgaaaacaaggacgactataccatcccggacgagtatcggatcggaccctaccaaccaaatgtgcctgtcggtattgattatgtgattccaaaaacaggattttactgtaagctatgttcactcttttacactaacgaggaggtggccaaaaacacacactgctcttcgctgccccactatcaaaagctcaagaagttcttaaacaagttggccgaggagaggaggcaaaaaaaagaaacgtag

SEQ ID NO: 123521 - DNA, 144 bp, synthetic construct
  misc_feature 1..144: note = Description of Artificial Sequence: Synthetic coding sequence
  source 1..144: mol_type = other DNA
atgtcgaaaagcttccaacagtcctcccttagcagagatagccagggccacgggagggacttgtctgcagctggaatcggcctcctggcagcagctacccagtcgctatccatgcccgccagcctaggaaggatgaatcaatag

SEQ ID NO: 123522 - DNA, 237 bp, synthetic construct
  misc_feature 1..237: note = Description of Artificial Sequence: Synthetic coding sequence
  source 1..237: mol_type = other DNA
atgtcaaagagctttcaacagtcctcgctttccagggacagtcaggggcatggacgggacctgtcagctgctggcatcggccttttggctgctgcaacccagtctctgtcaatgccagccagcttaggaaggatgaaccagggtactgcgcggcttgcgtccctaatgaatctcggaatgagctcatcgctcaatcagcagggagcgcactccgcactgagctcagcaagcacttag

SEQ ID NO: 123523 - DNA, 2544 bp, synthetic construct
  misc_feature 1..2544: note = Description of Artificial Sequence: Synthetic coding sequence
  source 1..2544: mol_type = other DNA
atgagtaagagctttcagcagtcatccctcagtcgtgatagtcagggccatggcagagacctctctgctgcaggcattggtctgctcgccgctgccacccagtcactgagtatgcctgcttctttagggcggatgaatcagggaaccgctcggctggcgtccctgatgaatcttgggatgagcagctcgttgaatcagcagggagcccactccgctctgagttccgcatccacgtcttcccacaatctgcagtcaatctttaatattggaagcagaggaccactgcccctgtcttcccagcaccgcggagacgcagaccaggcctcgaatatcctggcctcttttggactgtctgctagggatctcgacgaactgagtagatatcccgaggacaaaattaccccggagaatctgccccaaattttgctgcagctgaaacgcagacgtacagaagaagggcctaccttgtcttacggcagggacggtcgatcagctacccgcgagccgccctatcgcgtccctagagatgattgggaggagaaaaggcactttagacgcgattccttcgacgacagaggccctagcctgaaccccgtactcgattacgaccacgggtcccgctcacaggagtccgggtactatgatcgcatggactatgaggacgatcgactgcgcgatggagagcggtgccgtgatgattctttttttggtgaaacaagccacaattatcacaaattcgattccgagtatgagcgcatgggccggggccctggtcccctgcaggagagatccctgttcgagaagaaacggggcgccccgccgtcctcaaatatagaagacttccacgggttattgcccaagggctatccacacctctgctcaatctgcgatttgccagttcactctaacaaggaatggtcccaacacatcaacggcgcttctcattcaagacgctgccagctgttgctggagatatatcctgagtggaatccagacaacgataccgggcacaccatgggagatcccttcatgttgcaacagtctaccaacccggcccctggtatcctgggaccgcctcctccatcatttcatctcggtggtccagctgtgggccctcgcggcaacctgggcgccgggaatggcaacctccagggacctcgacacatgcagaaaggccgcgtggagacctctagagtggtacacattatggatttccaaaggggaaaaaacttgagataccagttgctccagctggtggagccgtttggagtgatatctaaccacctgatcctgaacaaaatcaacgaggctttcatagaaatggcgaccacagaagatgcgcaggccgccgtggactattacactactacgccggccctggtgtttggtaagcccgtgcgggtgcacctcagtcagaagtacaaacggattaaaaagcctgagggcaaaccagatcagaagtttgaccaaaagcaagaattgggtcgggtgatacacctcagcaacttgccccacagtggatattcggattctgctgtcctgaagttagcagaaccctacggcaaaattaagaattatatcctcatgcggatgaagagccaggcctttatcgagatggaaaccagagaggacgccatggccatggtagatcactgcctcaagaaggctctttggttccagggtcgctgtgtgaaggtggatctgtcggagaagtacaagaaactggtgctgaggatacctaaccggggcatcgatttgctgaaaaaggacaagtcacgcaaaagatcatatagtcccgacgggaaagaaagccctagtgataagaaatctaagacagatggtagtcagaaaacagaatccagcacagaaggaaaggagcaggaagagaaatcgggggaagacggcgagaaagataccaaagatgaccaaacagagcaagaacccaacatgttgctggagagtgaggacgagctgctggtagacgaggaggaagccgccgctcttctcgaaagcggcagcagcgtgggagatgagacagatttggctaacctgggagacgtggccagcgatggcaaaaaggagcccagcgataaggccgttaaaaaggacggtagtgcgagtgccgccgctaagaaaaagctcaaaaaggtggacaagatagaggagctggaccaggaaaacgaggcggccctcgaaaacggaataaaaaatgaggaaaatactgagccaggcgccgagtcatcggagaatgccgatgatcctaacaaggatacgagcgaaaacgccgatggacagagcgacgaaaataaggatgactatacaatacccgatgagtaccgaattggaccttaccagcccaatgtcccagtcggaatcgattatgtaatcccaaagacgggcttctactgcaagctctgctctttgttctacactaatgaggaggtcgcaaaaaatacccattgctctagtctgccacactaccaaaagctcaaaaaatttctgaacaagctggctgaggaaaggagacagaaaaaagagacttag

SEQ ID NO: 123524 - DNA, 30 bp, synthetic construct
  misc_feature 1..30: note = Description of Artificial Sequence: Synthetic coding sequence
  source 1..30: mol_type = other DNA
atgagcaaatcttttcagcaaagcagctag

SEQ ID NO: 123525 - DNA, 303 bp, synthetic construct
  misc_feature 1..303: note = Description of Artificial Sequence: Synthetic coding sequence
  source 1..303: mol_type = other DNA
atgagcaagagcttccagcagtcgtctctcagtcgtgattcgcaaggtcatggtagagatctcagtgctgccggaatcgggctgctggctgctgctacccaatccttgtcaatgccggcttcactgggaagaatgaatcagggcacagcaaggctggcttctttgatgaatctgggtatgtcgtcctccctcaaccaacaaggcgctcactccgcgctgagttccgctagtactagcagtcataaccttcagagtatcttcaatattgggagccgggggcctctcccgttgtctagccaatag

SEQ ID NO: 123526 - DNA, 324 bp, synthetic construct
  misc_feature 1..324: note = Description of Artificial Sequence: Synthetic coding sequence
  source 1..324: mol_type = other DNA
atgtccaagtcttttcaacagagctctctgtctcgcgacagccagggacatggacgagatcttagcgcggcgggcattgggctgctggctgctgcaacccaatcactctctatgcccgcatccctagggcgaatgaatcagggcactgccagactggcctccctgatgaacctcggtatgagtagctcccttaaccagcagggggcacattctgcgctgtcttcggcgtccaccagctcccataatctacagagcatcttcaacattggttcccgagggcccctgcctctgtccagtcagcatcgcggcgatgctgaccaatag

SEQ ID NO: 123527 - DNA, 1578 bp, synthetic construct
  misc_feature 1..1578: note = Description of Artificial Sequence: Synthetic coding sequence
  source 1..1578: mol_type = other DNA
atgcgcgttttctgtgtggggttgttactattcagcgtcacctgggccgcgcctacattccaacctcagacagagaagacgaaacagagctgcgtcgaggaacagagacaggaggagaaaaataaggataatatcggctttcaccacctgggcaaacgcatcaaccaggagctgtcttctaaagaaaacatcgtgcaagaaaggaagaaggatctgtcactcagtgaagccagtgagaataagggctcttccaagtcccaaaactacttcactaacaggcagcgactcaacaaggaatatagtatctcgaacaaagagaacacacacaacgggctgaggatgtctatttatcctaagtcgactggtaacaagggctttgaggatggggacgatgctatttccaaactgcatgatcaggaagaatacggcgcagccttgatccgcaataatatgcaacacatcatgggcccagtgactgcaattaagctgctgggcgaagaaaacaaggagaacacgccaaggaatgttttgaacatcatccccgcctcaatgaactacgctaaagctcatagcaaggacaagaaaaaacctcagcgggactctcaagctcaaaaatctccagtcaaaagcaagtcaactcaccggatacagcacaacattgactatctgaagcacctgtcaaaagtcaaaaagatcccctccgacttcgagggctccgggtatactgacctacaggagagaggtgacaacgatatttcccctttcagtggagacggacaacccttcaaagatattcctggcaagggggaagccactggccccgatctggaggggaaagatattcagactggtttcgccggaccctctgaggctgagtccacgcacctggacacgaagaaaccggggtacaacgagattccagaaagggaggaaaacgggggcaacacaattggcacgagagacgagactgccaaggaagctgatgctgtggacgtatctctcgtggagggttcaaatgatataatgggatccacaaacttcaaggaactacccgggcgagaaggtaaccgggtggatgcgggtagtcaaaacgcacaccaagggaaagtggaatttcattatcctcccgcgccgtctaaggagaaaaggaaggagggaagttcagatgcagctgagagtacaaattataatgaaatcccgaaaaacggtaaggggagcactcgaaagggggtcgaccactccaaccgtaatcaggccacattgaatgagaaacaaagatttccatcaaaggggaaaagccagggactgccgataccctccagaggcctagataacgagatcaaaaacgagatggactcctttaatggacccagtcacgaaaacattatcacccatggccgaaagtaccactacgtgcctcacaggcagaacaatagcaccagaaacaaaggcatgccacagggaaagggcagttgggggaggcagccgcactcgaatagacggttcagctcacgcaggcgtgatgacagctctgaatctagtgattcaggctcttcctccgagagcgatggggactag

SEQ ID NO: 123528 - DNA, 1578 bp, synthetic construct
  misc_feature 1..1578: note = Description of Artificial Sequence: Synthetic coding sequence
  source 1..1578: mol_type = other DNA
atgagggttttttgcgtgggtctgcttctattcagtgtcacctgggccgcccctaccttccagccccagacggagaagacaaagcagtcatgcgtggaagaacagcgacaggaagaaaaaaataaggataacattgggtttcaccatctgggtaagcgaattaaccaggaactgagcagcaaagaaaacatcgtgcaggaaagaaaaaaggatttaagtctgtcagaagcctctgagaataaagggtcctccaagtcgcagaactacttcacgaatcggcaacgcctaaataaagagtacagtatctcaaataaagagaatacacataatggcctccggatgagcatttacccaaagtccaccggaaataagggtttcgaggacggagatgatgcaatctcaaaactccacgaccaggaggagtatggcgcagcacttatcagaaacaatatgcagcatataatgggacccgtgacagccatcaaactcctgggcgaagaaaataaagaaaacacacctcgcaatgttttaaacatcattcccgcctcaatgaattacgcgaaggcccactccaaagataaaaaaaagccccagcgggacagtcaagcccagaagtctcctgtgaaaagcaagtctactcatcgaatacagcataacatcgactacctcaagcatctttctaaggtcaaaaagatcccatccgattttgagggcagcggctatacagatctgcaggagcgtggcgataacgatatcagtccttttagtggagacggacagcctttcaaagatatcccaggcaaaggcgaagccacaggccccgatttggaagggaaggacatccagaccggattcgcgggcccatcagaggccgagagcacacacctcgatactaagaagcctggctataatgagataccagagagggaagaaaacggtgggaatacaatcgggacccgcgatgagactgctaaggaggccgacgctgtggacgtgtccctcgttgagggttccaatgacatcatgggttcaactaattttaaggagttaccggggcgggaaggcaaccgggttgatgccgggtcccagaacgcccatcaggggaaggtagaatttcactacccgcccgcccccagcaaggagaagcgcaaggaagggtcatcggatgccgccgagagcacgaactacaacgagatcccgaagaatgggaaaggaagcaccagaaagggcgtcgaccacagtaatcggaatcaggctactctgaacgagaagcagcgttttccctccaagggaaaatctcagggtctacccatcccatcccgcggcctggataatgagataaagaatgagatggactcttttaatgggcccagccatgagaacattatcactcatggacgaaaataccactacgttccccatcgacagaacaatagtacaaggaataagggcatgccccagggcaaagggagttggggccgccaacctcatagcaatcgacgattttcatcacgccgaagagatgattcttctgagagctcagatagcggcagttcctccgagtccgatggagactag

SEQ ID NO: 123529 - DNA, 828 bp, synthetic construct
  misc_feature 1..828: note = Description of Artificial Sequence: Synthetic coding sequence
  source 1..828: mol_type = other DNA
atgagggtgttctgtgtgggtttgctcctcttctccgtcacgtgggccgcccccactttccagcctcaaaccgaaaaaactaagcaatcttgcgtcgaagagcagcgtcaggaagagaaaaataaggataatattgggttccaccacctgggcaaaagaatcaatcaggagctttcctctaaggaaaacatcgtgcaggagaggaagaaggatttgtcgctgagcgaagcaagtgagaacaaaggttcctctaagagtcagaattacttcaccaatcgccagaggctcaataaagagtattccataagcaacaaagagaacacccacaatggcctcagaatgtccatttaccccaagtctactggtaataaaggctttgaggacggggacgacgcgattagcaaactgcatgaccaggaagaatatggcgcagccctcattcggaacaatatgcagcacattatggggccagtgacggccattaaactgctgggcgaagaaaacaaggagaacactccacgtaatgtcctcaatattattccagcatccatgaattacgccaaagcacattcaaaagataagaagaagccccagcgcgactctcaggctcagaagagccccgtgaaatctaagagcacccacaggatacagcataacattgattatctgaagcacctgtcaaaggttaagaagatcccgagcgactttgaaggctctgggtacacagatctccaagagcggggtgataacgacatttcccctttttctggcaccgcaaacctactccgaacatttctcgttaaggaaaaactgctcgtgctgacctag

SEQ ID NO: 123530 - DNA, 1239 bp, synthetic construct
  misc_feature 1..1239: note = Description of Artificial Sequence: Synthetic coding sequence
  source 1..1239: mol_type = other DNA
atgtcgatctaccccaagtcgaccggtaacaagggcttcgaggacggtgacgatgcgatcagtaaactacacgaccaagaagaatatggcgctgcacttatcagaaacaacatgcagcacattatggggcctgtgaccgccatcaaactgcttggtgaggagaataaggaaaatactccgagaaacgtgctgaatatcatcccggcaagtatgaactatgccaaagcccactccaaagataagaaaaagccccagcgcgattcccaggcgcagaagagtccagtaaagtctaaaagcactcaccgtatccagcataatatcgattacttgaaacatctcagcaaggtcaaaaagattccatctgatttcgagggatcggggtacacagatttacaagagcgaggcgacaacgatattagcccgttttctggcgacggacagcctttcaaagacattccaggcaaaggagaagccacggggccggacttggaaggaaaggatatacagactggttttgccgggccgtccgaagcggagtcaactcacctggatacaaagaagcccggctacaatgagattccggagcgggaggaaaatggcggcaataccatcggaactcgcgatgagaccgccaaagaagccgacgctgtagacgtgtccctggtagaaggctctaacgatatcatgggctctaccaactttaaagaactgcctgggcgtgaggggaacagagtagacgctggttctcaaaacgcccatcagggcaaggtggagttccattaccccccagctcccagcaaagagaaacggaaggaagggtcttctgacgcagcggagtctaccaactacaacgaaatacccaaaaatggcaaggggtctacaagaaaaggcgtggaccactccaatcggaaccaggctaccctgaacgaaaaacagcgctttcccagtaagggaaagagtcagggattacctatcccaagtagaggcctcgataacgagatcaaaaatgagatggatagctttaacggaccatcccatgaaaatatcattacccatggccgcaaataccactatgttcctcacagacagaataactctactcggaataagggcatgccacaagggaaaggttcatggggcaggcagcctcactccaaccgaagattcagcagtagacgccgagatgacagctctgagagctccgacagtggtagctcatccgaatccgatggcgactag

SEQ ID NO: 123531 - DNA, 1239 bp, synthetic construct
  misc_feature 1..1239: note = Description of Artificial Sequence: Synthetic coding sequence
  source 1..1239: mol_type = other DNA
atgagcatctatccgaaaagcaccggcaataaagggtttgaggacggtgacgacgccatctcaaaactacatgatcaagaagagtacggcgccgctcttattcggaacaacatgcagcacatcatgggtcctgtaacagcaattaagctgctgggagaagaaaacaaagagaacacacctcggaacgtcctcaatatcatccctgcatcgatgaactatgcgaaagcccacagcaaagacaagaaaaagccacaaagggattcgcaggcacagaaaagccctgtgaagtcaaaaagcactcaccgcatccagcacaatatagactacctgaaacatctgagtaaggtgaaaaaaatccccagcgattttgagggtagtggctataccgacctgcaggaacgtggggacaatgatatcagcccctttagtggagacggacaacctttcaaggatattcctggtaaaggagaggcgacaggaccagatttggaaggtaaggatatccagacgggattcgctggaccctccgaggccgaatcgactcatcttgacaccaaaaaaccagggtataacgagatcccagagcgcgaggagaatggcggtaatacaatcggtacacgggacgaaactgcaaaagaagcagacgccgttgacgtgtcgctggttgaggggagtaacgatattatgggctcaaccaacttcaaggaattgcccgggcgtgagggaaatcgagtggacgcaggaagccagaacgcgcaccaaggcaaagtggagtttcattaccccccggcgcctagtaaagaaaaacggaaagaaggaagtagtgacgctgctgagtcaaccaattataacgaaatccctaagaatggaaagggtagtacgcggaagggcgtcgatcactccaacagaaaccaagcgactttgaatgagaaacagcgctttccatccaaaggcaaatctcagggcctgcccatcccctcgcgcggcttagacaatgaaatcaagaatgagatggattccttcaacggtcctagccatgaaaacatcattactcacgggcgaaaatatcactacgttcctcataggcagaacaacagtactcgaaataaggggatgccacaaggcaagggatcctggggccggcagccacactcaaataggagattcagctcccggcgcagagacgactcttctgaatctagcgattctggatcgagcagcgagtccgatggcgactag

SEQ ID NO: 123532 - DNA, 312 bp, synthetic construct
  misc_feature 1..312: note = Description of Artificial Sequence: Synthetic coding sequence
  source 1..312: mol_type = other DNA
atgaagtccttaatcctgctcgcaatactggccgcccttgccgtcgtaaccttgtgttacgagtcccacgagtccatggaatcatatgaactcaacccatttatcaatcgtcgtaatgccaacacctttatctccccacagcaaaggtggcgcgcgaaggtccaggaaagaattcgagaaagaagcaagcccgtacatgaactcaaccgcgaggcttgcgacgattacaggctgtgtgaacgctacgccatggtgtacgggtacaatgccgcatacaaccggtactttaggaagagaagaggaacaaagtag

SEQ ID NO: 123533 - DNA, 945 bp, synthetic construct
  misc_feature 1..945: note = Description of Artificial Sequence: Synthetic coding sequence
  source 1..945: mol_type = other DNA
atgggcccacttatcaaccgatgtaaaaaaattctgctaccaaccaccgtgcctcccgctactatgcgcatttggcttttgggagggctgctcccattcctgttgttgctaagcggacttcaacggcccacggagggctccgaggttgctattaagatcgacttcgatttcgccccaggatcgttcgacgatcagtaccagggctgctcaaaacaggtgatggaaaaactgactcagggagattacttcaccaaagatattgaggcccagaaaaactattttcggatgtggcagaaggcgcacctcgcttggctgaaccagggtaaagtgcttccccagaatatgacaaccacgcatgccgtagccatcctcttctataccctgaattcaaatgtgcactcggattttactagggcgatggcgagtgtggccaggactccccagcagtatgaacgatccttccatttcaagtacctgcattactaccttacctctgccatccagctgttgcggaaagacagtattatggaaaatggaactttatgttatgaagttcattaccgcacaaaagacgtccattttaacgcttacaccggagctacgatccggttcggacagtttctctccacttctctgcttaaagaggaggcacaagagttcggtaatcaaacactgtttacaatatttacttgtctgggagcccccgtgcaatacttcagcctgaagaaggaagtgttgattcccccatacgaactgttcaaagtcatcaatatgtcctatcacccacgcggggactggctccagctgaggagtaccggaaatctctccacatacaattgccagctgcttaaagcttcaagcaaaaagtgcatccccgatcccattgccatcgcaagtctctcattcttgacgtcagtaattatcttttcaaaaagtcgcgtttag

SEQ ID NO: 123534 - DNA, 1749 bp, synthetic construct
  misc_feature 1..1749: note = Description of Artificial Sequence: Synthetic coding sequence
  source 1..1749: mol_type = other DNA
atgagcattgagactctgctggaagctgcccgatttctggagtggcaggctcagcagcagcaacgagcccgcgaagaacaagaacgcctgcggcttgaacaggagagggaacaagagcagaagaaggcaaactctctggctcgactggctcacactttaccggttgaggaaccccggatggaagctccaccactgcctctgtctcctcccgcccctcccccggccccgcctccccctctagctactccggctcccctaacagttataccaatcccggtagtgaccaattcccctcagccattgcctccacctcccccgctgccagcggcagctcaaccattgcctctggctccacgccagcctgctctggtgggggcccctggcctcagcataaaggaaccagcaccgttgccttctcggccacaggtgcccacaccggcaccactccttccagattcaaaggccacaattccacctaacggctcacctaaacctcttcagccactccccacccccgtcctcaccatcgcaccccacccgggagtccaacctcagctcgcaccgcaacagcctcccccacccacactcggaaccttgaagctggccccggccgaggaagtcaagtccagtgagcagaagaagagacctggcggaattggcactagagaagtgcacaataagctggagaaaaatcgaagagcacatctcaaggaatgttttgaaacccttaagcggaatattccaaacgtagacgataagaagactagcaatctttccgtcctgcgcacggccctgagatacatccaatctcttaagcgcaaggaaaaggaatacgaacacgagatggagaggcttgcccgagaaaagattgcgacccaacaacgcctggctgaacttaagcacgaactgtctcaatggatggacgtgctggaaatcgaccgggtgctgaggcagacggggcaacccgaagacgatcaggcttcaacttccaccgctagtgaaggcgaagacaacatcgacgaagacatggaagaggacagagcaggcctggggcctccaaagctctctcataggccgcagccggagcttctgaagagcacactcccccccccatcaacaacccccgctccactgcctccccatccccatccgcaccctcactccgtggcactgcctcccgcgcaccttccagtacagcaacagcagccacaacagaaaaccccactgccagcacccccgcctccccctgccgctccagcacaaactcttgtccccgctcccgctcaccttgtggctaccgcaggtgggggtagcaccgttattgcccacactgcaactacccatgcctctgtgatccagaccgtaaaccacgtattacaggggccaggtggtaaacatatagcacatattgcaccaagcgcaccatcccctgctgtacagctggcacccgcgacccctcccatcgggcatatcacagttcatcccgcaacacttaaccacgtcgcccatctgggctcacaactgcctctttatccccagccagtggcagtgtcccatatcgcccacacactgtcccatcagcaggtgaatgggacagcgggattgggcccccctgctactgtgatggccaaaccggctgtgggcgcccaggttgtccaccatccccagctggttgggcaaacagtgttgaatccagttactatggtgactatgccttccttcccggtgtccactcttaaactggcttag

SEQ ID NO: 123535 - DNA, 1749 bp, synthetic construct
  misc_feature 1..1749: note = Description of Artificial Sequence: Synthetic coding sequence
  source 1..1749: mol_type = other DNA
atgtctattgaaaccctcctggaagctgccaggttcctcgagtggcaagctcagcagcagcagcgcgccagggaagaacaggaacgtctgcggttagaacaagaaagagagcaggagcaaaagaaggccaattcactcgcccgtctcgctcacacacttcccgtggaggaaccacggatggaggcaccacccctaccgcttagcccccctgcaccccctcccgccccacctcctccactggcaactcctgcaccattgaccgttattcccattcctgtggtgaccaactctcctcagccgttacccccaccgccccctctgccagccgcagctcagcccctgccacttgctccccgacagcccgccctggtgggcgctcccgggcttagcatcaaggaacctgctcccctcccttcccggccacaggtacccacacctgcaccactgttgcccgatagtaaggccacaattccccctaatggatctcccaaaccactacagcctctccccaccccagtgcttaccattgccccacaccccggtgtgcaaccccagctcgcgccccagcagccccctcctccgactctgggcaccctcaagctcgctcctgcagaggaggtgaaaagctccgagcagaagaagagacctgggggcataggaacccgggaggtgcacaacaaattggagaagaacagacgcgcccatctgaaggaatgttttgagacgttaaaaaggaacattcccaatgtcgatgataagaagaccagtaatctctccgtgttaaggaccgccttgagatacattcagagtctgaagcgcaaggaaaaagaatacgagcatgaaatggaacgccttgctagggaaaaaatcgccacccagcaaaggctggcagaactcaagcacgagctcagccagtggatggatgtgctcgaaatagatagagtgctccggcaaactggacagcccgaagacgatcaagccagcacctccactgcttccgaaggtgaggataatattgatgaagacatggaggaggacagggcgggactggggcctcctaagctttcccacaggccgcaacccgagctactgaagtctactctgcccccgccatccaccacacctgcgcccttgcccccacaccctcatccccacccccatagcgtggccctgccacctgcacacttacccgtgcagcagcagcaaccccagcagaagacccccctccctgccccgcctcccccgcccgccgcccccgctcaaactctggtgcccgcaccagctcacctggtggcaaccgcagggggaggctctaccgtgattgctcataccgcaactacccatgcatccgtcatccagaccgtcaaccacgtgctccagggccctgggggtaagcatatcgcccacattgctccatcagcgccatcccccgccgtgcagctggctccggcaacgccaccgattgggcatatcacggtccatcctgcaacgctgaaccacgttgcgcatcttggctcccagttgccactgtaccctcagcctgttgccgtgagtcacattgcccacactctcagccaccagcaggtgaacggaaccgcagggctgggccctccggcaaccgttatggcaaaacccgcggtgggcgcccaggtcgtccaccatccacagctcgtgggccagacagtgctgaatccagtaacaatggtgacgatgcccagttttccagtgtctaccctaaaactggcctag

SEQ ID NO: 123536 - DNA, 594 bp, synthetic construct
  misc_feature 1..594: note = Description of Artificial Sequence: Synthetic coding sequence
  source 1..594: mol_type = other DNA
atggagcccttggcctctaacatccaggttttgctccaggccgccgagttcctcgaacgcagggagcgagaggctgagcacggatacgcttcactctgcccccaccgaagccccggtcccattcatagacggaaaaaaaggcccccccaagctcccggggcgcaagatagtggcagatggcgggcccagttaaaacggtgtttagagagattaaagcagcaaatgccgctcggcgccgactgcgcgaggtacacaacactttccttgctgcgtcgggcacgcatgcatattcagaagcttgaagatcaggagcagagggccagacagcttaaagaacgcctgcgttccaagcaacagagcctacaacgccaactcgaacaactcagaggcctggcaggagcagccgagagagaacgtctacgcgcagattccctggattcatccgggctgtcatcagagcgctctgactcagatcaggaggagctcgaggtggacgtggagtctcttgtgttcggaggggaagcagaactgctcagaggcttcgtagcaggacaagaacattcctatagccacggaggcggcgcgtggctatag

SEQ ID NO: 123537 - DNA, 1167 bp, synthetic construct
  misc_feature 1..1167: note = Description of Artificial Sequence: Synthetic coding sequence
  source 1..1167: mol_type = other DNA
atggaacctctcgcttctaacatccaagtcctgctgcaggctgctgagttccttgagcgaagggaaagagaagcagagcatgggtacgcatctctctgcccacatcgatcccctggtcctatccatcgacgaaagaagagaccacctcaggctcctggcgctcaggacagcggtcgctcggtacataatgagctggaaaagcgcaggagggcacaactgaagcggtgcctcgagcgcctcaaacaacagatgcccctcggtgcagactgcgcccgatacactaccctttccctgttgcgccgagcccgcatgcatatccagaaacttgaggaccaggagcaacgggctagacagctgaaggagcggcttcgctctaagcagcaatcgctgcagagacagctcgagcagttacgcgggctggcaggggcggctgagagagagcgtctacgcgccgactccttggactcctctggactgagctcagaaagatctgactccgatcagggagaatgccctgaggccgaaggtttgtgcgggccacgcggagagccaggactcttgactggcccgctcccagctcagcggtcttggcgatggatgtggagggcgtggtgcctcggggtgaggccttcttgctgtggggcttccagccctgcccggtccaccgccacacgcaccgcggcagccccaggatatgatgtgccccatcctgggagggccagcgcattatactcctgccaagcacatctaccaggaaggtctccaccacaggcgttcagggccgcgaggtctcacctgctggagtggactaagcggaccctggtgtgggagcaggttctgccaaaacaccccgcagcgggctgtcaggctggtccgctggagggaaaaggacaggactctagcggcccgccctggacaccagctgggcaggccgcatgggcacgcgctcaagcttttggcagcgctgccccaaaggggactggatctctcctagggctgtttccgtcttggacaaggccaccagccttcgcaagccataagctttattccatcttcataaagtctctattccacaacttcccaagcatcgtgctgcccaatgagaacgggggtaccccaaatcaccgtccaacaggacgcggaaacaatataagttctcatcactag

SEQ ID NO: 123538 - DNA, 582 bp, synthetic construct
  misc_feature 1..582: note = Description of Artificial Sequence: Synthetic coding sequence
  source 1..582: mol_type = other DNA
atggaacccctcgccagtaacatccaggtcctgctgcaagcggccgagttcctagagcgacgagaacgtgaagccgagcacgggtacgcttcgctgtgccctcataggtcccctggccctatccatcgccgtaaaaaaagaccaccgcaagcacctggcgcacaggactctggaaggtctgtccataatgaactggaaaaaagaagaagagctcaactgaagcgatgcctggaaaggctcaagcagcagatgcccctaggcgccgactgcgccaggtatactactctgagcctgctgcgaagagctaggatgcacattcagaaactcgaggaccaggagcaaagggcaagacaattgaaagaaaggctgcgttcgaagcagcaatccctccagcggcagttagaacagttgcgcggtttggccggtgctgccgagcgagaacgactgcgcgcagacagtcttgacagcagcgggctgtcctctgagaggtccgactcagaccaggtgctgccaaacgagaacggtggcactccaaaccatcggccaaccggcaggggcaacaacataagctcccaccactag

SEQ ID NO: 123539 - DNA, 621 bp, synthetic construct
  misc_feature 1..621: note = Description of Artificial Sequence: Synthetic coding sequence
  source 1..621: mol_type = other DNA
atggaacctttggctagcaatattcaggttctcctgcaagccgccgaatttttggaaagaagagagagggaggccgagcatggctacgcctccctgtgtcctcaccggtctcccggaccgattcatagacgcaagaagaggcccccccaagctcccggcgctcaggactctggtaggtccgtccataatgagctggagaagcggagacgcgcacaactgaagcgctgtttagaacgactaaagcagcagatgcccttaggcgccgattgtgctaggtacactaccctctccctgctgcgcagggcgcggatgcatatccagaaactggaagatcaggagcagcgagctcgccagctgaaggaacggctgcgttccaagcagcagagcctgcagcgccagctcgaacagctgaggggtttggccggggccgccgagcgcgagagactgagggctgatagcctggattccagtggtctgagttccgaacggagcgatagtgaccaagaggagctcgaggttgacgtggagtcattagttttcggaggcgaggccgaactattacgcggctttgtcgcaggtcaggaacattcttacagccacggagggggggcgtggctctag

SEQ ID NO: 123540 - DNA, 621 bp, synthetic construct
  misc_feature 1..621: note = Description of Artificial Sequence: Synthetic coding sequence
  source 1..621: mol_type = other DNA
atggagccactggcctccaatattcaggtcctcctccaggctgcagagttcctggaacggcgagagcgggaggcggaacacggatacgcatccctgtgtccccaccgatcccccgggccaatacaccggaggaaaaagcgccccccccaagcacccggagcacaggacagcgggcgctccgttcacaacgagctggagaagagaaggagagcccagctgaaaaggtgtcttgagcgtctgaaacagcagatgccccttggggctgactgcgcccgatataccacactgtcactcctccgccgcgcccggatgcatatacaaaaactcgaggaccaagaacagcgcgcccgacagctgaaagagcgtcttagaagtaaacaacagagtctgcaacgccagctggagcagctgcgaggactcgccggtgccgccgaacgtgaaaggctccgggccgatagcctggactctagcggcctctctagcgaaagaagcgacagtgatcaggaggagctggaagttgacgttgagtccttggtgtttggcggggaggcagaactgctaaggggcttcgtagccgggcaagaacactcatactctcatggaggaggagcctggctctag

SEQ ID NO: 123541 - DNA, 768 bp, synthetic construct
  misc_feature 1..768: note = Description of Artificial Sequence: Synthetic coding sequence
  source 1..768: mol_type = other DNA
atgattcaggcaatacaggtgctacgatttcacttgctcgagttggagaaggtacacgaactgtgcgataatttctgtcatcgctacatctcttgcctcaaaggaaaaatgccgatcgatctggttattgacgagagagatggaagctccaagtccgaccatgaagaacttagcgggagctccaccaatcttgcagaccataatccatcctcgtggcgagatcacgacgacgctacctccacgcactcagcaggaacacccggtccatcatctggcggacatgccagccaatccggggataacagcagtgagcagggtgacggcctggacaattcagtggcctctccgggaacgggcgatgatgatgacccggacaaagacaagaagaggcaaaaaaaaaggggcatcttccccaaggtggcgaccaatattatgcgcgcctggctgtttcagcacctgacacatccctatcccagcgaagagcagaagaagcagctcgctcaggatactgggctaaccattctccaagtgaataattggttcatcaatgctagacggcgcattgtacagcctatgatagaccagtctaacagggccggattcctactagacccgagtgtgagtcaaggagcggcctattccccagaagggcagccgatgggatcctttgtgctcgatggacaacagcacatgggcatacggcccgccggcccaatgtctggaatgggcatgaacatgggaatggatggacaatggcactatatgtag

SEQ ID NO: 123542 - DNA, 9081 bp, synthetic construct
  misc_feature 1..9081: note = Description of Artificial Sequence: Synthetic coding sequence
  source 1..9081: mol_type = other DNA
atggaagagaagcagcagattatccttgcaaatcaggacggagggaccgttgccggcgcagctcccacattcttcgtcatacttaagcagcccggaaacgggaagacagatcagggaattcttgtcactaatcaagacgcatgtgctttagcctcttctgtgtctagtcccgtgaaatctaaaggaaaaatctgtctgccggcagattgtaccgtgggagggatcacagttactctggacaacaacagtatgtggaacgagttctatcaccggtccaccgaaatgatcctgacgaaacagggaaggaggatgttcccctactgtcgctattggattacgggactagattctaatctcaagtacattctggtcatggatattagtcctgtcgacaaccaccggtataagtggaatggccgctggtgggaacccagcggcaaggcagagccgcacgtcctcggtagagtcttcattcacccagagtctccgtccactgggcattactggatgcaccagcccgtcagcttctataagctcaaattaactaataacacactggatcaggaaggccatattatcctgcacagcatgcacagatatctgccaagactgcatttggtgcccgccgagaaggcagtagaggtgatccagctgaacggccccggcgtgcacacgttcacgtttccccagacagaattttttgcagtaacagcttatcagaacatacagatcacccagttgaaaatcgattacaacccattcgccaagggttttagggacgacgggctcaataacaagcctcaacgggacgggaagcaaaaaaattccagtgatcaggaaggcaacaatatcagctcttccagcggacaccgggtcagacttacagaagggcagggatcagaaatccagccaggagacctggaccctctgtcaagaggtcatgagacatccggcaaaggcttagagaaaaccagcctcaatattaagcgagatttccttgggtttatggacactgactcggctctgtcagaagttcctcaactgaagcaggagatctctgagtgtcttattgcttcctcctttgaagatgatagtagagttgctagtcctcttgaccaaaacgggtcattcaatgtcgtcataaaggaggaaccattagacgattatgactacgagcttggggaatgccctgaaggggtcacagttaagcaggaggagacggacgaggagaccgacgtgtatagcaattcagatgacgaccccattctggagaagcagctcaagcgacacaataaggtagacaatcccgaggccgaccatctaagtagcaaatggctcccctcctctccctccggagtggccaaggccaaaatgttcaaactggacaccggaaaaatgcccgtggtctacttggagccgtgcgctgtgacccgatctaccgttaagatttctgaactgcccgataacatgctttccacttctagaaaagataagagcagcatgctcgctgagctggagtacctgcctacctacatcgagaactccaacgaaacagccttttgtttaggtaaggagagtgagaatgggctgcgtaagcattcccccgatctacgcgtggtgcagaaatacccgctgttgaaggagcctcaatggaaataccctgatatctccgacagtattagcacagagcgtattctcgatgactccaaagattctgtcggtgattccttatccggaaaggaggatttaggtcggaagaggactactatgctcaagattgctactgccgcaaaagttgtaaacgccaatcagaacgcatcccctaatgttcctggaaagagaggtcgtccacgaaagctaaaactgtgtaaagccggccgtcctccaaagaacacggggaagtcattgatttctacaaaaaacacgccggtttcccctgggtcaacctttcccgatgtgaagcctgatcttgaggacgtcgatggggtgctgttcgtgtcttttgaaagcaaagaggccctcgatatccacgctgtggacgggaccacagaggagagcagcagcctccaggcatccactacgaatgatagtggatatagagcccgcataagtcagctcgaaaaggaactgattgaagacttgaaaacactgcgacataaacaggttattcatcccggactccaggaagtgggtctgaaactgaatagcgttgatcctacgatgagcatcgatttgaaatacttaggggtccagctgccacttgcgcctgccaccagtttccctttctggaacctcacgggtacaaaccctgcctcacctgatgccggcttcccattcgtgagccgaaccgggaagaccaacgacttcaccaagatcaaaggttggcgcggaaaattccactctgcatcggccagcagaaatgaggggggcaattcagaatcatccctgaagaacagatcagccttttgcagcgataagttggacgagtacctggagaatgaaggaaagctgatggagacctccatggggttctcttccaatgcccccacttccccggtcgtgtatcaactgcctaccaagtcaacctcatacgtgcggaccctggactccgttctgaagaaacagtccacaatctcaccttcaacctcttactccctgaagccacatagtgtgccccctgtgtccagaaaagctaaaagccagaacaggcaggctactttctccggccgcacaaagtcctcctacaagagcatcttgccctaccctgtgtcacccaagcagaaatactcccacgtaatccttggggacaaagtaacgaaaaattcttccggcatcatctctgaaaaccaggccaacaacttcgtcgtgcccaccttggacgagaatattttcccaaagcagatatccctgcgtcaggctcagcaacaacaacagcagcaacagggctcccgccccccaggactttctaaatcacaggtcaaactgatggatcttgaagattgtgccttgtgggaaggcaaaccacgaacttacattacagaggaaagggccgatgtgagtcttaccaccctcctgactgcccaggcttcgttaaagaccaagcccatacacactattattcggaagcgggcccctccttgcaacaatgacttttgtcgactgggatgtgtctgttcctctctggctctggagaagagacaacccgcacattgtcgtaggccggactgtatgttcggctgcacctgtctgaagaggaaggtggtcctggtcaaaggcggaagtaagactaaacacttccagaggaaagccgctcatcgtgaccctgtattctatgatacgctgggcgaggaggctcgcgaggaagaggaaggcattcgagaggaggaagagcagttgaaagaaaagaaaaagagaaagaagctagagtacacaatatgcgaaacggaaccagaacaaccagtgcgacactacccactctgggtcaaggtggagggcgaggtggaccctgagccagtgtatataccaacaccctctgtcatcgagcccatgaagccgctgttgttaccgcagcccgaggtgctcagtcctactgttaaaggtaaattactgacaggcattaagtctcctagatcctatacacccaagccgaatcctgtgatcagggaagaggacaaggatccagtttatttgtattttgagtcgatgatgacttgtgcccgcgtgcgcgtatatgagcgaaagaaggaggaccaacggcagccgtcttcatcatcttcgccctctccctcctttcagcaacagacgtcatgccatagtagtccggagaaccacaataacgccaaagaacctgacagtgagcaacagccactgaagcaactaacgtgtgacctcgaagacgatagcgataagttacaggagaaaagctggaagagctcctgtaatgaaggagaaagtagctccacatcctacatgcatcaacgtagtccaggaggacctaccaagctcattgagataatttctgattgcaactgggaggaggacagaaacaaaattttaagtattctcagccagcacatcaactcgaatatgcctcagagcctcaaagtcgggagctttatcatagaactcgcatcccagaggaaaagtcgaggcgaaaagaacccgccagtgtactcgtctcgcgtgaagatctctatgccatcttgtcaggaccaggatgatatggccgagaagagcggctcagaaacaccggatgggcccctctcccccggcaagatggaggatatttcccctgtacagaccgatgcactggacagcgtgcgggagcggctgcatggagggaagggccttcctttctacgctggcctatcacccgcgggaaaactcgtcgcatataagaggaagccaagttctagtacatccgggttgatacaggtggcctcaaacgcaaaagtcgccgcctcccgaaaaccccgaacgctcttgcctagtacttccaacagcaagatggctagcagctccgggaccgctactaaccgacccggaaagaacctgaaagcttttgtgcccgccaaacgcccaatcgctgcaagaccttctccaggaggagtgttcacacagtttgttatgagcaaagttggtgcgctgcaacaaaaaattccgggggtgagtaccccacagacactggccggaacccaaaaattttccatcagaccctctcccgtcatggtggtgactcctgttgtgagctccgaacctgttcaggtttgtagtcctgtcaccgccgccgttaccactaccaccccgcaggtttttctggagaacaccacagcagtcacaccaatgacggcgatttctgatgtagaaaccaaagaaacaacatattcatccggagcaacaactactggcgtagtcgaggtgtcagagaccaacactagcacaagtgtgaccagcacccagtctacagcgaccgtgaacctgacaaagactactggcattaccaccccagtggccagcgtagctttcccgaagagtcttgtggcaagcccaagtactattactctgcctgtcgccagcaccgcatcaaccagcctcgttgtggtaaccgcagccgcctccagcagcatggtcaccacacccactagctctctcggctctgtgcctattatactgagtggaattaacggttcaccgcccgtctcccagcgtcctgagaacgccgcccagatccccgtggcgaccccacaggtctcccctaacacagtgaagagggccgggccccggttattgcatcctaacggacagatcgtacagttgctgcctctgcaccaattgcgcggctctaatacacaaccaaatcttcaacccgtgatgttcaggaacccaggatcggtgatgggaattcgcttacctgctccaagcaagccaagtgaaactccacccagttctacgtcaagcagcgctttcagtgtcatgaacccagtgatacaggctgtgggtagctcatccgccgtgaatgtgattacacaggcaccaagcctcctctcttccggagcctccttcgtgtcccaggctgggacacttacccttcgcatttcgccgcccgagccacagtcttttgcaagtaagaccggctcagaaacaaagataacctactctagtgggggccagccggtaggcaccgccagcctgataccactacaaagtggcagtttcgcattactgcagttacccggacaaaagcctgtaccaagcagcatcctgcagcacgtcgccagccttcagatgaagagggaaagtcagaacccagaccagaaagatgaaacaaacagtatcaagagagagcaagaaacaaaaaaggtgctccagtctgaaggagaggcagtcgacccagaagctaatgtgattaagcaaaattcaggagctgccacttccgaagaaacactgaacgacagccttgaggatcgaggcgaccaccttgatgaagaatgcttaccagaggagggatgtgcaactgtgaagccttctgagcactcctgcatcactgggtctcacacagaccaggactacaaggacgttaatgaagaatacggcgctcgcaaccggaaatcctctaaagaaaaagtggcggtattggaagtgagaacaatttctgagaaagcctctaacaagactgtacagaatctatcgaaagtgcaacaccagaaattgggcgatgtgaaagtggaacaacaaaaaggatttgataatcccgaggaaaattctagcgaattccccgtcacattcaaggaggagagtaaattcgaactttccggaagcaaggtgatggagcagcagagcaaccttcagcccgaagccaaagaaaaggagtgcggagactctttggagaaggatagggagcggtggaggaagcacttaaaaggccctttaacgcgaaagtgcgttggcgcttcgcaagagtgtaaaaaggaagcagatgagcagttaatcaaagaaaccaaaacctgccaggagaattccgacgttttccagcaggagcaggggataagcgatctattggggaaatccggcatcactgaagacgccagggtccttaagactgagtgcgattcttggtcgagaatttccaatccctctgccttcagcatagtgccacgtagagctgcaaagagctcacgaggaaacggccacttccaggggcacctgttgctcccgggtgagcaaattcaaccaaagcaggaaaaaaaaggtggccgctcctctgcggattttacagtgctcgacctggaggaggatgatgaagacgacaacgaaaagactgatgatagcattgatgaaatcgtggatgtggttagcgactaccagagtgaggaggtggacgacgtcgagaagaataactgtgtggagtacatagaggacgatgaggaacatgtggatattgagaccgttgaagagctctcagaggagatcaacgtcgcacaccttaaaaccacagctgcacacacgcagagcttcaaacaacctagttgtacccatatctcagctgatgagaaggctgcagagaggagtcgtaaggctccacctattccactcaaactgaagcccgattattggtccgacaaactgcagaaggaggccgaagcatttgcatactaccgacggactcacaccgctaatgagcggcgtcggagaggtgagatgcgcgatttgttcgagaaactgaagatcactctgggcctgctgcactcttctaaggtcagcaaaagtctgatcctgacgcgggccttttcagagatccagggattgaccgaccaagccgataaattgatcgggcagaagaacttgctgacccgcaaaagaaatatcttgataaggaaggtgagctcactctcagggaagacagaggaggttgtattaaagaaacttgagtatatttacgcaaagcagcaggcactcgaggctcagaagagaaagaagaagatggggagtgacgagttcgacattagccccaggatctcgaagcagcaggaggggagttctgcgtcttcggtggacttgggtcagatgtttattaataatcggcgggggaagcctctcatcctgtctcggaagaaggatcaggctactgagaatacttcacctcttaatacgccacacacaagcgccaatctggttatgaccccccagggacagttactcactctaaaggggccactgtttagcggtcccgtggtcgccgtgagccctgacttgctggagtctgacctgaaacctcaggtggcgggtagcgcggtggcactacctgagaatgatgacctatttatgatgccacgaatagtcaacgttacatctctggccaccgagggggggctggttgacatgggcggaagcaaataccctcacgaagtacctgattccaaaccaagcgatcatctcaaggacaccgtccgcaatgaggataacagtctggaggataaaggccggatctcatcgcgtggtaacagagatgggagggtaaccttgggccctacacaggtgtttctggctaataaggactcgggttacccccaaatcgtggacgtcagcaacatgcagaaagcacaggaatttctgcccaaaaagatcagtggcgatatgcgagggattcagtacaagtggaaggagagcgagtcgaggggtgagcgagtcaagtcaaaggactcttccttccataaactcaagatgaaggatctcaaggacagctccatagagatggagttacgcaaggtcacttccgctatcgaagaggctgccctcgatagttctgagcttctgacaaatatggaagatgaggatgatacagatgaaactctgactagcctgctaaatgagattgctttcctgaaccaacagctgaatgacgattcagtggggctggccgagcttcctagttctatggatacggagtttccgggtgacgcgcgacgcgcctttatcagtaaggtgccgccaggcagtcgagctacgttccaagtagaacatctgggcacaggtcttaaggagctcccagatgtccagggcgaaagcgactcgatcagtcccctgttgctgcatctcgaagatgacgacttctccgagaacgaaaagcagctcgctgaacccgcttcagaacctgacgtgctgaagatcgtaatcgactccgaaattaaggactcactgctctcgaacaagaaagcaatcgatgggggaaaaaacacttcagggctgcctgccgaacccgagagtgttagctcaccacccacattacacatgaaaaccgggctcgagaacagcaatagcacagatacattatggcgccctatgccaaaactggctcccctcggcctgaaggtggccaacccctcttctgacgctgacgggcagtctctgaaggttatgccatgtctagctccaatcgccgctaaagtcggtagcgtgggccacaagatgaacctgaccggtaatgaccaggaaggcagagaaagtaaagttatgcccaccctagcaccagttgtggcgaagctggggaattccggagcgagcccctccagcgccggcaagtag

SEQ ID NO: 123543 - DNA, 8571 bp, synthetic construct
  misc_feature 1..8571: note = Description of Artificial Sequence: Synthetic coding sequence
  source 1..8571: mol_type = other DNA
atggaagaaaagcaacagattattttagcgaatcaagacgggggcaccgtagccggtgctgcccccactttcttcgttattttgaagcagcccggcaatggaaagaccgaccagggcatacttgtcaccaatcaggatgcttgcgctcttgcctcctccgtgagtagcccagttaaatctaagggcaaaatctgcttgcctgccgattgcaccgttggaggaatcaccgtgaccttggacaacaactcgatgtggaacgagttttaccaccgatctacagaaatgatcctcactaagcaggggcggcgtatgttcccatattgccggtactggatcactgggctggacagcaacttgaagtatatattggtgatggacattagtcctgtggataatcaccggtataaatggaatggtcgctggtgggagccctctggaaaggctgaaccccacgtactggggcgggtgtttattcaccctgagtctccctccaccgggcattattggatgcaccagccggtttccttttacaagctgaaactgaccaacaatacacttgaccaggaggggcatatcatccttcattctatgcataggtatcttccaaggctgcatctggtgccggctgagaaagccgtggaggtgattcaactaaacggccccggcgtccacaccttcacatttcctcagactgaattcttcgccgtgaccgcctaccagaacatacagatcacccagctgaagatagactataacccttttgctaaaggctttcgcgacgacggcttgaacaacaagcctcagagggacggaaagcagaaaaactcgtcggaccaggaaggcaataatatatcatcctcgtcaggccatcgagttaggctgaccgaagggcagggaagtgaaatccaacctggcgacttggacccactcagtagagggcatgagaccagcggtaagggactggagaagacatctctcaacatcaaacgcgattttttgggttttatggacacggacagcgcattaagcgaggttcctcagctgaaacaggagatctctgaatgtctgattgcttcttccttcgaggatgatagtagagtggcctcgcccctggatcagaacggctcattcaacgtggttatcaaggaagagccactggacgattacgattatgaactgggagaatgtcctgagggagtaacagtgaaacaggaggagacggacgaagaaacagatgtgtattctaattctgatgatgatccgattctggaaaaacaactgaagcgccacaacaaggtggacaatcccgaggccgaccacttgagctctaagtggctgcctagctcgcccagcggcgtggcaaaagcaaagatgttcaaacttgatactggaaaaatgcccgtagtctaccttgagccatgtgccgtaacacggagcacagtgaaaatatctgagctgcctgataacatgctttcgaccagccgaaaagacaaatcctccatgctagccgaactggaatatttaccgacctacatcgagaactctaacgagaccgcattttgtctcgggaaggagtcagaaaatggactgaggaaacatagcccagacctgcgcgttgttcagaagtatcccctcctgaaggaaccccagtggaagtatccggatatttcggacagcatatccaccgaacggatcctggatgactctaaggatagtgttggcgactcattatcgggaaaagaagatttaggccgcaagagaaccaccatgcttaaaatcgccactgctgccaaggtggtcaacgccaaccagaacgcctcgcccaatgtacccgggaaacgcgggcggcctcgaaagcttaaactgtgcaaggctggcagaccgcccaaaaataccggaaaaagtctgataagcacaaaaaatactcccgtatctcccggttccacattcccagacgtcaagccggatctggaggatgttgacggcgttctcttcgtatccttcgagtctaaggaggcactggacatacacgctgtggacggcacaaccgaggaatccagctcattgcaagcaagcacaacgaacgactccgggtatagggctaggattagtcaactcgagaaagaactgatcgaggacctcaaaacattaagacataagcaggttatccaccccggactccaggaggtgggcctgaagttgaactcagtggatcccaccatgtcgattgatctcaagtatttgggagtgcagctgcccttagcacctgccacctcatttcccttctggaacctgaccgggaccaatccggcaagccctgacgcaggtttcccatttgtgtccagaaccgggaagacaaatgactttaccaagataaagggatggaggggcaaatttcattctgccagtgcatcacggaatgagggtggaaattcagagtcctctctcaaaaataggagtgccttttgctcggacaaattggatgagtatctggaaaacgaaggtaaattaatggagacaagtatgggattctcttctaacgctccaacaagccctgttgtgtaccagctgccgactaaatctacctcctatgtgcgtacgcttgacagcgtgcttaaaaagcagagcacaatctcccctagcacttcatacagcttaaagccacactcggttcctcctgtgagccggaaagcaaaatctcagaatcgccaagctactttctccggccggactaaatctagctataaatccattctcccatatcccgtatctccaaagcaaaaatactctcatgtgatactcggcgacaaggtaaccaaaaactcttcaggaatcatttctgaaaatcaggctaataacttcgttgtgccgacactggacgaaaacatcttcccaaaacagatttctttgcgccaggcacagcaacagcaacagcaacagcagggtagtcgcccacctggactgagcaagagccaggtaaaattaatggatctggaagattgtgctctgtgggaaggcaaaccgagaacttatattaccgaggagcgagccgacgtgtccctgactaccctccttaccgcgcaggctagcctcaaaacaaagcccattcacactatcatccggaagcgtgctccaccctgtaataacgacttctgccgtctcgggtgcgtctgctcctccctcgccttggagaagcgccagccggcccactgtagacggcctgattgcatgttcggttgcacatgcctaaagaggaaggtggtcctggtgaagggaggcagcaaaaccaagcacttccagcgcaaggccgctcaccgcgatcccgtgttctatgatactcttggcgaggaggcacgcgaggaagaagaaggcatccgggaggaagaggagcaactaaaagagaagaagaaacgtaagaaactagagtatacgatttgcgaaacagaaccagagcaacccgtacggcattaccccctatgggtgaaggtggagggtgaggtggatcccgaaccagtttacatccccacgcccagcgtaattgaaccgatgaaaccgctactattgcctcagccggaagtgctttcccccacggtcaagggtaagctgctgacagggatcaaatcaccgcgatcttacacacccaaacctaatcctgtgattagagaggaagacaaggaccctgtttacctgtattttgaaagcatgatgacctgcgcaagagtgcgggtctacgaaagaaagaaggaggatcagcggcagccgagtagtagtagctctccctcaccttctttccagcaacaaacgtcatgtcactcatcccccgaaaatcacaacaacgcaaaggaacctgacagcgagcagcagccgttgaagcagttgacatgtgatctagaagatgatagtgacaagctgcaggaaaagagctggaaatcatcctgcaatgaaggagaatccagctccacaagctatatgcaccagcgcagtcctggcggtccaacgaaactgattgagatcatttctgattgcaattgggaagaagatcggaacaagattttgtccattctctctcagcacataaattcaaacatgcctcagagccttaaggtcggatcctttatcattgagctcgcctctcagagaaagtcaagaggtgagaagaacccccctgtttattcctcaagggtgaaaatcagcatgccatcatgccaggaccaagatgatatggccgagaaatccgggagtgaaaccccagacgggccactctccccgggcaagatggaagacatttcgcctgtgcagactgatgccctcgatagcgtccgagaacgtctgcacggagggaaaggtctgcctttctacgctggcctgtctccagcggggaaactcgtggcatataagcgcaagcccagctcatccacttctggcctgatccaggtggcttctaacgccaaagtcgcagccagccggaaaccccgcactcttttaccatccacaagtaactccaagatggcttcgagcagcgggaccgctacaaatcggcccggcaagaatctgaaagcttttgtccccgcaaaacgcccaatagaaaacgcagctcagattcccgtggctacacctcaggtttcccctaacactgtgaagagggcggggcctcgcttgcttctgataccggtccaacaaggatcccccacccttcggccagttagcaacacacaactgcaggggcaccgcatggtgctccagcccgtccgctctccctctggcatgaatctgttcaggcaccccaatggccagatagtacagcttttgcctcttcaccagctccggggaagtaatactcaacccaatctccagcccgtcatgttccgcaaccccgggagcgtgatgggcatccgactccccgccccaagcaaaccaagcgagacaccaccctcatcgaccagcagcagtgcgttttctgtgatgaaccccgtcatccaagccgtcggtagctcctccgcggtaaacgtgataactcaggctccttccctgctgagttctggggcctccttcgtgtctcaagctggcacgctgactctcagaatttctcctcctgagcctcagagctttgctagtaaaacaggttccgagactaagattacttacagcagtggggggcagcctgtagggactgcgagccttatacctctccaaagcggctcctttgctctgcttcagttgcctggccagaagcccgtgcccagctccatcctccagcatgtagccagcttgcagatgaagcgagaatctcaaaatcccgaccaaaaggatgagactaattcaataaagcgagagcaagaaactaagaaagtcttacagtctgaaggcgaagcagtcgatccggaggctaatgtaatcaagcagaacagcggagcggcaacgtcggaagagactctgaacgacagccttgaggatcgaggggaccacttggatgaggaatgtcttccagaggagggttgtgctacggtgaagccctcagaacatagttgcataaccggaagtcataccgatcaggactacaaagacgtaaatgaagagtatggtgctagaaacagaaagagctctaaagagaaggtggctgtcctcgaagtgcggactatatccgaaaaagcctctaacaaaacggtgcagaatctgagcaaggtgcagcaccagaagctcggagacgtgaaagtggagcagcagaaaggcttcgataacccagaagagaacagtagcgaattccctgtgacttttaaggaggagtctaaatttgaactcagcggatcaaaggtcatggaacagcagtctaacctgcaacccgaggcaaaggaaaaggaatgcggcgacagtctcgaaaaggaccgggagagatggcggaagcacctaaaaggccctctgactcggaagtgtgtgggggcttctcaggaatgtaaaaaggaggccgacgaacagctgattaaagagacaaaaacatgccaggaaaacagtgatgttttccagcaggagcagggcatcagcgacttactggggaagtcaggaatcaccgaagatgcacgggtgctaaagactgagtgcgactcttggtccaggattagcaatccatccgcgttcagtattgtccctcgaagggccgccaagagttcccgcggcaacggacacttccagggtcacttgctactgcctggtgaacagattcagccaaaacaggaaaaaaagggcgggcgctctagtgctgattttacagtcttggatctcgaggaggacgatgaggacgataacgaaaagaccgatgattctatcgacgaaattgttgacgtcgttagcgattatcaaagcgaagaagtggatgacgtggaaaaaaataactgcgtggagtatattgaagatgatgaggagcatgttgatattgagacggtggaagagctctcagaggagataaacgtggcacacctgaagaccacagccgcacatactcaaagtttcaaacagcctagctgtacacacatttcagccgatgaaaaagccgctgaacggtctcgcaaggcaccgcctatcccccttaagttgaagcctgattactggtccgataagcttcagaaggaagcggaggctttcgcgtactaccgccgcacccacacagccaatgagcgccgtcgacggggggagatgagggacctctttgaaaagctcaagatcactctggggctcctgcatagcagcaaggtctccaagtcccttattctgactcgtgcatttagcgagattcagggacttaccgatcaggccgataaactgatcgggcagaaaaacctgctgacaaggaagcggaatattctgatacggaaagtctcaagcctaagcggcaaaactgaagaggtggtcctcaagaagcttgaatacatctacgctaaacaacaggcattggaggcccagaaaagaaaaaagaagatgggaagtgatgaattcgacatcagcccgcggatctccaaacaacaggagggaagttccgcttcttccgttgatttaggccagatgtttatcaataacagacgtggaaaacctctgattctgagcaggaagaaagatcaagctaccgaaaatacgagtcccctcaacacccctcacacctcagccaacctcgtaatgacacctcaagggcagttgctaaccttgaaggggcccttattcagcgggcctgtggtagcggtgtcacccgatctgctggaaagtgatctcaaacctcaggtggctggatcagcggtcgctcttccagagaacgacgatctctttatgatgcctcgcattgtcaacgtcacctccttagcaaccgaagggggcctcgtcgatatgggcggttccaaatacccacatgaggtacccgatagtaaaccctctgatcacctcaaagatactgtccggaacgaagacaattctctcgaagataaaggccgcatatcctcaagaggcaaccgggatggacgggtgactctggggccgactcaggtgtttttagccaataaggactccggatacccgcagatcgtcgacgtgtccaacatgcagaaagcacaagaatttctccccaaaaagatcagtggtgatatgaggggaattcaatacaagtggaaggagagtgaaagcagaggcgaacgcgtgaaaagcaaagattcgtccttccataaacttaagatgaaagaccttaaagactcctccatcgagatggaactgaggaaggtgacatccgcaatcgaagaggctgctctggattcttccgaattactaactaacatggaggacgaagacgatacagatgaaaccttaacaagcctgctgaacgagatcgcatttttaaatcagcagctcaacgatgattcagtgggtctagctgagctgccaagtagcatggacaccgaattcccaggagacgctaggcgcgcctttattagtaaggtgccacctggtagtcgggcaaccttccaggtagaacacttgggcactggactgaaggaacttcccgatgtacagggagagtccgactctatctcccctttgttactacacctggaggatgacgatttttccgagaatgaaaagcagctggctgagcctgctagtgagccagacgtgttgaaaatcgtcattgattccgagataaaagactctctcttaagtaacaagaaggcaatcgacggcggcaagaatacttccggccttcctgctgaacctgagtctgtgtcatccccgcctactcttcacatgaagacgggcctggaaaatagtaatagcaccgacactctgtggcggcctatgccaaaactggctccacttgggttaaaggtggccaatcctagctccgacgcagatggacagtcactgaaagtgatgccatgcttggcacctattgctgccaaggtcggaagcgtcggacataaaatgaacctcactggtaatgatcaggaaggaagagagagcaaagttatgcctactctggcacctgtggtagcaaaattgggaaacagcggagccagtccctcaagcgctggcaagtag

SEQ ID NO: 123544 - DNA, 687 bp, synthetic construct
  misc_feature 1..687: note = Description of Artificial Sequence: Synthetic coding sequence
  source 1..687: mol_type = other DNA
atggagcgagtgaagatgattaacgtccagagactcctggaggctgctgaattcctagaacgccgcgaacgcgaatgcgaacatgggtacgcctctagttttcccagcatgccaagcccccgcttgcaacacagtaagccaccacggaggttatctcgggcccagaagcatagctcaggaagctctaatactagcactgctaacaggtctacccataatgagctcgagaagaaccgccgcgcccacctgagactgtgtcttgaacgccttaaggtgctgatccctctagggcccgactgcacccggcacaccaccttgggcctacttaacaaggctaaggcccatatcaagaagctggaagaggccgagaggaagtcccaacatcagttggagaacctggaacgggaacaacgctttttgaaatggcgtctggaacaattgcagggaccccaagaaatggagaggatcaggatggacagcattgggagcacaatcagctccgaccgaagcgactctgaacgcgaggaaatagaagtagatgtggagagcacagagttcagccacggagaggtcgataacatttctactacctctattagtgatattgatgaccactcaagcctccccagtatcggctcagacgagggttattctagcgcctccgtcaagctcagctttaccagctag

SEQ ID NO: 123545 - DNA, 888 bp, synthetic construct
  misc_feature 1..888: note = Description of Artificial Sequence: Synthetic coding sequence
  source 1..888: mol_type = other DNA
atgggcaagcggggtcgaccaaggaaggaagcacggtgcgagggcgctgggcttgcacctgctgctccgcctgcagtgccaccagcggttgctgctcctcaacctcctgccctaccggaggaccctgctggggcaaaacccagatgtcctttttctgacatctttaatacgtcagaaaattctatggagaaacatatcaacacttttttgcagaatgttcagatcttactcgaggcagcttcctatctcgaacagattgagaaagagaataagaagtgtgagcacggatacgcatcctctttcccttccatgcctagcccccgactgcagcactcaaaaccacctaggagattatctcgcgcccagaagcacagctccgggtctagcaatactagtactgctaaccggtccacacataatgaactggaaaagaatcgcagagcacatcttcgcctgtgcctcgagagactgaaggtgcttattcccctgggccccgactgcactaggcatacaacactgggcctgctcaacaaggccaaagctcacattaaaaagctcgaggaagccgaacggaagtcacagcatcagctggaaaacttagagcgagaacagcgattcctgaagtggcgcctcgagcagcttcaaggcccccaggagatggaacggatccgaatggactcgataggctcaacaatatccagcgacagaagcgactccgagcgggaggagatagaagttgatgtagaatccaccgaattcagtcacggcgaggtcgataatatttccacaacttcaatcagcgatattgatgatcattcgtctctccctagcatcggttctgacgagggctactcctctgcctctgtgaagcttagttttactagctag

SEQ ID NO: 123546 - DNA, 549 bp, synthetic construct
  misc_feature 1..549: note = Description of Artificial Sequence: Synthetic coding sequence
  source 1..549: mol_type = other DNA
atgccctctccccgtcttcagcactcaaagcccccacgacgacttagccgtgctcagaaacacagttcgggatcctcaaacacatcaacagcaaacaggcgcgcccacttgcggctgtgcctggaacgactcaaagtattgattcctctggggcctgactgcaccagacacacaaccctgggacttcttaataaggcgaaggcccatattaagaagctggaagaggcggaacgtaagagtcagcaccaacttgaaaatctggaaagggagcagcgattcctaaaatggagactcgaacagctccagggcccacaggagatggaacgaatcaggatggattctatcggctccacaatctcgtctgacaggtccgattccgagcgcgaggagatcgaagtggacgtggaaagtacagagttttcccacggggaagttgataatatcagcactactagtattagcgacattgatgaccacagttcactgccttcgattggatctgatgaaggatactccagcgcttcagtaaagctctccttcacttcttag

SEQ ID NO: 123547 - DNA, 579 bp, synthetic construct
  misc_feature 1..579: note = Description of Artificial Sequence: Synthetic coding sequence
  source 1..579: mol_type = other DNA
atgccaagccctcggctgcaacactctaaaccccctcgtaggctgtcgagggcccagaaacacagtagtgggtcttctaatactagcaccgctaacagaagcacacataatgagcttgaaaaaaaccggcgtgcccacctccgcctgtgtctggaaaggctgaaagtgctaatcccgttaggtcccgactgtacacgccacacgacactgggtctgctgaacaaagcaaaggcccatattaagaaattggaggaagccgagcggaagagccaacaccaactggaaaacctggaacgtgaacagcgattcctgaagtggaggctggaacagttacagggaccacaagagatggaacgaattaggatggactccatcggatcgacaatctcctctgataggagcgactcagagagggaggaaatcgaagttgatgtggagtccacggagttctcccatggggaggttgacaacattagcaccacctccatctcagatattgatgaccactcctctctcccatcgatcgggtcagatgagggctacagttctgcttccgtgaagttgtcctttacaagctag

SEQ ID NO: 123548 - DNA, 579 bp, synthetic construct
  misc_feature 1..579: note = Description of Artificial Sequence: Synthetic coding sequence
  source 1..579: mol_type = other DNA
atgccttctccaaggctgcagcattctaaaccaccacgccgactatctagggctcagaaacattcaagcggatcatccaatacctccaccgctaatcggtcaactcataacgagctagagaagaacaggcgcgcgcatttgcgcctatgtctagagagattgaaggtgctgattccacttgggcctgactgtacacgtcatacaacccttggcctgctcaacaaagctaaggctcacataaagaaactggaagaggccgaacggaagtcccagcaccagctagaaaacctggaacgcgaacaacgattcctcaagtggaggttagagcaacttcaaggccctcaggaaatggaaagaatcaggatggattcaataggatcaaccataagtagcgatcgctcagacagtgagagagaagaaatcgaagtcgatgtcgagtctactgagttctctcacggagaggtcgataatatctcgacaacaagcatcagtgatattgatgatcacagctctctcccttcgatcgggagcgacgagggatactcctctgccagcgtgaaactgtcttttacctcatag

SEQ ID NO: 123549 - DNA, 579 bp, synthetic construct
  misc_feature 1..579: note = Description of Artificial Sequence: Synthetic coding sequence
  source 1..579: mol_type = other DNA
atgccctcaccccgtctgcagcactccaaaccaccccgacggctctctcgggcccaaaagcactctagcgggtcaagtaacacatccacggcaaataggagcacccacaatgaactggaaaagaacaggcgggcgcatctacgcttgtgcctcgagcgcttgaaagtgcttattccattgggccccgattgcactaggcacaccactctgggtctgctgaataaggccaaggctcatattaaaaaacttgaggaggcagagcgtaagtctcagcatcagctcgagaatctggagagagaacagaggttcctgaaatggcgcttagaacagctccagggcccacaggaaatggagagaatcagaatggacagcatcggtagcactataagctcggaccggtctgatagcgaacgagaagagatagaggtggacgtagagtctaccgaattcagccacggcgaggtcgataacatttcaacgactagcattagcgatattgacgatcatagctccctgccgtccattggatcggatgagggttacagctcagcatccgtgaaactgtcattcacaagctag

SEQ ID NO: 123550 - DNA, 657 bp, synthetic construct
  misc_feature 1..657: note = Description of Artificial Sequence: Synthetic coding sequence
  source 1..657: mol_type = other DNA
atggaacgggttaagatgatcaatgtgcaacggttactcgaggcagctgagtttttggaaagaagggagagggaatgtgagcatggatacgcttcaagctttccaagcatgccaagcccccgcctgcaacactccaagcctccacggcggctgtcacgggcgcaaaaacattcaagtgggagcagcaatacgtctaccgcgaatcgaagagctcacctgagattgtgcttggagcgactgaaggtcctaattcccttgggtcctgattgcacacgacataccactctaggcctacttaataaagctaaggctcatatcaagaaactggaggaagccgagcgcaagtctcaacaccagctcgagaacctggagcgcgaacagcggtttcttaagtggcgcctggaacagttgcagggtcctcaggaaatggaacggatccgaatggattccattggaagcactattagcagtgaccggagtgactccgagcgtgaagaaatcgaagtcgacgttgaaagcaccgagttctctcacggagaggtcgacaatatttctaccaccagcatctctgatatcgatgaccacagctctttgccaagcataggatctgatgagggatactccagcgcctctgtcaaactcagttttactagctag

SEQ ID NO: 123551 - DNA, 657 bp, synthetic construct
  misc_feature 1..657: note = Description of Artificial Sequence: Synthetic coding sequence
  source 1..657: mol_type = other DNA
atggaacgggtcaagatgatcaatgtccagagactccttgaggccgctgaatttctggagaggcgcgaacgagagtgtgagcacggttatgcatcctccttcccgtctatgcctagtcctcgactgcagcactcgaaaccaccacgccgcttgtctagagcccagaagcattcctccggatcttcgaacactagcacagctaatagaagggctcatcttagattgtgccttgagagattgaaggtgctgattcccctgggtccggattgcacacgacacacgacactggggctacttaataaagctaaggcacatatcaagaagctggaagaagccgaaaggaagtcgcagcaccagctggagaatctagagcgggagcaaaggtttttgaaatggcggctcgagcagctccagggaccccaggagatggagcgaattaggatggattctatcggttccactatttctagcgataggtccgactctgagcgcgaagagatagaggtcgacgttgagtctacagagttctctcatggtgaagtcgataacatcagtacaaccagcatctcagatatcgacgatcatagttcccttccctccattggctccgacgagggatacagctccgccagcgtcaaactctcctttacgagctag

SEQ ID NO: 123552 - DNA, 357 bp, synthetic construct
  misc_feature 1..357: note = Description of Artificial Sequence: Synthetic coding sequence
  source 1..357: mol_type = other DNA
atgcctagcccccgtcttcagcacagcaagcctccccggcgactgtcccgtgcccagaagcacagcagtggaagcagcaatacctccacggccaacaggtcaactcacaacgaactcgaaaaaaacaggagagctcacttgcgcctgtgcctggagcggctaaaggtgctgatcccgttgggccctgattgcaccagacacactaccctaggccttctcaacaaggccaaagcccacataaagaagttggaggaagcagaaaggaaaagccagcatcagcttgagaacctggaaagagagcagagattcctgaaatggcgattggagcagcttcaggggcctcaagaaatggaatag

SEQ ID NO: 123553 - DNA, 681 bp, synthetic construct
  misc_feature 1..681: note = Description of Artificial Sequence: Synthetic coding sequence
  source 1..681: mol_type = other DNA
atgggcaaacgagggcgaccaagaaaagaagcgcgatgcgaaggcgcaggcctggcgccggccgcgccgcccgccgtgccccccgcggttgccgcgcctcagcctcctgcgctgcccgaggatccagcgggcgcgaagccaagatgcccctttagcgatatctttaatactagtgagaactccatggagaaacatatcaataccttcttgcaaaatgttcaaatcctcctggaggcagcttcttacttagagcaaattgagaaagaaaacaaaaagtgtgagcatgggtacgcctcttcttttccctctatgccatccccacgattgcagcattctaagccaccccggcgcctgtcgagggctcagaaacattcctctggatccagcaacacatcgacagcaaataggcgagctcatttgagattgtgtctcgaacgacttaaggtgctgattcctctcggtcccgactgcacgaggcataccacccttggcctcctgaataaagccaaggctcatattaaaaagttagaggaggcagaacgtaagtctcaacatcagttggaaaacctggaaagggaacagcgctttcttaaatggaggctcgagcagctgcaaggccctcaggaaatggagcggatccgcatggacagcatcggctctactatcagttctgatagatag

SEQ ID NO: 123554 - DNA, 897 bp, synthetic construct
  misc_feature 1..897: note = Description of Artificial Sequence: Synthetic coding sequence
  source 1..897: mol_type = other DNA
atgactgagccaggggccagcccggaagatccttgggtcaaagcaagcccagtcggtgctcacgcaggggaaggccgcgctgggagagcacgggccaggcgcggagcaggccgcagaggcgccagtctcctgtctcctaagtctcccactctgtccgtgccccgaggctgccgtgaagactcgagccatccagcctgcgccaaggtcgagtacgcttacagtgataatagtttagacccggggttgttcgttgaaagcacacggaaaggaagcgtcgtgagtcgcgctaattctatcggcagcacaagtgctagctcggtaccaaacactgacgatgaggatagtgactatcatcaagaagcctacaaggaatcctataaagatcgcaggcggagggcccatacccaggccgaacagaagcgccgcgacgctataaagagaggctatgacgatctgcagaccatagtgccaacgtgtcagcagcaagatttctccatcggatcccagaagctgagcaaagccatcgtgttgcagaagaccatcgactacatccagttcctgcataaggagaaaaagaaacaggaggaggaagtgtccacccttcgtaaggacgtaaccgccctcaagatcatgaaagtgaactatgaacaaatcgttaaagcacaccaggacaatccacacgaaggagaggaccaggtgtcagatcaagtgaaatttaatgtctttcaggggattatggatagtctgtttcaaagttttaacgcttccattagcgtagcaagcttccaggagttaagtgcctgtgtctttagctggatagaggaacactgcaaaccccagactctgagggaaatcgtgatcggggttctgcaccagctcaaaaaccaactgtattag

SEQ ID NO: 123555 - DNA, 645 bp, synthetic construct
  misc_feature 1..645: note = Description of Artificial Sequence: Synthetic coding sequence
  source 1..645: mol_type = other DNA
atgaccgagccgggggcttcccctgaggatccttgggtgaaagtagagtatgcttacagcgacaactcgctggaccctgacgatgaggactctgactatcaccaagaggcatacaaagagtcctataaggatagaagacggagagcccatactcaggccgaacagaagcgtagagatgccatcaaacgtgggtacgatgatttacagaccattgttcctacctgccaacagcaggatttcagcatcggaagccagaaactgtctaaggcgatcgttctccaaaagactattgactatattcagtttctgcataaagaaaaaaagaagcaggaagaagaagtaagtacattacgcaaggatgtgacagccctcaagatcatgaaagtgaactacgaacagatcgttaaggcgcatcaggacaatccccacgagggcgaagatcaggtgtcagatcaggtgaagttcaacgtgttccagggaatcatggactctctgttccagagcttcaacgcatctatctctgtggcttccttccaagagcttagtgcctgcgtcttcagctggatagaggaacactgcaaaccgcaaaccctcagggagattgtcatcggagtgctccatcagctgaagaaccagctttattag

SEQ ID NO: 123556 - DNA, 735 bp, synthetic construct
  misc_feature 1..735: note = Description of Artificial Sequence: Synthetic coding sequence
  source 1..735: mol_type = other DNA
atgactgaacctggtgcctctccagaggatccttgggtgaaagtggaatacgcgtattctgataattctctggatcctggcctgtttgtggaatccacaagaaagggctctgttgtctctcgagccaacagtatcggaagcaccagtgcatctagtgtcccaaatacagacgatgaggatagcgattaccatcaagaagcctataaggagagctacaaagataggcgacgccgagcacatacgcaggctgaacagaaaaggcgggatgctattaagcggggttatgatgacctccaaacaattgtaccaacctgccagcagcaagatttctccatcggatctcagaagttgagtaaagcaatagtcctccagaaaacaattgattacatccagttcctgcacaaggagaaaaaaaaacaggaggaggaggtctcgactctccgaaaggacgtcaccgcgctcaagatcatgaaggtgaactacgaacagatcgtgaaagcccaccaggataacccacatgagggcgaggaccaagtgtccgaccaggttaaatttaacgtctttcagggtattatggatagtctgtttcagtcctttaacgcttcaatatcggtggcgtcctttcaggagctctccgcatgtgtgtttagctggatagaggagcattgcaagccccagaccctccgcgagatcgttatcggcgtgcttcaccagctcaagaatcagttgtattag

SEQ ID NO: 123557 - DNA, 2826 bp, synthetic construct
  misc_feature 1..2826: note = Description of Artificial Sequence: Synthetic coding sequence
  source 1..2826: mol_type = other DNA
atggctgaggccaatcccagaagaggcaaaatgcgcttccggaggaatgccgccagctttcctggcaatttgcacctcgtgttggtactgcgtccaactagctttctgcagcggacatttacggacatcggattctggttctctcaggaagatttcatgctgaaattgcccgtggtgatgctttcctccgtgagcgacttactcacttacatagatgacaagcagctcactcccgaattgggggggaccctgcagtactgtcattcagagtggataatctttaggaatgccattgaaaacttcgccctgacagtgaaggaaatggcccagatgctgcaatcatttggcaccgagctagccgaaacagagctccctgacgatatcccatctattgaagaaattttggccatccgggccgaaagatatcatctgttaaaaaacgacataaccgccgtcacaaaagaaggtaaaatcttgctgacgaaccttgaggtgccagatactgagggcgctgtcagcagtcgtctagaatgccatcgccagataagcggggattggcaaacgatcaataagctccttacgcaggttcatgatatggaaacagcattcgatggcttctgggagaaacaccagttaaaaatggagcagtacttacaactgtggaagtttgaacaagactttcagcaactggtgacagaagtggagtttttgctgaaccagcaggcagaactggcggatgtgaccggaactatcgcacaggtgaagcagaaaataaagaagctcgagaaccttgatgagaactctcaggaactcctgtccaaggcgcagttcgtcatcttgcatgggcacaaactcgcagccaatcatcattatgctttggacctcatatgccagaggtgtaatgagctcaggtacctgtccgatattctagttaacgagatcaaggccaagcgaatacagctcagccgaaccttcaagatgcacaaactcttgcagcaagcacggcagtgttgcgatgagggggagtgcctgctggccaatcaggaaatagacaagttccagagcaaggaggatgctcaaaaagctttgcaagatattgaaaatttcttagaaatggccttgccattcatcaactacgaacccgagacgctccagtatgaattcgatgtcatcctgtccccggagctgaaagtacagatgaagaccattcagctaaaattggagaacatacgaagtatattcgaaaatcagcaggctgggtttagaaatctggccgataaacacgtgcgacccatccagttcgtagtccctactccggagaacttagtgaccagcggaacaccgttttttagcagcaagcaggtgggggttggctattcttttttccaggcctgtaaactgttcagcaaaggcaaaaagacctggcggcagaatcagtctaatctgaagattgaggtagtgccggactgccaagagaaacgttcctccgggcccagttccagcctggacaatggcaattctttggacgtgctgaagaatcacgttctgaacgagctgattcaaaccgagcgggtatatgttagagagctgtacaccgtactgctcggataccgtgccgagatggataacccagaaatgtttgatctgatgccacccttactcaggaataagaaagacatactttttgggaatatggctgagatctacgagttccataatgatatattcctgtcgtcactggagaactgtgcccatgctccagagcgtgtgggaccctgttttctggaaaggaaggacgactttcaaatgtatgcgaagtattgtcagaataagcccaggtccgaaacgatttggcggaaatactcagagtgcgcttttttccaggagtgccagcggaagctgaagcaccgacttcgcctggacagctatcttctaaagccagtgcaacgtatcaccaagtatcagttactcctgaaggaactccttaagtattccaaagactgcgaaggctccgccttgctgaaaaaggccctggacgccatgctggatttgttgaagtctgtcaatgatagcatgcaccagatcgccattaacggctatatcggcaacctgaacgagttaggtaaaatgatcatgcaaggaggctttagcgtgtggattggacataagaagggggccaccaagatgaaggatctggcccggttcaagccgatgcagagacacctgttcctctacgagaaagccattgtgttctgcaaacgcagagtggagtcgggggagggaagtgacagatacccttcttacagtttcaaacattgctggaagatggacgaagtcggcatcaccgagtatgtcaagggagacaatcggaagtttgagatctggtatggcgaaaaagaggaggtctacattgtgcaggcctctaacgtggatgtgaaaatgacctggttgaaagaaattcgaaatatactgctcaaacagcaggaactcctgacggtgaaaaagcggaaacagcaggaccagctaaccgagcgcgacaagtttcagatcagcctgcaacagaacgacgaaaagcaacagggggcctttatttcaacagaagaaaccgagctggaacacacctcaactgtcgtagaagtgtgtgaagctatagcctccgtccaagcagaggcaaacactgtgtggacagaggccagccaatccgcagagatcagcgaggaacctgcagagtggtcctccaactatttttatcccacctacgatgaaaatgaagaggagaatcgccctctcatgaggcctgtaagtgaaatggccctgctctactag

SEQ ID NO: 123558 - DNA, 2583 bp, synthetic construct
  misc_feature 1..2583: note = Description of Artificial Sequence: Synthetic coding sequence
  source 1..2583: mol_type = other DNA
atggctgaggccaaccctcggcgcgggaaaatgcgctttcgtcgaaacgccgcttcattccccggtaacctccatctggtcttagtgctacgacctaccagcttcctccaacggacgttcacagacatagggttttggttctctcaagaagactttatgctgaaactgcctgtggtgatgttgagttccgtgagcgacttgctaacatatatcgacgataagcagctgacacccgagttgggcggcactctccagtactgtcattcggagtggatcattttccggaacgctatcgaaaatttcgcattaaccgtgaaggaaatggcacagatgctgcagagctttggaactgaactggccgagacggagcttccggacgatattccttcaattgaagaaattctggcaataagagctgaacgataccacctgcttaagaatgacatcaccgccgttaccaaagagggcaagatccttctaacaaacctagaagtacctgataccgagggagccgtgagctctcgcttggaatgccaccggcagatttcaggtgactggcaaaccatcaataaactgctgactcaagtgcatgatatggaaactgccttcgatggtttctgggagaagcaccagttaaaaatggaacagtacctccagttgtggaagttcgagcaggactttcaacagcttgttaccgaagtcgaattcctgctgaatcagcaagcggagttggccgacgttacaggtaccattgcccaggtgaaacagaagatcaaaaagcttgaaaacctggatgagaattctcaggaacttctgtctaaagcacagtttgtcattctgcatggccataagctcgccgctaatcaccactacgccctcgacctcatctgccagcggtgtaacgagctgcggtacttgagtgatatactcgttaacgagatcaaagccaagcgcatccagcttagccgaacatttaaaatgcacaagctattacagcaggcaaggcaatgttgcgacgagggcgagtgtctcctggcaaaccaggaaatcgataaatttcagagcaaggaagatgctcagaaagccctccaggacattgaaaatttcttggagatggccctgccctttatcaactatgagcctgagacattacagtatgagtttgacgtcattctcagtcccgagctgaaagtgcagatgaagacaattcagttgaaactcgaaaatatcagatcaatatttgaaaatcaacaagccggtttcaggaacttggctgataaacacgtgcgccccatccagttcgtggtgcctactccagagaatctggtcactagcggcaccccattctttagttctaaacagggaaagaagacttggagacaaaaccagtcaaacttgaaaatcgaggtggttccagactgccaggagaagaggtctagcggcccatcaagctccctggacaacggcaactccctggatgtgctgaagaaccacgtcttgaacgagttgattcaaacagagcgagtatacgtgcgggaattgtacactgttctgttgggttatcgggccgaaatggacaacccagaaatgttcgaccttatgcctcccctcctacggaacaaaaaggatattcttttcggtaacatggctgagatatacgaattccataatgacatattcctgtcctctctggaaaattgtgctcatgcccctgagcgtgtggggccatgcttccttgagagaaaagacgacttccagatgtatgcaaaatactgccagaacaaaccgaggtctgaaactatctggcggaagtattccgaatgtgccttctttcaagaatgtcagagaaagttgaaacacaggctcagactggatagctacctgctgaaacctgtacagcgcattactaagtaccagttattacttaaggagcttctgaagtactctaaagactgcgaggggagtgccctcctgaagaaagcgctggatgcgatgcttgatctcctgaagtccgtcaacgattctatgcaccagatcgctataaacggctacataggcaacctcaacgaacttggaaaaatgattatgcaaggggggttctccgtgtggatcggacataagaaaggcgctactaaaatgaaggacttggctcggttcaaacccatgcagcgccacttattcctttacgaaaaggctatcgtcttctgtaaacgccgggtggagagcggtgaagggagtgacaggtacccttcttatagcttcaaacattgttggaaaatggacgaggtaggtatcacagaatatgtcaaaggcgataacaggaaattcgagatctggtacggtgaaaaggaagaggtgtatattgttcaagccagcaatgtggacgtgaagatgacatggctgaaggagatcagaaacattttgcttaagcagcaggaattgctgaccgtgaaaaagaggaaacagcaggaccagctgactgagcgagacaagtttcagatcagcctgcagcagaacgacgaggacttgtgtagacgctggctgtcttacattgacgaagccaccatgtctaacgggaaatag

SEQ ID NO: 123559 - DNA, 2778 bp, synthetic construct
  misc_feature 1..2778: note = Description of Artificial Sequence: Synthetic coding sequence
  source 1..2778: mol_type = other DNA
atggccgaagctaatccccgccggggcaagatgcgcttcagacggaacgctgcctcttttccgggcaatcttcacctggtcctggtcctgcggcctacctcgttcctgcaacgaaccttcaccgacattggattttggttctcccaggaggacttcatgctcaaactgccagtggtcatgctcagcagtgtgagtgacttgctgacatacatcgatgacaaacaactgacgcctgagcttggtgggaccttgcaatactgccattctgaatggatcattttcagaaatgcaatagagaactttgcgttaaccgtgaaagaaatggctcagatgttgcagtccttcgggacagagttagccgagactgagcttcccgatgacataccttccatcgaagagattctggcaatccgggctgagcggtaccatttattgaaaaatgacattacggccgtgactaaggagggaaagattctgctgaccaatctggaggtgccagacacagagggcgcagtgagcagccggctggaatgtcacaggcagatttctggtgactggcagactattaacaagctgctgactcaagttcacgacatggagactgctttcgacggcttctgggaaaagcatcagcttaagatggaacagtacctgcagctttggaaattcgaacaggacttccagcagttggtgacagaggtcgagttcctgctgaatcagcaggcggaactcgccgacgtgaccggaacaatcgctcaagtgaagcagaagataaagaaattagagaacctggacgagaattcccaagagctgctgtcaaaggcccaattcgtaatccttcacgggcacaaacttgccgcgaaccaccattatgctctagaccttatctgccagcgctgtaacgagctcaggtatcttagcgatatcctggtgaacgagatcaaggccaagagaattcagctatcacgaacattcaaaatgcacaagctactacagcaggccaggcagtgctgtgatgagggcgagtgcctgctggcaaaccaggagatcgataaattccagagcaaggaggatgctcagaaggctcttcaggatatcgaaaacttcctggagatggcgctacccttcatcaactatgagcccgagaccctgcaatatgagttcgacgtcattctcagccccgaactcaaagtccagatgaagaccatccagctgaagcttgaaaatattcgatccatctttgagaaccagcaagccggctttaggaatctggcggataagcatgtaagacctatacaatttgtggttcctaccccggagaacctcgttacaagtggaacccctttcttctcaagtaaacaaggcaagaagacttggagacagaatcagtctaacctcaaaattgaagtagtgccagattgtcaggaaaaaaggtcctctggaccaagctcatctctcgataacggaaatagtctggatgtgctcaagaaccacgtactcaatgagctcatccagacagaaagggtctacgtgagggagctctatactgtgttgttgggttacagggctgaaatggataatccagaaatgtttgacctgatgccccccctgctgcgtaataaaaaagatatcttgtttggcaacatggcagagatctatgagttccacaacgacatatttctatcaagcctggaaaattgtgctcacgccccagagagggtcggaccctgttttttagagcggaaagacgacttccagatgtacgcaaagtattgtcagaacaagccgcgaagcgaaacaatctggcgaaaatacagcgagtgcgcattcttccaggagtgtcagcgaaagctgaaacatagactccgactggatagctacctcctcaaacccgtgcagaggatcactaaatatcaacttctgttaaaggaactgctgaaatacagtaaggactgcgaaggctcagcattgctgaagaaggctctggatgccatgctggatctgctgaagtccgtgaatgactccatgcatcaaattgcaataaatgggtacatagggaacctgaatgaactggggaagatgataatgcagggtggctttagcgtctggatcggacacaagaaaggtgccaccaagatgaaagatttggccagatttaaacctatgcagcgccacctcttcctttacgagaaagcgatagtgttctgcaagaggcgtgttgagagtggggagggatctgaccggtatccgtcctactccttcaaacactgttggaaaatggatgaagtgggcattaccgagtatgtcaagggcgacaaccgtaagtttgaaatctggtacggcgagaaagaggaagtctacattgtgcaggcctccaacgtggatgttaaaatgacctggctgaaagaaatccgtaacatcctcttaaagcagcaagagttactgacagtcaagaagcgcaaacagcaagatcaactgaccgaaagggataaatttcagatcagcctccagcagaatgatgaaaagcagcagggcgctttcattagtaccgaggaaacagaactcgaacatacctccaccgtggtggaggtatgcgaggccattgcttccgtccaggccgaagctaacacagtttggacagaagcatcacaaagcgcggagatctcagaggagccggccgaatggagttcgaactatttctacccgacctacgacgagaatgaagaagagaatcgtccgctgatgaggccagtgtcggaaatggccctgttatattag

SEQ ID NO: 123560 - DNA, 3213 bp, synthetic construct
  misc_feature 1..3213: note = Description of Artificial Sequence: Synthetic coding sequence
  source 1..3213: mol_type = other DNA
atgcctcaggcggcggcctcggctccatggacaagcgtaagctgtggccgtatccctggactaccccagaatccggatggctgcacctttatgcccatagcccaagctatccccctccaagtggatatggctatggcactgcagcgcgttcgcattgctgaaaaatacggaaaaaattacctatgtctgctgcaggccgtctttgttgccgagacggatctcctgttacgaattaaggatatcagtcactttttgatgcaggatatcgcttttcttagtggtggtagggggaaggacaatgcatggattatcactttccccgagaactgtaattttcggtgcatccccgaggaggttatcgcgaaagtgttgacgtacctaaccagtatcgcgcgccagaacggaagcgacagccggtttactatcatcctggatcgtcggttagacacttggtcaagcctgaaaatttcccttcagaagattagcgctagcttccctggcaaccttcacctcgtccttgtcctgcggcccacatccttcctgcagcgcacgtttactgatatcggcttctggttctcacaagaagacttcatgctcaaactgccagtcgttatgctgtctagcgtgagcgacctcttaacttatatcgacgacaaacaactaacgcctgaacttggcggcacgctccaatactgccacagtgaatggattatattccggaacgccatcgagaactttgccttgaccgttaaagagatggcccagatgcttcagtcattcggcaccgaattagcagagacggagctccccgacgacatcccctccatcgaagaaattctggctattagagccgaaagatatcatctgttgaagaacgatattactgctgtgacgaaagaggggaagatcctattgacaaatctggaggtaccagacacagaaggagccgtgagcagtagattagagtgtcaccgccagatctccggcgattggcagaccatcaataagctcctgacacaggtacatgatatggaaaccgcctttgacggattctgggagaaacaccagttaaaaatggagcagtaccttcagttatggaaattcgagcaggactttcagcagcttgtcacagaagtggaatttttactgaatcaacaggccgaactcgctgacgtgactggcacaattgcccaggtgaaacagaagattaaaaaactggaaaatcttgacgagaactcacaggaactcctcagcaaagctcagtttgtcatactccacggccacaagctggctgcaaatcaccactacgcattagatctcatatgccagaggtgtaatgaattacgatacctttcagacatcctggtaaatgagataaaagcaaagcgaattcagctctccagaacattcaagatgcataaactgcttcagcaggcacgacagtgctgcgacgaaggggaatgcctgctcgcgaaccaagaaatagacaaattccagagcaaagaagacgcacagaaagcgttacaggatatcgaaaactttctggaaatggccctgcccttcatcaactatgaacctgagacccttcagtacgaattcgatgtaatcctgagtccggaactgaaggtacaaatgaaaaccatccaattaaagctggagaacatccgctccatctttgaaaatcagcaggcgggcttccggaatcttgccgataaacatgtgcgtcccatccagttcgtggtgccaacaccagaaaacttagtcacaagcggaacaccattctttagcagcaagcaaggaaagaagacctggcgacagaaccagtcaaatctaaaaattgaagtggtgccggattgccaagaaaagcgctcttctgggccgagcagcagcctggataatggcaattcactagatgtcctgaaaaaccacgtgctcaatgagttaatccagaccgagcgggtgtatgttagggagctgtataccgtgttgttgggataccgggcggaaatggacaatcccgagatgttcgatttaatgcctccactgttgcgaaataagaaggatatattgttcggcaacatggccgagatttacgaatttcacaacgatatcttcctctcctcactagagaactgtgcacacgcccctgaacgcgtagggccgtgcttcttagagaggaaggacgactttcagatgtacgccaaatattgccaaaataaacctagatcggaaaccatctggcggaagtacagcgagtgcgcctttttccaagaatgccagaggaaactcaaacacaggttgagacttgactcctaccttttaaaaccggtgcagaggatcactaaataccaattactgttaaaagagctgcttaaatactcaaaagactgtgagggctccgcactgctgaaaaaagccctcgatgcaatgctcgatctgctcaaatctgttaacgacagcatgcaccagattgccattaacgggtatatcggcaacctcaatgagctaggcaaaatgattatgcaaggcggattctctgtgtggattggacataagaagggggccacaaaaatgaaggatctagctcgcttcaagcctatgcagagacatctgtttctgtacgagaaagcaatcgtgttctgtaaacggcgtgtggaaagcggcgagggcagtgatcggtacccttcctactctttcaagcactgttggaaaatggatgaggtgggaattactgagtatgtgaagggggacaaccggaaattcgagatatggtatggagaaaaggaggaggtttatatcgtacaggcttctaatgtcgatgtgaaaatgacttggttgaaagaaattcggaacattttgctgaaacagcaggagctgctgacagttaaaaaaaggaaacaacaggaccagcttactgagagggataagtttcaaatttctcttcagcagaacgacgaaaagcaacaaggggcttttatctcaacagaggaaaccgaactagagcatacctcgacggtggtggaagtctgcgaggccattgcttccgtgcaggcagaagcaaacactgtctggaccgaggcatctcagagcgctgagatctccgaggagcccgccgagtggagtagcaactacttctatcccacttacgatgagaacgaggaggaaaaccggccactgatgagacccgttagtgagatggccttgctctactag

SEQ ID NO: 123561 - DNA, 2958 bp, synthetic construct
  misc_feature 1..2958: note = Description of Artificial Sequence: Synthetic coding sequence
  source 1..2958: mol_type = other DNA
atgcaggacattgcgtttttaagtggtggtcgaggcaaggataatgcttggatcattacgttccccgagaactgcaattttaggtgcataccggaagaagtgatagctaaagttcttacttatttaacgagcatcgctagacagaatggaagcgactcgagattcacaatcattttggacaggcgtttggacacatggagctctttgaagatttcacttcaaaagatttcggcgtccttccctggaaatttgcacctcgtgctagtattgcgcccgacttcgttcctccagcgaacgttcaccgatattggtttttggtttagtcaagaggacttcatgcttaagctgcccgtagttatgctgtccagcgtctctgatttacttacctacatcgatgataagcagctgacccctgaactgggaggcactcttcagtattgccactctgaatggattatctttagaaacgctatcgaaaactttgcactcacagtcaaggagatggcccagatgctccagtccttcggaaccgagcttgcagagaccgaactacctgatgacatcccatccatcgaggagatccttgccatcagggcagaaagatatcacttgctcaagaatgacattaccgccgtcacaaaagaaggaaagattcttttaaccaacttagaagtgccagatactgagggcgcagtaagctcaagactggagtgtcataggcaaattagcggagactggcaaaccataaataagcttcttacccaggtgcatgatatggaaacagcctttgatggattctgggaaaagcatcaattgaaaatggagcagtatctccagctgtggaaatttgagcaggactttcaacagctcgttacggaggtggaatttctcctcaatcagcaggctgagctcgcagacgttacaggcacaatagcccaagtcaagcaaaagattaagaaactcgagaatctcgatgagaacagtcaggagctccttagcaaggcgcaatttgtgatccttcacggacataagcttgcagctaaccaccactacgctttggacttgatctgccagaggtgcaatgagctgcgctacctatcagatatcctggtgaacgaaattaaagccaagagaattcagctgagcagaaccttcaagatgcataaactgctgcagcaagcaagacagtgttgtgacgaaggagagtgcctgctggccaaccaggaaattgataagttccagagcaaagaggacgcgcaaaaggctttgcaggacatcgagaacttcctagagatggccctgccatttatcaactacgagcccgagacactgcaatatgagtttgacgtgatactctcccctgagctgaaagttcagatgaagaccattcaattgaagttagagaacatccgctctatctttgagaaccagcaggctgggttcaggaacctggcagataagcacgtgagaccaattcagttcgtcgtgcctaccccagagaatctcgtgacatccgggaccccctttttttcctcgaagcagggaaagaagacctggcgacagaatcagtctaacttgaagatagaagtggttcctgactgccaggaaaagcgatcaagtgggccgagctcctccctggataacggcaactctcttgacgttctgaagaatcacgttcttaatgagctgatccagaccgaacgggtctatgtacgggagctctacactgtgttgctgggataccgagcagaaatggataatcctgaaatgttcgatcttatgcctccactgctgcgcaataagaaagacatcctgttcgggaacatggcggagatttacgaatttcataacgacatttttctgtccagcttggagaactgtgctcatgcccctgagcgggtggggccgtgtttcctggagcgtaaggacgattttcagatgtatgcaaagtattgtcagaataagccaagatccgaaaccatctggaggaagtattccgagtgcgcattttttcaggaatgtcagagaaaactgaagcatagacttcgtttagatagttacctgctcaagcccgtccagaggatcactaaataccagctgttactgaaggagttgttaaagtattctaaggactgtgaggggtctgcgctgctcaagaaagctcttgatgctatgctcgatctgctaaagtccgtcaatgattccatgcatcaaatagccattaacggctacatagggaacctgaacgagctcgggaaaatgattatgcaaggggggttttcggtgtggatcggacacaaaaaaggggctacaaagatgaaggatctggcccggttcaagccaatgcagaggcatctatttttatacgagaaggctattgtcttttgcaagaggcgggttgagtctggcgaaggctccgacaggtaccctagttactcttttaagcattgttggaagatggatgaagtggggataaccgagtatgtcaagggtgacaacagaaaattcgaaatctggtatggagaaaaggaggaagtgtacatcgtgcaagcatctaacgttgatgtgaagatgacctggctgaaggaaattcgaaacatactgctgaaacaacaagaactcctcaccgtgaagaaaagaaaacagcaggatcagctaaccgagagagataagtttcagataagcctgcagcagaacgacgaaaaacaacagggcgctttcattagtaccgaagaaactgagttggagcatacctcgaccgtggtagaagtttgtgaggcaatagcaagcgtgcaagccgaagccaataccgtgtggaccgaggcttcacagtccgccgaaattagtgaagagccagccgagtggagttctaattatttctatccaacctacgatgagaatgaagaggaaaatcgccccttgatgagacccgtgagcgagatggcactgctatattag

SEQ ID NO: 123562 - DNA, 1290 bp, synthetic construct
  misc_feature 1..1290: note = Description of Artificial Sequence: Synthetic coding sequence
  source 1..1290: mol_type = other DNA
tagcacgtgctcaacgaattgattcagacagaacgggtgtacgtccgagaactgtataccgtgctcttgggctatcgcgctgaaatggacaacccagagatgttcgacctcatgccaccactgctgcggaataagaaggatattttgttcggtaatatggccgaaatctatgaattccacaacgacattttcctttcctcccttgaaaactgcgctcatgccccagagagggttggaccttgtttcttggagagaaaggacgacttccagatgtacgcaaaatattgccaaaataaaccaagatcagagactatctggcggaagtactccgaatgcgcgtttttccaagagtgccaaagaaagttgaaacatcgactcaggctggacagttacctattaaagcccgtgcagcgcattaccaagtaccagctgctcctgaaagaactgttgaagtactccaaggattgtgaaggcagcgccctgctgaaaaaggccttggacgctatgctcgacttgctgaaatccgtgaatgattccatgcatcaaattgctatcaacggctacatcggcaacctgaatgagctcggtaaaatgattatgcagggcggattcagtgtttggattggtcataagaaaggcgccaccaagatgaaagatctcgcacggtttaagcctatgcaaagacatttattcctgtacgaaaaggctatcgttttttgcaagagacgggttgaatccggggagggatccgatcgttatccttcctacagcttcaaacattgctggaagatggacgaagtgggcatcactgaatacgtaaagggcgacaaccgaaaatttgagatctggtatggagaaaaagaggaagtgtatatcgtccaagctagtaatgtcgacgtgaaaatgacctggttaaaagagattcgcaacattctgctgaagcagcaggaattgctcactgttaaaaaaaggaagcaacaagaccagctcacagagcgagacaaatttcagatcagtttgcagcaaaacgatgagaagcagcagggcgcgttcatttctactgaggaaacagaactcgaacacacctcaactgtggtcgaggtttgtgaggctattgcttctgtccaggctgaggcaaataccgtctggacagaagcgagtcagtcagccgaaatttctgaagaacccgctgagtggagttctaattatttttatcccacctatgatgagaatgaagaggaaaaccgacctttgatgcggcctgtttcagagatggctctgctctattag

SEQ ID NO: 123563 - DNA, 1587 bp, synthetic construct
  misc_feature 1..1587: note = Description of Artificial Sequence: Synthetic coding sequence
  source 1..1587: mol_type = other DNA
gtgcagatgaagaccatccagctgaagctggagaatatcagaagcatcttcgaaaatcagcaagcgggcttcaggaatcttgcagacaaacacgtcaggccaatacagttcgtcgttccaaccccggaaaacctcgtgacgtctgggacccccttctttagtagcaaacaggggaagaaaacatggcggcagaatcagagcaatctgaagatcgaggtggtaccggattgtcaagagaagcgatcttccggccccagcagtagtctcgataacggcaactccctcgatgtgctgaaaaatcatgttctgaacgagttgatccagacagagcgggtttacgtcagggaattgtacaccgtgctgctgggctaccgtgcggaaatggacaaccctgagatgttcgatctgatgccaccgttgcttcgcaacaagaaagacatcctcttcggaaatatggccgaaatctatgaatttcataacgacatttttctgagcagcctagaaaattgtgctcacgctccagagagagtgggcccgtgtttcctcgaacgcaaggacgattttcagatgtatgctaaatactgtcaaaacaagccgcgcagcgaaactatttggcgaaaatactcagagtgtgcattcttccaggagtgtcagcggaaattgaagcacagattgcggctggactcttacttgctgaagccggtgcagcgaattacaaagtaccagctgttactgaaggaactcctgaaatactccaaggactgcgaaggatcagctctgctcaaaaaagccctagatgccatgctggacctactgaagtccgttaatgattctatgcaccagatcgcgatcaacggatacatcggaaatctgaatgaactgggcaagatgatcatgcagggaggctttagtgtttggatcggacacaaaaagggcgctacgaaaatgaaggaccttgccaggtttaagccaatgcagcgccatctgtttctttacgaaaaagccatcgtcttttgtaagaggcgtgtagagagtggggaaggctcagaccggtatccaagttattcgttcaagcattgttggaagatggacgaagtgggtatcaccgaatacgtaaagggcgataatcggaaattcgagatctggtacggagaaaaggaagaggtgtatatagtgcaggccagcaacgtggatgtcaaaatgacctggttgaaggaaataaggaatatccttctgaagcaacaggagctactgacagtgaagaagaggaagcaacaggaccagctgactgaaagagataagtttcaaatttctctgcagcagaacgatgagaagcagcagggtgcattcatttcaaccgaggaaactgagttggaacacaccagtaccgtcgtggaggtatgcgaggctattgcttcagttcaggcagaagctaacactgtctggacagaggcaagccagagcgccgagataagcgaggagcccgcagaatggagctcaaattacttttatcccacgtacgatgaaaatgaggaggaaaatcgacctctgatgaggccagttagcgagatggcccttctgtactag

SEQ ID NO: 123564 - DNA, 3006 bp, synthetic construct
  misc_feature 1..3006: note = Description of Artificial Sequence: Synthetic coding sequence
  source 1..3006: mol_type = other DNA
atgcaggatattgcctttcttagcggagggcgcggaaaggacaatgcgtggattattaccttccccgaaaactgtaacttcaggtgcatccctgaagaggtgattgctaaggtgctgacctacttaaccagcatcgcgagacagaatgggtccgattcaaggttcacgatcatattggatcgtagactagacacgtggtcctctctaaagatatcgctgcagaagatcagcgcctcgttcccgggtaacctgcatctggtgctggtgctccgtccaacgtcctttctccagagaaccttcacagacatcggcttttggttcagtcaggaagattttatgcttaaacttcccgttgtcatgttatcatctgtgtctgatctgttgacttacatagatgacaaacagctcacccccgaactgggtggcaccctgcagtattgccatagtgaatggattatttttagaaacgccattgagaacttcgcacttacagtcaaagaaatggcccagatgcttcagtctttcggcacagagctagcagaaacagagctacccgatgacattccaagcattgaagagattcttgcgatcagagccgaaaggtaccacctgctaaagaatgatataactgcggtaactaaggaaggtaagatcctgctgactaatttagaggttcctgatacagagggcgcggtgagttctcgccttgaatgtcataggcaaatcagcggggattggcagaccatcaacaaactgttgacacaagtacacgacatggagacagcttttgatgggttttgggagaagcaccagctcaaaatggagcagtacctccagctatggaagttcgaacaggattttcagcagctggtgacagaagtggagtttctcctgaatcaacaggccgagctggcggacgtaacgggaactatcgctcaggtcaagcagaagatcaagaaactggaaaaccttgacgagaatagccaggagttactgagcaaggcacagtttgtgattctgcacgggcacaaactggcggctaaccatcattacgccctcgacctgatttgccagcgctgtaacgaattacgttacctgagcgacattctggttaatgagatcaaagccaagagaatccagcttagcagaaccttcaagatgcacaagctcctgcagcaggcgaggcaatgctgtgatgagggggagtgtttgcttgccaaccaagagatcgacaagtttcagtccaaggaggacgcgcaaaaagctttgcaggacattgagaattttcttgagatggccctaccctttatcaattatgagcccgagaccctgcagtacgaattcgatgtgatcttgtctccagagctgaaggtgcagatgaaaacaatccagctgaaattagagaatatcagaagcatttttgagaatcaacaggccgggttccgtaaccttgccgacaaacacgtgaggcccattcaatttgtagtacctacacccgagaatcttgtgacttctggtaccccattcttcagttccaaacaggtgggcgttggatactctttcttccaggcatgcaagttgttctcaaaaggcaaaaagacatggcgccaaaatcagtctaacctgaagatagaggtcgtccctgattgtcaggagaagaggtccagcggcccatctagctccctggacaacggcaattctctggacgtgctcaaaaaccatgttttaaacgagctaattcagactgaaagggtttacgttcgggaactgtataccgttttactcggttaccgtgcagagatggataacccagaaatgttcgatttgatgccgcctctgctgaggaacaagaaggacatcctctttgggaatatggccgaaatctatgagttccataatgacatttttctgtcatctctggagaactgcgcccatgcaccagaacgagtgggaccatgttttttagagcggaaggatgattttcaaatgtatgccaagtattgtcagaacaaaccccgtagcgagaccatttggagaaaatactcagaatgcgccttttttcaggagtgccagaggaaactcaagcaccgcctcagactggatagttacctcctcaaacctgtgcagcggatcaccaagtaccagctgctgctgaaagaattactgaaatactctaaggattgcgaggggagtgcccttctcaagaaagctctggacgcgatgctggacttgttgaagtctgttaacgactccatgcatcagatagcaatcaacggatatatcggaaacctaaacgagttgggcaagatgatcatgcagggcggcttctcagtgtggattggacataagaaaggcgctactaaaatgaaagacctcgctaggtttaagcctatgcagcggcacctattcctgtatgagaaagccatagtgttttgtaagaggcgagtggagtctggagaaggttcagaccgctacccaagctactcctttaagcactgctggaagatggatgaagtgggcatcactgagtacgttaagggcgacaataggaaatttgagatttggtatggcgaaaaagaagaagtgtatatcgtgcaggcaagcaacgttgatgtgaagatgacgtggcttaaggagatccggaacatactgttgaaacagcaggaactgctgaccgtgaaaaagcggaagcagcaggatcagctgacggaacgcgataaatttcaaatctcactgcaacaaaatgacgagaagcaacagggggcattcataagcaccgaagagacggagctggagcacactagcacagtggtggaggtttgcgaggctatcgcatctgtgcaggcagaggcaaatacagtctggacagaggcctcccagtctgctgagattagcgaagagccagcggaatggtcgagcaattatttctaccctacatatgatgaaaacgaagaagagaatcgaccactcatgaggcctgtcagtgagatggccttactctactag

SEQ ID NO: 123565 - DNA, 2958 bp, synthetic construct
  misc_feature 1..2958: note = Description of Artificial Sequence: Synthetic coding sequence
  source 1..2958: mol_type = other DNA
atgcaggatattgcatttctctccgggggcaggggtaaggataatgcctggataattacattccccgaaaattgtaactttcgctgtatccccgaggaagtgattgccaaagtgctgacttacttgacctctatcgccagacagaatggcagcgactctaggtttaccatcatactggatcgacgcctcgatacctggagctccctcaagattagccttcagaaaatcagcgcgtccttccccgggaatctgcatctggtgctcgttttgagacctacgtcatttctacaaagaacattcactgacatcgggttctggttctctcaggaagacttcatgctcaagctgccagtggtaatgctttcctccgtgtcggatttgcttacttacatcgatgataaacaactaacaccagaactgggcggaacgcttcagtactgccatagcgagtggattatatttcgcaacgctatcgagaacttcgcgctaacagtcaaggaaatggctcagatgctgcagagcttcggaaccgaactagccgaaacagaacttcccgatgacataccaagcatcgaagagatcctagctatccgggccgagcgataccacttactaaaaaatgatattaccgctgtcacaaaggaaggcaaaattctcttgactaaccttgaggttccagacactgagggagccgtgagctccagactggaatgtcacagacagatatctggcgactggcagactattaacaagctcctcactcaggtccacgacatggagaccgctttcgacggcttttgggagaagcaccaacttaagatggaacagtacctccaactctggaaattcgagcaggatttccagcaactggtgacagaggtggaatttctgttgaaccagcaggcagagctggcggacgtgaccgggactatcgcacaagtgaagcagaaaataaaaaagcttgaaaaccttgatgaaaattcgcaggagctcctttctaaagcgcagtttgtgatcctgcacgggcataagctggctgccaatcatcattatgctttagaccttatatgccagagatgcaatgagttgagatatctatccgacatcctggtaaacgagataaaggccaagaggatccagctgagcaggacatttaaaatgcacaagctccttcagcaggcccgacagtgctgcgacgagggagaatgtctgttagctaaccaggaaatcgataagttccagtctaaggaagacgctcaaaaggccctgcaggacatcgagaactttttagagatggcgttgccttttatcaattacgagcctgagacattgcagtacgagtttgacgtaatcctcagccctgaattgaaggtgcagatgaagactattcaattaaagctggagaacatccgttccatctttgagaaccaacaggccggctttagaaatctcgccgacaaacacgttagacccatccaattcgtggtacccacccccgagaaccttgtaaccagtggaacaccctttttttcaagcaagcaggggaagaaaacctggcgccaaaaccaaagcaatctgaagatagaagtggttccagactgccaggagaagaggagtagtggcccttcatccagcttggacaatgggaatagcttggatgtcctcaaaaatcatgtgttaaatgagctgatccaaactgagcgagtgtatgtgagggaactctatacagtgctgttggggtacagagctgagatggacaatcccgagatgttcgatcttatgcccccactactgcggaacaagaaagacattctttttgggaatatggcagagatctacgaattccacaacgacattttcttgagctccctcgaaaactgcgcacatgctcctgagagggtcggcccctgtttcctggagagaaaggacgattttcagatgtatgcaaaatattgtcagaacaaaccccgctccgagactatctggcggaagtactcggagtgtgcattctttcaggagtgtcaacgcaaactgaagcaccggttgcgtctggactcatatctgctgaaacccgtccagcggattacgaaatatcagttattgctgaaggaactgctgaaatactccaaggattgtgagggaagcgctcttcttaaaaaggccctggacgccatgctggacctgctgaagtccgtcaatgattctatgcaccagatcgctatcaacgggtatatcggcaacctgaatgagcttggcaaaatgatcatgcaggggggattctcagtgtggattggacacaaaaagggagccaccaagatgaaggatctggctagattcaaacctatgcagaggcatctatttctctatgagaaagccatcgtcttttgcaagcggcgcgtggaatctggtgagggcagcgacaggtacccgtcctattccttcaaacattgctggaaaatggacgaggtgggtattactgaatacgtaaagggcgacaacagaaagttcgaaatctggtatggggagaaggaggaggtttatatcgtccaggcctcgaatgtggacgttaagatgacttggctcaaggaaataaggaatattctgcttaagcagcaggagctgctcacagtcaagaaaaggaagcagcaagatcagcttacggagagagacaagtttcaaatttcactacagcagaacgatgagaagcagcagggagcttttatcagcaccgaggagaccgagcttgagcacacatccacagtggtagaagtctgcgaggccatcgccagtgtgcaggcagaggccaataccgtgtggactgaggcctctcagagcgccgagatcagcgaggagcccgctgaatggtcctctaactacttttatccgacatacgacgagaacgaagaagaaaatcgaccactcatgagacccgtctccgagatggctttattgtattag

SEQ ID NO: 123566 - DNA, 2466 bp, synthetic construct
  misc_feature 1..2466: note = Description of Artificial Sequence: Synthetic coding sequence
  source 1..2466: mol_type = other DNA
atggcagaggctaaccctaggcggggcaaaatgaggttccggcgtaacgccgcctccttcccaggcaacctacacctggtcctagtgttgagaccgacctcatttcttcagcgcacctttacagatatcggcttttggttttctcaggaagactttatgctgaagctccctgcaattgaaaatttcgccttgacagttaaagagatggcacagatgctccaatcattcggtactgaacttgccgagaccgagctgcccgacgacattccatcaatagaggaaattttggcgatccgggccgaacggtaccatcttctcaaaaatgatattacggcagtgaccaaagagggcaaaattctgctgactaacctagaagtgcctgacacagagggcgccgtgtcatcgcgtctggaatgccatcgtcagatcagcggcgattggcagaccattaacaagctcctcactcaggtccatgacatggagaccgcattcgatgggttctgggaaaaacaccagctcaagatggaacagtacctgcaactctggaagtttgaacaggacttccaacagctagttactgaggtcgaatttctgctcaaccagcaagccgagttggcagacgtaacgggaaccatagcccaggtcaagcagaagattaagaagctagaaaatctagacgaaaactctcaggagctcctgagcaaggcccagtttgtaattctacatgggcataaactggctgccaatcatcactacgcgcttgaccttatctgccaaaggtgcaatgagctcaggtacttatcagacattctggtgaacgagattaaagcgaaacgaatccagttgagcagaacctttaaaatgcataaacttctgcagcaagcccgacagtgctgtgatgaaggggagtgcctgctggctaaccaggagatcgacaagtttcagagtaaggaggatgcccaaaaggctttgcaagatatcgagaattttctggagatggcacttccattcatcaactatgagcccgagacactacagtacgaattcgatgttatcctgtcccccgagctgaaggtgcaaatgaagaccatacagctgaaattggagaacatccggagcatttttgagaaccagcaagccggctttcgcaacctcgcagataaacatgtgcgcccaattcagttcgttgttcccacaccggagaaccttgtaacctcaggtaccccatttttttctagcaagcaggggaagaagacttggaggcagaatcagagtaacctgaaaattgaggtggtgcccgactgccaggagaaacgatcttctggtccttctagcagtctggataacggcaactcactggacgtcctaaagaaccacgtcctgaatgagcttattcagaccgagcgcgtatatgtccgcgagttgtatactgtcttgcttggctatagggccgagatggataaccctgagatgtttgatctcatgcctccacttctgcgaaataaaaaagacatcctctttggtaatatggcagagatctacgagtttcataacgacattttcctttccagtctggagaattgtgcgcatgcacccgaaagagtgggcccttgctttttggagaggaaggacgactttcagatgtatgctaagtattgccagaataaaccaaggagtgaaactatttggcgaaaatattcagaatgcgcgttctttcaagagtgtcagaggaaacttaagcatcgtctgagacttgatagctacttgctcaaacctgtccagcgcattacgaaatatcagctgctgcttaaggaactgctgaaatatagtaaagactgcgagggctccgcactcctcaaaaaggcacttgacgcaatgctagacctgctcaagtccgtgaacgactctatgcaccagattgctatcaacggatatatcggcaacctgaacgaacttgggaagatgatcatgcagggaggcttctctgtttggattggccataaaaagggagcaacaaagatgaaagatctcgcccgatttaagcctatgcagcggcatctgttcctgtatgaaaaggctatcgtcttctgtaagcggagggtggagtctggagaggggagcgacaggtacccgtcatatagctttaaacattgctggaagatggacgaggtgggtatcacagagtatgtgaagggtgataatcgcaaattcgaaatctggtatggagaaaaagaggaagtctacatcgtgcaggccagtaacgtcgacgtcaaaatgacctggctgaaagagatccgtaacatcctccttaagcagcaggaacttctgacagtgaagaaacgcaagcagcaggatcaactgacagaaagagacaagttccagatttccctgcagcagaatgatgaagatttgtgtcgacgttggctctcatatatagatgaggctaccatgagtaacggcaagtag

SEQ ID NO: 123567 - DNA, 2955 bp, synthetic construct
  misc_feature 1..2955: note = Description of Artificial Sequence: Synthetic coding sequence
  source 1..2955: mol_type = other DNA
atgaccgtgcgcagattgtctctgctctgtcgcgacctttgggcattatggctgcttctgaaagctggggcagatgagatcatgcaccaagacatagtccccttgtgtgcagcagatatccaggatcagctcaagaagagattcgcttatctaagcggtggacgaggacaggatggttccccggtgatcacattcccagattaccctgccttctctgaaatccccgataaagagtttcagaacgtcatgacctacctcacctcaataccgagcttacaggatgccggtattggctttattctggttatcgaccgccggagggataagtggacatctgtgaaggcttctgtgctcaggattgctgccagttttcccgctaatcttcagttagtcctggtcttgcgtcctaccgggttttttcaacgcactcttagtgacattgcctttaaatttaatcgcgatgatttcaaaatgaaggtcccagtgatcatgctgtctagcgttcccgatctgcacgggtacatcgataaatcgcaacttactgaggacctgggcgggacgctggattattgtcacagtcgatggttgtgccagcgaaccgccatcgaatcattcgctttgatggttaaacagactgctcagatgctgcagagcttcggtactgagctggctgagactgagctccctaacgacgtgcaatcgactagctctgtgctgtgcgcacacacagaaaaaaaagataaggccaaagaagacctcagactcgccctgaaagagggtcatagtgtgctggaatctcttagggaactccaggctgagggctcagagccttctgtcaaccaggaccaattggacaatcaggcaacggtacagaggttgcttgctcagctcaatgagacagaggctgctttcgacgagttctgggcgaaacatcaacaaaagttagagcaatgcctacagctgcgacactttgagcaagggtttcgcgaggttaaagccatcctagacgcggcatcacagaagatcgctaccttcaccgatatcggcaattctctggcccacgtggaacacctgctcagggacctggcttcttttgaggaaaagtccggcgttgccgtggagcgcgcccgggccctgtccttagatggggaacaactgatcggcaacaagcattatgcagttgattccattcgacctaagtgccaagagctcaggcacctttgcgaccagttttcagccgaaatcgccaggaggagaggattattatccaaaagcttagaactgcataggcgcctggagacctccatgaaatggtgcgacgaagggatctatctgctggcctcccaacccgtggacaagtgtcagtcccaggacggcgctgaagcggctctccaggagattgagaagttcttagaaaccggtgcagagaacaagatccaggagctgaatgcgatttataaggagtatgaaagcatcctcaatcaggaccttatggaacacgtgcgaaaggtctttcagaaacaggcatcaatggaggaagtttttcaccgtcgacaggcttctttgaaaaagctagcagccagacagacacggcccgttcaacctgtagccccaagacctgaggctttggccaagtcaccatgtcctagtcccgggatacggcgggggagcgagaactcctcatcagagggaggggccctgcgaagagggccctacagaagggcaaagtctgagatgtctgaaagtaggcagggcagagggtccgccggagaggaagaggagtcactggctatcctaagacgccacgtcatgtctgagctgctggataccgaacgagcatatgttgaggaactgctgtgcgtgctcgaaggctacgccgctgagatggataatccgttaatggcccacttgctgagcaccggccttcacaacaagaaggatgtactatttgggaatatggaagaaatctatcactttcacaacaggatctttttgcgtgaactggaaaactacaccgactgccccgagctggtcggacgatgcttcctggaaaggatggaagattttcagatctacgaaaaatactgccagaataagcctcgctctgaaagcttgtggagacagtgctctgattgtccattctttcaggagtgtcaaagaaaacttgatcacaagcttagtctggattcttaccttttgaagcctgttcaaagaattacgaaatatcagctgcttctcaaagagatgctcaaatattctcggaattgtgagggcgcagaggacctgcaagaggccttgagcagcattcttggcatcctgaaagctgtgaatgactcaatgcatcttattgccattaccggatacgacggtaacctgggcgacctcggtaaactattgatgcaaggtagcttcagcgtgtggaccgatcacaaacggggtcataccaaagtgaaggaactggcgcgattcaaaccaatgcagagacatctgttcctgcatgaaaaagcagtgctcttctgtaagaaaagggaggagaatggtgagggctatgaaaaagccccgagttattcctacaaacaatcgctcaacatggccgctgtcggaattacagaaaatgttaaaggtgatgctaaaaaattcgagatctggtacaatgctagagaggaggtgtacatcgtccaggcacctactcctgagattaaggctgcctgggtcaatgaaatcaggaaagtccttacttctcagctccaggcttgcagggaggcctctcagcaccgtgctctcgagcagagccagagtctaccgttacccgcacccaccagcacgagccccagccgcggcaacagtcgcaacattaaaaagctggaagaaaggaaaacagaccccttgtctctggaaggttatgtgtccagtgccccgctgactaagccaccggaaaaaggcaaagaaccctag

SEQ ID NO: 123568 - DNA, 3390 bp, synthetic construct
  misc_feature 1..3390: note = Description of Artificial Sequence: Synthetic coding sequence
  source 1..3390: mol_type = other DNA
atggccgaaaaaggcgcatcacggggcactctgagaagactttggtcactgcccagaaggcgacgagggaccgccggccggtcccgcccagatgagattatgcaccaggacattgtccctttgtgtgctgccgacatccaggatcagctgaagaagcggtttgcctacctgtccggcggacgagggcaggacggttcccccgtaataacgttccccgattacccagccttctcagagatccctgacaaagagtttcagaacgtaatgacgtacctgactagcataccttccctgcaggatgctggcatcggtttcattttggtgatcgacaggcgcagagataaatggaccagcgtgaaagccagcgttctgcggatcgccgctagtttccctgctaaccttcaactagtgctagtgctgcgacctacaggtttttttcagcgaaccctgtccgatattgcctttaagtttaatagagatgatttcaaaatgaaagtccctgtcatcatgctctccagcgtgcctgacttacatgggtacatcgataaatcacaactgacggaggacctcggaggcactctggattactgccatagccgatggctgtgccagaggacagctattgaatcgtttgccctcatggtcaagcaaacagcccaaatgttacagtctttcggaacagagctggctgagaccgaattgccaaacgatgtgcagagcacaagttcagttttgtgcgctcataccgagaagaaggacaaggccaaggaggacctcaggctggctctgaaagaaggtcacagcgtacttgaatcactgagggaattacaggccgagggtagtgaaccgtccgtaaatcaggatcagttggataaccaagccactgtccaacgactcctcgctcagttaaatgagacagaagcggcattcgacgaattctgggcgaaacatcagcagaagttggagcagtgcctgcagcttcgccacttcgagcaagggttccgcgaagttaaggctattcttgacgccgcttcccaaaagattgctactttcacagatatcggcaacagcctggcgcacgtggaacacctgttaagagacctggcttctttcgaagaaaagagtggagtcgctgtagaacgcgccagggcactctcactcgacggagagcagctgataggcaacaagcactacgctgtggacagcatccgtccgaagtgtcaggaactaaggcacttatgtgatcagttctctgccgagatcgcaaggaggagagggctgctgtccaagtcactggagcttcataggaggctggaaactagtatgaagtggtgcgacgagggaatctacctgctcgcttcccagcctgtggacaagtgtcagtctcaggacggggccgaggctgcccttcaggaaatcgagaagttcctggagacaggcgccgaaaataaaattcaggagctgaacgccatctataaggagtacgaatccatcttaaatcaggacctgatggagcacgtgcgtaaagtctttcagaaacaggcttcaatggaggaagtatttcacagaagacaagcatcattgaagaaattagccgcccgacagactcgcccagtgcaaccggtggcgcccagacccgaggccttggctaagagtccatgccctagcccaggtatccgccggggatccgaaaactctagcagcgaaggaggggctttaaggagggggccttacaggagagccaagtctgaaatgtctgagtcaagacaaggcagaggctcggcaggggaagaagaggaatcactcgcgattcttcgaagacatgtgatgagtgagctgctagacacagaaagagcttacgtggaagagcttctgtgtgttcttgaggggtacgcggccgagatggataatccccttatggctcatctgctgtccaccggtctgcataataaaaaagacgtgctgttcggcaatatggaggaaatttatcatttccacaacaggatctttttgcgagagctggaaaattatacagattgtccggagctggttggccgttgcttcctggagcgcatggaggacttccagatctatgagaaatactgtcagaataaacccagatccgaaagtctgtggaggcagtgctctgactgcccatttttccaggagtgccagcgcaagctggatcataaattgagcctggactcatatctgctgaaacctgttcaacgtatcacaaagtaccagttgctactaaaagagatgctgaaatattcaagaaactgtgagggtgctgaagaccttcaagaagctcttagttctatactgggaatcctgaaggccgtgaatgactccatgcatctgattgctatcaccggctacgacggcaatctgggagacttggggaagctgttgatgcaaggtagtttctctgtttggactgaccataagcgaggacacaccaaagtcaaggagttggctcgtttcaagccaatgcaaagacacctgttcctccacgaaaaagccgtgttattctgcaagaaacgagaagaaaacggagaaggttacgaaaaagcacccagttacagttacaaacaatcacttaatatggctgctgtcggcatcaccgagaatgttaaaggggatgctaagaaattcgagatatggtataacgccagggaagaggtgtatatagtgcaagctcccacaccagagatcaaggctgcctgggtcaatgaaatacgcaaggtgctgacaagccagctccaggcctgccgcgaagcctcccagcatagggccctggaacagagccagagcctgccattgcccgcgcctaccagcacatctcccagccgtggaaacagcaggaacattaaaaaactcgaagaacggaaaactgaccctctcagcctcgagggctatgtaagcagcgccccactgaccaagcctcctgaaaagggcaaaggatggagcaagacttcccatagcctggaagcacctgaagatgatggcggctggtctagcgcagaggaacagattaactcttcagacgccgaagaggatggaggattgggaccgaagaagttagtacctgggaaatacaccgttgtggcggaccatgaaaaaggcggccctgatgcattgagggtgcgctctggcgacgttgtggaattggttcaggaaggcgacgagggcttgtggtacgtcagggacccgaccaccggaaaggaaggatgggtccctgcttcttctcttagcgtgaggcttggtccctcaggaagcgctcagtgtctctcctctagtgaatcatctcctggatccgcagtgcttagtaacagctcatcctgcagcgaagggggtcaggccccattcagcgacttgcagggttag

SEQ ID NO: 123569 - DNA, 3549 bp, synthetic construct
  misc_feature 1..3549: note = Description of Artificial Sequence: Synthetic coding sequence
  source 1..3549: mol_type = other DNA
atggccagagttgagtcacccgtccccgcggccagagccagcctcacgggtagttgtgtgctgggacaggctatgcctctaaggggcggcgccggccctagccctgcctctcacggcccaacccacggcccctccgatcccaggacctgcctgcccggacggggtgctgggggcatgcggccacacggccggggcgcactaggctgctgtggcctgtgctccttttatacatgccacggtgcagctggggatgaaattatgcaccaggatattgttcctctttgcgccgctgatattcaggatcaactgaagaaacgttttgcttatctctcaggagggagaggacaggatggaagtcccgtgataacctttcccgattatccagctttttctgagatccctgacaaggagtttcagaacgtgatgacttatctcaccagtattccgtccctgcaagacgcaggtattggattcattttggtaattgataggcggagagataagtggacaagtgttaaagcatcagtattgcggatcgccgcaagctttcccgctaacctgcagcttgtacttgttctccgccccacgggctttttccaacgcaccttgagtgacatcgcttttaagttcaacagggatgatttcaagatgaaagtccccgtgatcatgctttcctcggttcctgacctccacggatacattgataagtcgcagcttacggaggacctgggggggactctggactattgtcattcccggtggctgtgtcagagaacagctattgaatccttcgctctgatggtgaaacagactgcccagatgctgcagagctttgggaccgagctggccgagacggagctccccaacgacgtgcaaagcaccagcagcgtattgtgtgcccacacagaaaagaaagacaaggccaaagaagatctgcgactcgccttaaaagaggggcactccgtcctcgaatccttaagggaactgcaagccgagggcagtgagccctcagtgaatcaagaccagctggataatcaagcgactgttcaaagactcctcgcccaacttaacgaaactgaagctgcatttgatgagttttgggcaaaacaccagcagaaactggaacaatgcctccagctgcggcatttcgaacaaggtttcagggaagttaaagccatcctggatgccgcgagtcagaaaatagctacattcacggatatcgggaattctctggcacacgtggaacatctgctgcgcgatctggcctcatttgaagagaaaagtggggtggccgtggaaagggcacgggccctgagtctagatggggaacaactgatcgggaacaaacactatgcggtggattcaattaggcctaaatgtcaggaacttaggcacctttgtgaccagttctccgccgaaattgctagacggcgtgggctcctatcaaagtcactggagttgcatcgacgcctggaaactagcatgaaatggtgtgacgaagggatatacctgctggcaagtcaaccagtggataagtgtcaaagccaggacggggcagaagccgcactgcaagagatagaaaagtttctggaaacaggcgcggagaacaaaatccaggagctgaatgctatatacaaggagtatgaatctattctcaaccaggatctgatggagcatgttcgaaaggtatttcagaagcaggcatctatggaggaggtgtttcaccgtagacaggcctcgctcaaaaaactcgccgcgcgccagacccggccagtgcagcccgtggccccccggcctgaggctctggcaaagagtccttgcccttctcccggcatccgccgaggttccgagaactccagcagtgagggaggggcactccgcagagggccttataggcgagctaagagcgagatgtccgagtcccgacagggccggggctcagccggggaagaagaagaaagcttagcgatactgcgacgccacgtaatgtcggagttgctggataccgagcgggcatacgtggaggaactcctttgtgtactggagggctatgctgccgagatggataatcctcttatggcccacctgctgagtaccggactccataataagaaggacgttctgtttggcaatatggaggaaatttaccactttcataatcgtatcttcctccgagagttggagaactacacagattgtccggagcttgtggggcgctgtttcctggaacggatggaggactttcaaatctatgagaaatactgccagaacaagcctaggtcagaatcactgtggagacaatgtagcgattgcccgttctttcaagagtgtcagcggaagctggaccacaaactgagcctagatagttacttactgaagccagtgcaacgcattacgaagtatcagcttctacttaaagagatgcttaagtattcacggaattgcgaaggagccgaagacttgcaggaggcactctcttcgattctgggcattctgaaagccgtcaacgactctatgcacctcatcgctatcacaggatacgatggaaacctgggagatctaggcaagttactgatgcaaggatcattcagtgtgtggaccgaccataaacggggacacactaaggtgaaagagcttgcaagatttaagcccatgcagaggcatctgttcctgcacgagaaagccgtcctgttctgcaagaagcgcgaagagaacggggagggctacgagaaagcgccctcctatagctataagcagtcactcaacatggccgccgtcgggatcactgaaaatgtaaagggagacgcaaagaagtttgaaatctggtataacgcaagggaggaagtctacattgtccaggctcccacaccagagataaaggccgcatgggttaatgagattcgcaaggtgttaacatctcagttacaggcctgcagagaggcatcccaacatagggcactggagcaatcccagtctctgcccttacctgcgccaactagcacctccccatcacggggcaactccagaaacatcaagaaactggaggaaagaaagaccgaccccctttccttggaaggctatgtttcttccgccccacttactaaacccccagagaagggaaaagggtggagcaagacgagtcactccctcgaggcgccagaggatgacggcggctggtcctccgcagaggagcagattaactcttcagatgctgaggaagatggggggctgggacctaagaagctggtgcctggaaaatacactgtagtagctgatcatgagaaaggtgggccagatgccttgcgagtccgttcaggcgacgtagtggagctggttcaagagggggatgaagggctctggtacgtcagggaccctacaaccggcaaagaaggctgggtccctgcatcttccttatcagtgcgtctgggaccctccggctccgcccagtgcctgtcctcttctgagtcctctccggggagcgccgtccttagtaattcttccagctgtagcgagggaggtcaagcacctttttcagacttacagggatag

SEQ ID NO: 123570 - DNA, 3414 bp, synthetic construct
  misc_feature 1..3414: note = Description of Artificial Sequence: Synthetic coding sequence
  source 1..3414: mol_type = other DNA
atgtttgactgctggcgctttatcttatgtaagcgcccagggtctaactcatacagcagtcctcagcgtcccaacgaggcaaaaaaagaggaaaccgatcaccaaatcgacgtgagcgatgtcattcgcctcgtacaagacaccccggaggcaacagcaatggccactgatgaaatcatgcaccaggatatagttccgttgtgcgcagctgacatccaggatcagttaaaaaagaggttcgcttacttaagtgggggcagagggcaagatggctctcccgtcattacttttcctgattacccagccttcagtgaaatccccgataaagagttccagaacgtgatgacttacctaacttcaatcccctcacttcaagacgctgggataggattcattctggtaatagatcgtaggagggataagtggacctcagtcaaagcttccgtcctgcgtattgcagcctcatttccagccaatctccagttggtactggtgcttcggcccaccgggttctttcagaggacactgtctgacatcgcgttcaaattcaacagagatgattttaagatgaaggttcctgtgatcatgctaagttctgtgccggatctgcacggttacatcgataagagccagttaacagaagatctggggggtacgctcgactactgtcactcacgctggctgtgccagcggacagccattgaatcatttgcattgatggttaagcaaacggctcagatgcttcagtcctttggcacggagctggctgaaacagagctgcctaatgatgtccagtctacatcctccgtgctgtgtgcacatactgagaagaaggataaagccaaagaagacctgcgtctggccttaaaggaaggccattctgtgctggagagtctgagagagctgcaagccgagggttccgaaccgtctgtaaatcaagatcaactcgacaaccaggccaccgtgcaacgcctcctcgctcagctaaatgaaacagaagctgccttcgacgagttttgggctaaacaccagcagaaactggagcagtgcctccagctgcggcatttcgaacagggctttcgcgaagtgaaagccattctggacgctgccagccagaaaattgctaccttcactgacataggtaatagtctcgcccacgtggaacacttgctgagagacttggcatcgtttgaagagaaaagcggtgttgcagtagagcgagccagagcgttgtctcttgatggagagcagctgattgggaacaagcactatgccgtagattccattcgcccgaagtgccaggagctgaggcacctttgtgatcagttttccgccgaaatagctcgtaggcgtggcctgctgagcaagagtctggaactgcatcgtcggctggagacttccatgaagtggtgcgatgaaggtatttacctgctggcgtcacaacccgtggacaagtgccagtctcaggacggcgctgaagcagccctacaggaaatcgagaaatttctggaaacgggagccgagaacaagattcaggaactcaatgctatttacaaagaatatgaatctatattgaaccaggatttgatggagcatgttaggaaagttttccagaaacaggcatcgatggaggaagtgttccatcggaggcaggcctccctgaagaagttagccgcgcggcagacccggcccgtccaacctgttgcaccaaggcccgaagccttagctaagtcgccctgcccaagccctgggattcgccggggttcggagaacagctcatccgagggcggagcccttcggagggggccctaccgccgcgccaagtcggagatgagcgagtccagacaagggcgtggctccgccggcgaggaggaagaaagtctggccatcctgcgacgccacgtgatgtcagaactcctggacacggagcgggcatatgtcgaggagctgctgtgcgtcttggagggctacgctgcagagatggataatcctctcatggcacatcttctgtctactgggctgcataataagaaagacgtgttatttggtaatatggaagagatctatcacttccataaccgtatctttttgcgcgagctggagaattacactgattgcccagagttggtggggcgctgcttcctagagcggatggaagactttcagatttacgagaagtactgccagaacaaaccccgcagcgagtccctctggagacagtgctcggactgtcccttttttcaggaatgccaacgcaaactggaccataagctttccctggattcctacctattgaagccagtgcaacgtatcacaaagtatcaactcctgttgaaagagatgttaaagtactctcggaactgtgagggcgcggaagatttgcaggaggccctctcgtcaattctgggcatcttaaaagcagtgaacgacagcatgcacctgatcgcaataaccggatacgacggtaatctcggcgatttgggtaagctgctgatgcaggggtctttttccgtgtggaccgatcataaacggggacacaccaaagtgaaagagctggcccgtttcaaacccatgcagaggcacctttttctgcatgagaaggccgtgctgttctgcaaaaagcgcgaggagaacggcgaaggttacgagaaggctccgtcctattcatataagcaatcactgaatatggccgcagtgggaatcactgagaacgtcaaaggggatgcgaagaagttcgaaatttggtataatgcccgcgaagaggtgtacatcgtgcaagcacctacccccgagatcaaggctgcctgggtcaatgaaattaggaaagtgctgacaagccagttacaggcttgtcgagaagccagtcagcaccgcgccctggagcagagtcaaagtctacctctcccggccccaacttctacaagccctagcagaggaaattcccggaatattaaaaagcttgaagagcgaaagactgaccccctgagtctggaaggttatgtatcatcagcaccactgactaaaccccccgagaaaggtaaaggctggagcaagaccagccactcgctggaagctccagaagacgatggcggttggtccagcgcagaagagcagatcaatagttcggatgccgaggaggatggcggattaggccccaagaagctggtacctggaaagtatacggtggtggcagaccacgagaaaggcggaccagatgcactgcgcgtaaggtccggcgacgtcgttgaactggtacaagaaggcgacgaaggtctgtggtacgttagagatcccaccaccgggaaagagggctgggtgcctgctagcagtctgtcagtccgtctgggaccttctggatcggctcagtgcctctctagcagcggaaaagcccatgttccaagagctcatccatag

SEQ ID NO: 123571 - DNA, 2382 bp, synthetic construct
  misc_feature 1..2382: note = Description of Artificial Sequence: Synthetic coding sequence
  source 1..2382: mol_type = other DNA
tagagtcagaaaatagccactttcacagacatcgggaactccctggcgcatgtggagcatctactcagggatctcgctagcttcgaagaaaagagcggtgtggcggttgagagagctcgggccctgtcactggacggcgagcagctaattggaaacaaacactatgctgtcgacagcatccgccccaagtgtcaggaactacgccatctctgcgaccaattctcagctgagatcgctcggaggcgtggtctgttaagtaagtccctggaattacatagaagacttgagaccagtatgaaatggtgcgacgaggggatttatctgttagcatctcagccagtcgataaatgtcagagtcaggacggcgccgaggccgcactccaggaaatcgagaagttcctcgaaaccggagcagaaaacaaaatccaggagctgaatgctatctacaaggagtatgagagcatcctgaaccaggatttaatggagcacgtgaggaaagtgtttcaaaagcaagccagcatggaagaggtatttcatcggcggcaggcaagtctcaagaagctggcagccaggcagacacggcccgtccaaccagttgcccctcgacctgaagccctggccaaatctccatgtcccagcccagggatccgacgcggctctgaaaatagctcatccgaggggggggcactgcggaggggcccttatagacgggctaagagtgagatgagcgagtctcgacagggccggggtagcgccggggaggaggaagaatccctggccatattgagacggcacgtaatgtcagagttgctcgatacggaaagagcttatgttgaggagttgctgtgtgtcttggaggggtatgctgccgagatggacaatcctctcatggcacacttgctgtccaccggcctgcacaataaaaaggacgtgctgttcggtaacatggaggagatctaccacttccacaacagaattttcctgagggagctggagaactataccgactgtcctgaactcgtgggccggtgttttttagaaaggatggaggacttccaaatttacgagaaatattgccagaataaacccaggtcagaaagcttatggcggcagtgttctgactgcccattctttcaggaatgtcagcgcaaattggatcacaagctctcactagactcgtacctactgaagccagtgcaaaggatcaccaaatatcaattgttgctgaaggaaatgctgaaatactcacggaattgcgaaggggccgaggacctccaagaagccctctcttcaattttaggtatcctgaaggccgtcaatgattccatgcatctcatcgccatcaccggatatgacggaaatctgggtgatctcggtaagctcttaatgcagggttctttttcagtctggactgatcataaaagaggccataccaaggtcaaagaattggctcggttcaaacccatgcaacgtcacctctttctgcacgagaaagccgttctgttctgtaaaaaacgagaggaaaatggcgaggggtatgagaaagccccatcatatagttataagcagtccctgaacatggcagcagtcggcattactgagaacgtgaagggtgatgcaaaaaaattcgaaatatggtataacgcccgggaagaagtgtacatagtgcaggcaccaacacccgagatcaaagccgcctgggtgaacgagatccgaaaggtattgactagccagttacaggcgtgtcgggaggcttcgcagcatcgagctttggaacagagccaaagcctccctctgcctgctccaacttcaacttcaccaagcaggggcaattcaagaaacataaagaagctagaggagcggaaaacagaccccctcagtctggaaggttacgtcagcagcgcaccactcacaaaacctccagaaaagggaaaggcatctccaacctcgccagataagaaagcaaagcgacacgaggtgaagtccgatcctaccccatttggtgtgagaggctggtccaaaacctcgcactcactcgaggcaccggaggacgatggtggatggagtagcgcagaggagcagattaattcctcagacgcggaggaggatgggggcctgggacccaaaaagctggtgccaggtaaatacacagtggtggccgaccacgagaagggcggcccagatgccctgcgggttcgcagcggagatgttgtcgagcttgttcaggaaggagatgaagggctgtggtatgttagagacccaaccacaggtaaagaggggtgggtgcccgcatcttctctatctgtacggttgggtccatctggctcagcacagtgtctgtcctcaagcggaaaggcacacgtgccgagggcacacccatag

SEQ ID NO: 123572 - DNA, 3291 bp, synthetic construct
  misc_feature 1..3291: note = Description of Artificial Sequence: Synthetic coding sequence
  source 1..3291: mol_type = other DNA
atgcctctccgagggggagctgggccatccccagcttctcatgggccgactcacggaccaagcgatccgcgcacctgcttgccaggccgcggggcaggaggaatgcggccccacggccgcggagcgctgggatgttgcggactctgcagcttttatacctgccacggtgctgctggtgacgaaattatgcatcaggacattgtgccactatgcgcagcagacatccaagaccagttgaagaagcgcttcgcttacctgagtggagggcggggccaagacggctccccggtcattaccttccccgattaccccgcattttccgaaatccccgataaggagttccagaacgtgatgacctatttaacatctattccttctctgcaggacgctggcattgggttcatccttgtgattgataggcgccgagacaagtggaccagtgtgaaggcctctgttcttcggattgctgccagctttcctgccaatctccaactcgtgctcgtcttaagacctacaggcttcttccagcgaacgctttccgacatcgcctttaaattcaatcgggatgactttaagatgaaagttcccgtgattatgctgagcagtgttccagatctgcatgggtatatcgataaaagtcagctgacagaggatttaggcggcacactggattactgccatagtcgctggctgtgtcaacgaacagcaatagagtccttcgctcttatggtgaagcagaccgcccagatgttgcagtccttcggcactgaactggctgaaactgaattgcccaacgacgtccagagcactagttcggtgttgtgtgctcatacagaaaaaaaggacaaagcaaaggaagatctgcgtttggcattgaaggagggccattcggtgctcgagagcttgcgcgagttgcaggccgagggcagtgagccctcggtcaaccaggatcagctggacaatcaagctactgtgcagcggttactggcccagcttaatgagaccgaggctgctttcgatgaattttgggccaagcatcagcagaagctggaacaatgtctacaacttcgccactttgagcagggattccgcgaagtcaaagcgattctggatgccgcaagccagaagatcgcaacgttcaccgacattggaaattctcttgcgcatgtggagcacctcttaagagacttagcatcctttgaggagaagtctggcgttgcggtggagagggccagggccctttcgcttgacggtgaacagctgattggcaataagcactacgctgttgattctattagacccaaatgccaagagctgcggcacttgtgcgaccagtttagcgcagaaatcgctagaagaagaggattgctctccaagagtctggaactgcacaggaggttggagacttccatgaaatggtgcgatgagggaatctacctgctggcttcccagccggtggacaaatgccagtcccaagacggtgctgaggcagctcttcaagaaatagagaagtttctcgaaacaggcgccgagaacaaaatccaggagctgaatgctatctataaagagtatgagtccattctgaaccaggatcttatggaacacgtgagaaaagtgttccagaaacaggcctctatggaagaggtgtttcacagaagacaggcctccctcaagaagctcgctgccagacagacacgccctgtgcagcctgtcgctccaaggcccgaggccctcgccaaaagtccatgccccagccctgggatccgcaggggtagcgagaatagtagctccgaagggggcgctctgcggcgggggccatatagaagggccaaatcggagatgtccgagtctcgccaggggcggggcagtgccggggaggaggaagaaagtctggccatcctacggcgtcatgtgatgtccgagctcttagatactgagcgcgcttacgtggaggaactgttgtgcgtcctggagggttacgccgccgaaatggataaccccctgatggcacatctcctgagcacggggctacacaacaagaaggacgtgctgtttggaaacatggaagaaatatatcacttccacaaccgaatcttcctgcgcgaactagaaaactatactgattgtccagagctggtgggaagatgcttcctggaacggatggaggattttcaaatctacgagaagtactgtcaaaacaagcccaggtccgagtctttatggcggcagtgcagcgattgccctttctttcaagaatgtcagaggaagctcgaccacaagctgagcttggacagttatctcttgaagcccgtgcagcgcattacaaaatatcagctcctgctgaaagagatgctcaaatactcaaggaactgtgagggcgccgaggatctccaagaagctttgtcgtcaattcttggcatcctgaaagccgtgaacgattccatgcatctgatcgcaatcaccggttatgacgggaacctcggcgacctgggcaaacttctgatgcagggcagcttttccgtgtggaccgatcacaagcgcggtcataccaaagtgaaagagctcgctcgattcaagccgatgcagcgccatctctttctgcacgaaaaagcagtcttgttctgtaagaaacgggaggagaacggagagggctacgagaaggccccctcctattcttacaaacaatcactgaatatggccgccgtagggattacggagaatgtcaagggtgatgcaaaaaaattcgaaatctggtacaacgcaagggaagaggtctatatcgtacaagcacccactccagaaattaaggctgcttgggtaaatgagatccgcaaagtccttacctctcagctacaggcatgtagagaagcttcccagcaccgggccttggagcagagccagtcgcttccactgccggccccaaccagtacgtctccgagtcgagggaactcccgcaacattaagaaactggaggaacgcaagaccgacccactgtccctagagggctacgtctcttccgcgcctctcacaaaaccgcctgagaaggggaaaggctggtcaaagacctctcattcactcgaagcccctgaggatgatggtggctggtcttccgcagaagagcagatcaactctagtgacgccgaggaagatgggggattgggtccaaagaagttagtgccaggaaagtatactgtggtggcagaccatgaaaaggggggccccgacgcccttagagtacgatcaggtgacgtcgtcgaactcgtgcaggaaggtgatgaagggctctggtag

SEQ ID NO: 123573 - DNA, 411 bp, synthetic construct
  misc_feature 1..411: note = Description of Artificial Sequence: Synthetic coding sequence
  source 1..411: mol_type = other DNA
atgcaccaagacatcgtgcccctgtgtgctgcggatatacaggatcagttgaagaagaggttcgcatacttgtcaggcgggcggggccaagacggatcccccgtgatcacatttcctgactatcccgcattttcagagatcccggacaaggaattccagaacgtcatgacctatctcacgtcaatcccatccctgcaagacgcaggcatcggttttattcttgtgatcgaccggaggcgggataaatggacgagtgtgaaggccagcgttctccggatcgccgcctcatttccagccaatctgcagttggtgcttgtgctgcgaccaaccggcttcttccaacgaaccttgagcgatatagctttcaagtttaaccgtgatgatttcaaaatgaaggtccccgtgatttag

SEQ ID NO: 123574 - DNA, 3372 bp, synthetic construct
  misc_feature 1..3372: note = Description of Artificial Sequence: Synthetic coding sequence
  source 1..3372: mol_type = other DNA
atgaccgtacgccgcctctctctcctgtgcagagatctgtgggcactttggctcctactcaaagctggtgctgatgaaattatgcatcaagacattgtcccactgtgtgccgccgacatacaggaccagctaaagaagagattcgcctatctctcgggcgggcgcgggcaagatgggtcccccgttattacattccccgactacccggcattttccgagattcctgacaaggaattccagaacgttatgacttacttaaccagcatcccttccctgcaagatgctggcataggctttatactggttattgatagaaggcgcgataaatggacttcggtgaaagccagtgtgctgcgcattgctgcatcatttccagccaacctgcagctggtgttagtgttacgcccgacgggtttcttccagagaaccttaagtgatattgcgttcaagtttaacagagacgacttcaagatgaaggtccccgtcatcatgcttagcagtgtgcctgatctccacgggtacatcgataagagtcagctgactgaggatctggggggcaccctagactattgccattctagatggctctgtcagagaaccgccatagaatctttcgcgcttatggtgaagcagactgctcagatgctccagagctttggtactgagctggcggagacagaactgcccaacgatgtccaatcgacgagttccgttctttgtgcccacactgaaaagaaagacaaagcaaaggaggatctgagattggccctgaaggaaggacacagcgtgctggaaagcctgcgggagctacaggctgagggaagcgagcctagcgttaaccaggaccagctggacaaccaagcaacggtacaacgcctgctggcacagctgaacgaaacagaagcggcctttgacgagttttgggcaaaacatcagcaaaagttggaacagtgcttacaactgcgccattttgaacaggggtttcgcgaggtcaaagccatccttgatgctgcctcccaaaaaattgcgaccttcaccgacatcgggaattccctggcccacgtcgaacatctgctcagggatctggcttcattcgaggagaagtctggtgtagcagtcgagagggccagagccctgagtctggatggcgaacagctgatcgggaacaaacactatgccgttgactccattcggccgaaatgtcaggaacttagacacctgtgcgatcagtttagcgccgaaatcgctaggcgtcgcggactgctcagcaagagcttggagctccaccggcggttggagacttccatgaaatggtgtgacgagggaatctacttactggcctctcaaccggtggacaagtgccagagccaggacggggctgaggccgcgctgcaggaaatcgaaaaattcctagagactggcgccgaaaataagatccaggagttaaacgccatttacaaggagtatgagtctattctgaaccaggatttgatggaacacgttagaaaggtgtttcagaagcaggcctccatggaagaggtgtttcatcgacggcaagcatctctgaagaagctcgcagcaagacagacacgccctgtgcagcccgtcgctcccaggcccgaggctctagctaaaagcccatgtcccagtcccgggatccgccgaggctctgaaaacagctcaagcgagggaggcgcactccggaggggcccatacaggagggcgaagagcgagatgtctgagagcaggcaaggccgcggctccgcaggagaggaggaagagtctctcgccattctccgaaggcacgtcatgtctgaactactcgatacagagagggcttacgtcgaagagctactctgtgtgctggaggggtacgctgcggagatggacaaccctctgatggcccatcttctcagtactggccttcataataagaaagatgtgttattcggcaacatggaagaaatttaccacttccacaacaggatcttcttgagggaactcgagaattacacagattgccctgaattggtaggcagatgcttccttgaaaggatggaggactttcaaatttacgagaaatactgtcagaataaaccaagatctgagtcactgtggcgccagtgctccgattgcccctttttccaggagtgtcagagaaaactggatcacaagctttctctcgacagctacctgttaaaaccagtgcagcgcatcacaaaataccagctgctgttgaaggagatgctgaagtacagtcgtaactgtgagggtgcagaggatctgcaagaagcactatccagcattctggggatcttaaaagcagtgaacgacagcatgcacctcattgcgattacgggatatgatggcaacctaggggatctgggtaaactgctgatgcaggggtccttttccgtgtggaccgatcataagcggggccacacgaaggtcaaggagttggccaggttcaagcccatgcaaagacatctgttcctgcatgaaaaggcggtcttgttttgcaaaaagcgggaagagaatggagaggggtacgaaaaggctccatcctattcttacaagcaatcactgaatatggccgccgttggaatcaccgaaaacgtcaaaggggacgccaagaaattcgagatctggtacaatgctagagaggaggtatatattgtgcaagctccgactcccgaaatcaaagccgcatgggttaatgaaatcagaaaagtgttgacttctcagcttcaggcatgcagagaggcgtctcagcatcgggcccttgagcaaagtcaaagtttgcctctgcctgcaccaacttcaacatccccatcgaggggaaatagtcgaaatatcaagaagctggaggaacgcaagaccgacccactgtccctggaaggctacgtatccagcgctccactgaccaagcccccagaaaagggtaagggatggagcaaaaccagtcactccttggaggcccctgaagatgatggtggatggtctagtgctgaagagcaaataaatagctcagacgcggaggaggacgggggcctcgggccaaagaaactggtgcccggaaaatataccgtggttgccgatcatgagaagggcgggcctgatgccctgcgcgtgagatccggagacgtcgtcgaactggtccaggagggggacgaagggttgtggtatgttcgtgatccaactacgggtaaagagggctgggtcccagcatcttccctctccgtgaggctcggacccagtggttcagcgcagtgcctaagcagttctgaatcatcgcccggcagtgccgtcctctctaatagcagctcctgtagcgagggggggcaggccccattctccgaccttcagggctag

SEQ ID NO: 123575 - DNA, 741 bp, synthetic construct
  misc_feature 1..741: note = Description of Artificial Sequence: Synthetic coding sequence
  source 1..741: mol_type = other DNA
atgaggttttggctgcggacagaggagatggccttggaggaaatggtacagcgactcaatgctgtttcaaaacacaccgatgagatcatgcaccaagatattgtgcctctgtgtgctgcagacatccaggaccagctcaagaagcggtttgcatatctctcaggcggtaggggacaggacgggagccctgtgatcacctttccagattatcctgctttcagcgagatccctgacaaagaattccagaatgtcatgacctacctcacctctatacctagtctacaagatgctggcatcggttttatcctggtgattgatagaagacgggacaaatggacctccgtgaaggcaagtgtgcttcggattgccgcctcgttccctgccaacctccagctcgtattagtgttgcgtcccacaggcttcttccagaggacactgtccgacattgcatttaagtttaatcgtgacgatttcaaaatgaaggtgcctgtcattatgttgagttccgtgccagatctccacggctacatcgacaagtcccagctgacagaagacctgggtggaaccttagactattgtcactcacggtggctgtgccaacgaactgccattgagtctttcgccctgatggtgaagcaaacagcacaaatgttgcagtccttcggtacagagttggccgagactgagctcccaaatgacgtgcaatcaacatcctccgtgctgtgtgcgcacactgaatag

SEQ ID NO: 123576 - DNA, 3342 bp, synthetic construct
  misc_feature 1..3342: note = Description of Artificial Sequence: Synthetic coding sequence
  source 1..3342: mol_type = other DNA
atgggggatgggaaggcagttcggatatctgtggcggaaatgaagagctactatctttattccgagtggtgtagctggctcctctccgttgcagaggatgaaatcatgcaccaggatattgtgccgctttgtgccgcagatatccaggatcaactgaaaaagaggttcgcgtacctgagtggaggcagaggtcaggacggttcacccgttatcactttccctgactaccctgccttcagcgagatccccgacaaggagttccagaacgtaatgacttacttgacctctatcccctccttgcaggacgctgggattggatttattctggtgattgaccgcaggagagataaatggacatccgtcaaggcttcagtcctgcgcatagccgcctctttccccgctaacctccagctggtgttggtgctcagacctactggatttttccagcggacactgtcagatatagcttttaaattcaatcgcgacgattttaagatgaaagtgcctgtcattatgctaagtagcgtccccgacctccacggctatattgacaagtcccagctaaccgaagacctgggtggaacacttgattactgtcacagcaggtggctttgccagcgcactgcaatagagtcattcgccctgatggttaaacagactgcccagatgttacagtccttcggcaccgaactcgccgagacagagctgcctaatgatgttcaatccacaagctcagtgttatgtgctcataccgagaagaaggataaagcaaaggaggacctgagactggccctcaaagagggacatagtgtgctcgagtcactgcgggaattgcaggccgagggcagtgaaccttccgtgaaccaagaccagctggataaccaggcaaccgtccagaggctgctggcccagctaaatgagacagaggctgccttcgacgaattctgggcaaaacatcagcaaaagttagagcaatgcttgcagctgcgacatttcgaacaaggatttagggaagtaaaagcaatactggatgccgcatctcagaaaattgcgacgttcacagatatcggaaattcgctggcccacgtggagcatcttttgagagacctggccagctttgaagaaaaatctggtgtggcggtggagcgtgccagagccctcagtttggacggtgagcagcttattggcaataagcactatgcagttgactccattaggccgaagtgtcaggaactgcgccatctatgcgatcagtttagcgcagagatcgcgcgtcggcgcggactgctgagcaaatctttggaactacaccgtaggctggagacatctatgaagtggtgcgatgaaggaatttacctgctggccagccaacctgttgataaatgtcagtcgcaggacggcgccgaagctgcacttcaggaaatcgagaagtttcttgagacaggcgctgagaacaaaatacaggaactaaatgctatctacaaagagtatgagtccattcttaatcaggacctgatggaacacgtgcgcaaagtattccagaaacaagcttccatggaggaagtgtttcaccggcgccaagcctccctgaagaagcttgcagctaggcaaactaggcctgtccagcccgtggccccacgtcccgaggctctggctaagtccccatgtcctagccctggtataaggcgaggcagcgagaacagcagctcggaggggggagcactccgtcgcggaccatatcgtagggctaagtccgaaatgagcgaatctcgccagggtagggggtctgcgggcgaagaagaagagtcccttgccatattgcgcaggcatgtgatgagcgaactgctggataccgagagggcatatgttgaggagctgctgtgcgtgctggagggatacgctgctgagatggataaccctctgatggcacatctactcagcaccggcctgcacaataaaaaggacgtgctgttcggaaatatggaggaaatataccacttccataatcgtatcttcttaagggagctggagaattatactgactgtcccgaactcgtcggacgctgcttcctggagcgaatggaggattttcagatctacgagaagtattgccaaaacaagccacggtcagaatctctgtggagacaatgttctgattgtccattttttcaagagtgccagcgcaagctggatcataaattaagcttagatagttatctgctgaagcccgtccagagaattacaaagtaccagctgctgttgaaggaaatgcttaaatatagtagaaattgtgagggagccgaggatctccaggaagctctctcctctatactgggaatcctgaaagcggtcaacgattcaatgcatttgatcgccattacagggtacgacgggaacctgggcgacctcggtaagctcctcatgcagggctctttcagcgtgtggaccgaccacaagcggggccacactaaggttaaggagctcgctaggttcaaaccaatgcaacgtcacctattccttcacgagaaggccgtcttgttttgtaaaaagcgcgaagaaaatggtgaggggtatgagaaagcaccatcgtactcctacaaacaatctcttaacatggctgccgttggaatcacagagaacgttaagggggatgcaaagaagttcgaaatctggtataacgctcgagaggaggtgtacatcgtgcaagcacccactcctgaaattaaagccgcctgggtgaacgagatccgcaaggtgctgacatctcaattgcaagcctgtcgcgaagcgtcacagcaccgcgccttggagcagtcacaatctctgccactgccagccccgacctctacaagcccctctcggggtaactcccgaaatatcaagaaattggaggagcggaagaccgacccactctcactggagggatatgtttcttctgccccactgaccaagccgcccgagaagggcaagggttggagcaagactagccattccctggaggctccggaagacgatggcggctggtctagtgccgaggagcagataaatagcagtgacgcagaagaggacggtggccttgggcccaaaaagctggtccctgggaagtacaccgtagtggccgaccatgagaaaggtggaccagatgccctccgcgtgagatctggagatgtcgtggaactcgtacaggagggagatgaaggcctatggtatgtgcgcgacccaaccactggcaaagaaggttgggtccctgcctctagcctaagcgtgagacttggtccatctggctctgcccagtgtctctcaagctcaggcaaagctcacgtaccacgcgcacatccatag

SEQ ID NO: 123577 - DNA, 2712 bp, synthetic construct
  misc_feature 1..2712: note = Description of Artificial Sequence: Synthetic coding sequence
  source 1..2712: mol_type = other DNA
ttgaagatgcctgttatcatgctgagcagcgtaccagatctacatgggtatatcgacaaatcgcagctgactgaggacctaggaggtactctggattactgccatagcaggtggttgtgccagcggaccgccatagagtcctttgctcttatggtaaaacaaactgcccagatgctccaatcatttggcaccgagctcgccgagacagagctgcccaacgatgttcaatcaacctcatcagtactatgtgcccatacagagaagaaggacaaagccaaagaagaccttcggctcgctctgaaagaaggccactctgttctcgagtccctaagagagttgcaagccgaaggatcagaaccatctgtgaatcaggaccagttagacaatcaggcaactgttcaacgtctgctggctcagcttaatgaaaccgaagccgcatttgacgagttttgggctaagcaccagcaaaagctggaacaatgtctccaactgcggcatttcgagcagggcttcagagaagttaaagcgatactggacgccgcaagtcagaagattgctacttttaccgacatcggcaacagcctggcacatgtcgaacacctgctgagagacctggcgagctttgaggaaaaaagtggcgtggcggttgagcgagcacgggcactgtctctcgatggtgagcagctaattggcaataaacattacgctgtggactctattcgccctaagtgccaagagctacggcacctctgcgaccagttctcagctgaaatcgcgaggagacgcggactgctctctaaatctcttgaactccaccgtcgcctggagacttctatgaagtggtgtgacgaaggtatctacctcctggcatcgcagcccgtagacaagtgccagtcccaggatggggcggaagcagccttgcaggagatcgaaaaatttctggaaaccggggcagagaataaaatacaagagttgaacgctatctataaggagtacgaatctatactgaatcaggatctgatggaacacgtccgaaaggtgttccagaaacaggccagcatggaagaagtgttccacaggagacaagcaagtctcaagaagttagccgctcgtcagactcgacccgtgcagcctgtggcccccaggccggaggcgctggcgaagagcccatgccctagtccgggtatccgccgggggtcagagaacagttctagcgagggcggagctctacgcagaggcccttacaggagggccaagtctgagatgagcgaaagcaggcaaggacgcggtagcgctggtgaagaagaagagagcctcgctatccttcggcgccatgtgatgtcagagttattggataccgagcgcgcctatgtggaagagctgctctgcgtccttgaagggtatgccgccgaaatggacaacccacttatggcccacctacttagcacgggcctccataacaaaaaagatgtcttgtttgggaatatggaggaaatctaccatttccataaccgcatttttctccgggagcttgaaaactatacggattgtccagaactggttggccgctgcttcctcgaaaggatggaggacttccagatttacgaaaagtattgtcagaacaagccccggagcgaatccctgtggagacagtgttctgactgccccttcttccaggagtgtcaacgcaagttagatcacaaactgtccctcgactcatacctcctgaaacctgtacagaggattaccaagtaccagctccttctgaaagaaatgctaaaatattcccgtaactgtgagggtgccgaagaccttcaggaggccctctcctctattttaggtatcctcaaggcggtgaacgatagtatgcaccttatagccatcacagggtacgatggcaacctgggggacctcggcaaactcttaatgcaaggttcctttagcgtatggacagaccataagaggggacataccaaagtaaaggagctggcccgatttaaacccatgcagaggcacctctttctgcatgagaaggcagtgcttttctgcaagaagcgtgaagagaatggagaaggctacgaaaaagcaccttcatactcatataaacagtccctgaacatggccgccgtgggtattaccgagaatgtaaaaggagacgcaaagaagttcgaaatttggtataacgcaagggaagaggtctacattgttcaggccccaacaccagagatcaaggcagcctgggtgaatgagattagaaaagtcctgacgtcacagctccaggcttgtagggaagcttcccagcacagggctttagaacagtcacagagtctgcctctgccagcaccaacctcaacaagtccatctaggggaaatagccgaaacattaaaaagctggaggagcggaagacggaccctctgagtctcgagggctacgtctcgtccgcacccttgaccaagccacccgagaaaggtaagggatggtccaagacctctcactcactcgaggctccagaagatgacggcggctggagcagcgcagaggaacagattaacagcagcgatgccgaagaagacggtggccttggacctaagaagttggttccaggaaaatacaccgtcgtggctgatcatgaaaaaggcggtccagacgctttaagagtgagaagcggagatgtcgtcgaattggttcaggaaggtgatgaaggcctctag

SEQ ID NO: 123578 - DNA, 3414 bp, synthetic construct
  misc_feature 1..3414: note = Description of Artificial Sequence: Synthetic coding sequence
  source 1..3414: mol_type = other DNA
atgtttgactgctggagatttatactgtgcaagcggccagggagtaattcttactcatcaccccagcgtcccaatgaagcaaaaaaagaggaaaccgaccaccagatagacgtcagcgacgtgatccgactggttcaggatacccccgaggccacggctatggccacagacgagatcatgcatcaggatattgtgcctttatgcgcagctgacattcaggatcaacttaagaagagattcgcgtaccttagtgggggccgcggtcaagatgggtcacctgtgatcacattccccgactatcccgcgttctcggaaattcctgacaaagagttccagaatgtgatgacgtatttaacttccatacccagcctccaagatgctggcattggcttcattctagtcattgacagaagacgggataagtggactagcgtgaaagccagcgtcttgcgcatcgccgcttcattccccgcgaacctgcagctagttcttgtccttcgtccaaccggctttttccagcggactctgagcgatattgctttcaagttcaaccgggatgatttcaaaatgaaagtccccgttatcatgctgtcgagtgtgcccgaccttcatggctacatcgacaagtctcagctgactgaagatcttggtgggaccctggattactgccactctcggtggctgtgccagcggaccgccattgaatcatttgccctcatggtgaagcagactgcccagatgttacagagttttgggacagagctcgcggagacggagcttccaaatgacgttcagtccacatcgagcgttctttgtgcacacaccgaaaagaaggacaaagccaaagaagacctacgcttggccttgaaagaaggtcactcggttttagagagtctgcgcgagctacaggcagagggttctgagcctagcgtgaatcaagatcagcttgataaccaggcaactgtgcagcgcctgctggctcagctaaatgaaacagaagcagcgtttgatgagttttgggccaaacaccagcagaagctggaacagtgcctccaactcagacactttgagcaaggatttcgagaagtgaaggcaatcttggatgccgcttcccagaagatcgcaacatttactgacattggtaacagtttggcacacgtggagcatctactgcgggatctggctagctttgaggagaaaagtggggtggccgtagagagagcccgtgcgctgagtctggacggcgagcagctaattgggaacaagcactacgccgtggattccattaggcccaagtgtcaagaactgaggcatttgtgtgatcagttctccgccgaaatcgctcgcaggcgcggcctactgtccaaaagcttagaactgcacaggcggctagagacttccatgaaatggtgcgacgagggcatctatttgctggcctcccaacctgtggataaatgtcagagccaggacggggctgaggccgccctgcaagagatcgagaaattcctggaaaccggcgccgaaaacaaaatccaggagttgaacgccatttataaggaatacgagagtattctgaaccaggatctgatggagcacgtccgaaaggtctttcagaaacaggccagcatggaagaggtgtttcatcgcagacaggcttcactgaaaaagctggccgctcggcagacgcgtccagtgcagcccgtcgccccccgaccagaagccctcgcgaaaagtccatgcccctcccctggaattaggagggggtccgaaaatagcagcagcgaaggcggagctctgcgtcggggcccatatcgacgagccaaatctgagatgagcgagtctaggcagggccggggtagcgcaggtgaagaggaagagtctctggctatccttcgccgacatgttatgtctgaactgctggacaccgagagggcctatgtggaggaactgctgtgcgtgcttgaagggtatgccgctgaaatggacaatccactgatggctcacttgctcagtaccgggctccacaataagaaggacgtgctcttcgggaacatggaggaaatctatcatttccataatagaatattccttagagagctcgaaaactacaccgattgccccgagctagtaggtcgatgcttcctcgaacgtatggaagactttcagatctacgaaaagtattgtcagaataagcctcgatcagagtccctctggcgtcaatgttctgattgtcctttttttcaggaatgccaaaggaagcttgaccacaaattgagcctggactcctacctcctcaagccagtacaaaggatcaccaaataccagctgctgctgaaagagatgcttaagtattccagaaattgtgaaggagctgaagatctgcaggaagcactctcttccattctcggaatcctaaaggccgtgaatgatagcatgcacctaatcgcgatcactgggtatgatgggaacctgggagaccttggtaaacttctgatgcagggctccttcagcgtgtggacggatcacaagagaggccatacaaaggtcaaggaactggcacggtttaagccaatgcaacgccacctgttcttgcacgagaaggccgtgttattttgtaaaaagcgcgaggagaacggggaaggatatgaaaaggccccctcgtactcatacaagcaatcgctgaacatggctgctgttggcatcacagagaacgtgaaaggtgacgcaaagaaatttgaaatatggtacaacgccagagaggaggtttacatcgtacaggcaccaacccccgaaatcaaggctgcctgggtaaatgagatcagaaaagtgttaacctctcaacttcaggcctgtcgggaagcttcacagcatcgggcacttgaacagagccaaagtctgccactgccagcccccacttcaacctcaccaagtcggggcaatagccgtaatattaaaaaattggaggagcggaagacggatcccctgagcctggagggctatgtgtcctccgcccccctgacaaaacctcctgagaagggcaagggttggtccaagacctcacacagcttagaggccccagaggatgacggaggatggtcatctgcagaggagcaaattaacagcagcgatgctgaagaggatggcgggctgggaccaaagaagttggtcccaggcaaatacaccgtggttgccgaccacgaaaaaggcggcccggatgcactgcgagttcgcagcggggacgtcgtggagctggtccaagaaggagacgaaggcctatggtatgttagggatccaaccaccggtaaggagggatgggtacccgccagttcccttagcgttaggctgggcccctccggctcagcccagtgcctcagctcatcaggaaaggcacacgtaccgcgcgcacacccttag

SEQ ID NO: 123579 - DNA, 3378 bp, synthetic construct
  misc_feature 1..3378: note = Description of Artificial Sequence: Synthetic coding sequence
  source 1..3378: mol_type = other DNA
atgagattttggctccgcaccgaggagatggccctggaggagatggttcagcgcctgaatgctgtcagcaaacacactgatgaaatcatgcaccaggacattgtaccactgtgtgctgctgatattcaggaccaattaaaaaagagatttgcctacctgtctggcggccgcggccaagatgggagtcccgtcatcaccttcccggattacccagctttctctgaaatccctgacaaggaattccagaacgtaatgacctatctcacctcaatccccagcctgcaggatgcggggatcgggtttatccttgtgattgacaggcgcagagataagtggacttccgtgaaagcaagtgtgctaagaattgctgcttccttcccagcaaacctgcagctcgttctcgtgctcaggcccacggggttctttcagcggaccctgtcagatatagcatttaagttcaaccgagacgacttcaaaatgaaggtgcctgtgataatgctcagcagcgtgccagatcttcatggatacatcgataaatcacagcttaccgaagaccttggcggaaccctggactattgtcactcgagatggctttgtcagcgcactgctatcgagtcttttgccttgatggtaaaacaaacagctcaaatgctgcagtccttcggaactgaactcgccgaaacagaactcccaaatgacgtacaatccacaagcagcgttctgtgtgcgcacacagagaaaaaggataaagccaaagaggacctgcggctggccctcaaggaggggcattcagtcctggaaagcttacgtgaacttcaagctgagggaagcgaaccttctgtcaatcaggaccagcttgataatcaggccactgtacagcggctgttggcacagctcaatgaaaccgaagccgcgttcgatgagttctgggcgaaacatcaacagaaactagaacagtgtctgcagctacgacatttcgagcaggggtttcgcgaggtgaaagcaattttggacgccgcgtcccagaagatcgccacgttcaccgacattggcaattcattggcccacgtggagcatctgcttagggacttggctagcttcgaggaaaaaagtggcgtcgccgtagaacgtgcccgcgcactcagtcttgacggggaacagctcataggaaataagcactacgctgttgacagtatccggcctaagtgtcaggagctccggcatttgtgtgatcagttttctgccgaaatcgctaggcgccgaggcctgctctccaagagtttggaactgcacagacgactagagacttccatgaaatggtgtgacgaaggaatttacttgctcgcatcacagcccgtggacaaatgccagagccaagacggcgcagaggccgctcttcaagagattgagaaattcctggagactggtgctgaaaataagatccaggaacttaacgcaatttacaaggaatacgaatctatcctgaaccaggaccttatggaacatgtccggaaggtctttcaaaagcaggcgagcatggaggaagtcttccacaggaggcaagcctccctcaaaaaactcgctgccaggcaaaccaggccagtccagcccgtggcccctcgacccgaggctctggcaaaaagtccctgtccttcgcccggaattcgcagggggtcagagaattctagcagcgagggaggagccctgagacgtggtccttatcgaagggccaagagcgagatgtcagaatctagacaaggtcgaggctccgcgggagaagaggaagagtccctggccatccttcgccgccatgtgatgtcagagctcctcgatacagaaagagcgtacgtagaggaattgctgtgtgtgttggaaggatatgctgctgagatggacaatcccctcatggcccatttactctctactggattgcacaacaagaaggatgtgttattcgggaatatggaagaaatctatcatttccacaataggatctttttgcgggagcttgagaattatactgactgtcccgagctcgtgggcaggtgcttcctcgagagaatggaggacttccaaatttatgagaagtattgccaaaacaaaccaaggagtgagagtctgtggcgtcaatgtagcgactgccccttttttcaggaatgccagagaaagcttgaccataagctgtcacttgattcgtacctgctgaaacccgtgcagcgcataaccaaataccagcttctgcttaaggaaatgctaaagtactcccgcaattgcgaaggggccgaggacctgcaggaagccttatccagcattttggggatactgaaagcggttaacgactctatgcatctcattgcaattacgggttatgacggtaaccttggcgaccttgggaaacttctgatgcaagggagcttttctgtctggacagatcataagaggggacataccaaggtgaaggaactcgcgcgcttcaaacccatgcagaggcatctcttcctgcacgaaaaggccgttctcttttgcaaaaagcgcgaagaaaatggagagggctacgaaaaggcaccctcttattcctacaaacaaagccttaatatggctgccgttggcatcacagagaacgtgaagggggatgccaagaagtttgaaatatggtataatgccagagaggaagtctacattgtccaggcacctacccccgaaattaaagctgcctgggtaaacgagatccgaaaggtcctaacctctcagctgcaggcttgcagggaggcctctcagcatagggccctcgagcaaagccagtcactgccgctgcccgccccaacctcaacgagtcctagtcgcggaaatagtcgcaatataaagaagctcgaagaaaggaaaaccgaccccctgagtctggagggctacgtgtcttcagcccctttgactaagccaccagaaaaaggaaaaggttggagcaagacctcccattcactggaagcacccgaggatgacggaggatggtctagtgccgaggagcagatcaactcaagcgatgccgaggaagacggaggactgggaccaaaaaaattggtgccaggtaagtatacagtcgtggccgaccatgaaaagggggggccagacgctctgcgggtccgctccggcgacgtcgtggagcttgtccaggaaggagacgaaggcctttggtatgttcgtgatcctacaacgggcaaggaggggtgggtgccagcaagcagcctgtctgtcaggctcggtccgagcggtagtgctcagtgtctgtcttctagcgagtcatcccccggttctgctgtgctaagcaactcgagctcttgcagcgagggtggacaggccccattctccgatctccagggctag

SEQ ID NO: 123580 - DNA, 1713 bp, synthetic construct
  misc_feature 1..1713: note = Description of Artificial Sequence: Synthetic coding sequence
  source 1..1713: mol_type = other DNA
atgagtagactggaagccaaaaaaccatctctgtgcaagtcagaacctctgaccacagaacgggtcaggacaaccctgtcagtactaaaacggatcgtcacatcctgctatggaccatccggacggttgaaacagctgcataatggctttggtggctacgtgtgtaccactagtcagtcgagtgccctgcttagccacctgctggttacacaccccattcttaagatacttaccgcctcaatccagaaccatgtgtccagctttagcgactgtggactgttcaccgccatactttgttgcaacctcattgagaatgtgcagcggctggggcttacaccgacaactgtgattcggctaaataagcatctgctttcactctgtatctcctacctgaaaagtgaaacctgtggttgccgcattcccgtagatttttctagcactcagatattgttgtgcctggttagatctatactgactagcaaacccgcctgtatgcttacaagaaaggagaccgagcatgtctccgctctgatactgcgtgccttccttctcacaatccccgaaaatgcagagggtcatattatcttgggcaagagcctcatcgtgccgctcaaaggccaaagagtgattgatagtactgtgctccccgggatcctcattgagatgtccgaggtccagctaatgcggctgttacccatcaaaaagagtactgctctgaaagtcgctttattctgcactaccttaagcggagacacctccgacactggtgagggcactgtcgtggtcagttatggtgtaagcctcgagaatgcagtgctagaccagctactgaatcttgggagacagctaattagcgaccatgtcgacctggtcctatgtcagaaggttattcatccctcactcaaacagtttctgaacatgcaccgtatcatcgctatcgaccgcattggtgttacgcttatggagccattgacgaagatgacaggcactcagcctataggtagcctcggctcaatctgcccgaatagctacggatctgtgaaggacgtctgtactgctaagttcggctccaagcacttctttcacctaattcctaacgaagctaccatctgctcgctcctcctttgcaatcgcaacgataccgcttgggacgaactgaagctgacttgtcaaacagcattgcatgtccttcagctgactctgaaagagccctgggcgctcttaggcggcgggtgcaccgagacccatctggccgcttacattcgccacaagacccataacgatccggagtccatcctaaaggacgatgaatgcacacagactgagctgcaattaatcgctgaagcattctgctctgccctggaaagcgtggttggctcgctggagcatgacggcggggagattttgactgacatgaaatacggccatctttggtcagtgcaagctgacagcccttgcgtcgcaaactggcccgatttgctcagtcagtgtgggtgcggcctatacaacagtcaggaggagctaaactggagcttcctccgttcaacaaggcggccatttgtgccacaatcctgcctaccccacgaggctgtgggctccgccagcaatctgacattggattgtctcaccgcaaagcttagtggcctgcaggttgctgtagaaaccgctaacctgattctagatctctcatatgtgatagaggacaaaaattag

SEQ ID NO: 123581 - DNA, 1713 bp, synthetic construct
  misc_feature 1..1713: note = Description of Artificial Sequence: Synthetic coding sequence
  source 1..1713: mol_type = other DNA
atgtccagactcgaagcgaagaagccgagcctgtgcaaatccgaaccattgactaccgagcgagtgagaaccaccctcagcgtattaaagcgaatcgtgacctcttgctacggcccctccggccgtctcaagcagctacataacgggtttggcggatacgtgtgtaccacgtcccagagttctgcactgttaagccatttgctggtcacacatccaatcctgaagattctcacggccagcatccagaaccacgtgtcttcgttttctgactgcggcctcttcacagccattctttgctgtaaccttatagaaaacgttcagcgtttgggattgacacctaccactgtaatcagactgaacaagcacttgctgagcttatgcatctcatacctgaaatcagagacatgcggctgccgtattcctgtggactttagtagtacacaaatcctcttatgcctcgtacggtctatcctcacgtccaaacccgcctgcatgctgacgcgcaaggaaacggagcacgtgtctgcactgatcttgagagccttcctgctgaccattccagaaaacgcagagggacacattattctcggcaagagcctgatcgtacccctcaaggggcagcgagtcatcgatagtacagtgctccctggaatcctgatcgaaatgtctgaggtacagctgatgagactgctaccgattaagaaatccaccgcgctgaaggtcgcactattttgtacaacactcagcggcgatacgagcgacaccggagagggaaccgtggtcgtatcgtacggagtcagcttggaaaacgcagtgctcgaccagctgctgaatctgggcaggcaactcatctcagatcacgtggatttggttctatgtcagaaagtgattcaccctagccttaaacagtttttgaatatgcacagaataatcgccatcgaccggatcggggtcactttgatggagccactgacgaagatgaccggcacgcaacctatcggtagtctgggtagcatctgccccaattcctatggcagcgtgaaagacgtgtgtacggcgaagttcggaagcaagcacttttttcacctgatccctaatgaagctactatctgttccctgctcctctgtaaccgaaatgacactgcttgggacgaattgaagctgacctgccagactgctctgcacgtgctgcagctgaccttgaaagagccctgggccctcctgggtggcggctgtacggaaacccacctcgccgcctacatcagacacaagacacataacgatcctgagagtatactgaaggatgacgagtgcacccagaccgagctgcagctcattgctgaggccttctgctccgcacttgaatctgtagtgggctcactggaacacgatgggggcgaaatccttaccgatatgaagtacggacacctatggtcagttcaggccgattccccttgtgtggcgaattggccagacctcctaagccagtgcggctgcgggctgtacaattcacaggaggaactgaattggtctttccttcggtccacacgacggcccttcgttccgcaatcgtgcttaccccacgaggcagtaggttctgccagcaatctgactcttgattgcttgactgctaaactgtccgggctgcaggtggcggtggagacagctaacctgatcctcgacctgagttatgtcatcgaggataaaaattag

SEQ ID NO: 123582 - DNA, 2145 bp, synthetic construct
  misc_feature 1..2145: note = Description of Artificial Sequence: Synthetic coding sequence
  source 1..2145: mol_type = other DNA
atgcctgttcggtttaaaggcctgtccgagtatcagcggaattttctgtggaaaaagagctacctgagcgagtcttgtaattctagtgtcggccggaaatacccatgggctggcttgcgaagtgaccagctggggatcaccaaggagccaagctttatcagcaaaaggagggtcccttaccatgacccacagatatccaaatcacttgaatggaacggagcaatctctgagagtaacgttgtggccagccccgagccggaagcgcccgagacccctaaaagtcaggaagctgagcagaaggacgtgacgcaagagagagtccattctctggaagccagtagggtgcctaaaagaacccggagccattcagccgatagccgagccgagggggcatctgacgtggagaataatgagggcgtcaccaatcacacccctgtgaatgaaaatgtggagctcgagcattcgaccaaagtactgtcagaaaatgtggataatgggctggataggttgttgcgtaagaaagccgggctgacggtggtgccgtcctataacgcccttaggaattcagagtaccaacggcaattcgtgtggaagacctcaaaagaaaccgcaccagcattcgcagcgaaccaggtttttcacaacaaatctcaatttgtgcccccatttaaaggtaattcagtaattcatgaaactgagtacaagaggaacttcaaaggcttatccccagtgaaggaaccaaagcttaggaacgatctcagggaaaatcggaacttagagacagtgtcccccgaacgtaagtctaataagattgatgacagattaaagctagaggccgagatggagctcaaagatctgcaccagcccaagcgtaagttaactccatggaaacaccaacgactcggaaaagttaactcggagtatagagctaaattcctgagccctgcccagtacctgtataaagcaggggcctggactcatgtgaaggggaatatgcccaatcaagtaaaagagctgagggagaaagctgaattctaccgtaagagagtacagggcacccacttttccagggatcatctgaatcagatcctaagcgactcaaactgctgctgggacgtgagtagcaccacctcaagcgagggtacagtttcatcaaatattcgggccctcgacctcgccggcgacccaactagtcacaaaacactacaaaagtgccccagtacagagccagaggagaagggcaatatcgtggaggaacagccccagaaaaacacaaccgagaagcttggggttagtgcacccacaatcccggtgcgcagaagactggcatgggacactgaaaatactagcgaggacgttcaaaaacagccaggcgaaaaggaggaggaggacgataatgaagaggaaggcgaccgcaagacaggcaaacaggccttcatgggcgagcaagaaaaactcgatgtgcgtgagaagagtaaagccgataaaatgaaagaagggtccgattccagcgtcagttctgagaaagggggtcgattgcctactccaaaactgcgggaactgggcggcatacaaagaacacatcacgaccttacaactccagccgttggtggcgccgtactggtcagtccgagcaaaatgaaacctccagctccggaacagaggaagaggatgactagccaagattgtctagagacctcaaaaaacgattttaccaagaaggaatcccgagcagtttccctgcttacatcacccgcggccggtatcaaaacagtcgatcctttacccctgagagaggattctgaggataacattcataaatttgccgaggctaccctgccagtcagcaagatccccaaatacccaacaaatccccccgggcaattacccagtccccctcacgtgcctagttactggcatccctcgaggaggatccagggcagtctgcgggatcccgaattccaacacaacgtggggaaggctcgaatgaacaaccttcagttgccacagcatgaagcctttaatgatgaagatgaagaccggctttcggagatcagcgcccgaagcgcagcctcttcccttcgcgcgtttcaaactctcgcacgcgctaagaaacgaaaagaaaacttttggggcaaaacctag

SEQ ID NO: 123583 - DNA, 210 bp, synthetic construct
  misc_feature 1..210: note = Description of Artificial Sequence: Synthetic coding sequence
  source 1..210: mol_type = other DNA
atgcccgtgcgttttaaggggctctccgaataccagcgcaactttctatggaaaaaaagttatttgagcgagtcatgcaactcatctgttgggagaaagtatccctgggccggtctgcgctccgaccagctaggaaaccagggtcgttgtagaacaaaaatccagcacagcgacatcagcagcttactgatcttggtttgttctacatag

SEQ ID NO: 123584 - DNA, 669 bp, synthetic construct
  misc_feature 1..669: note = Description of Artificial Sequence: Synthetic coding sequence
  source 1..669: mol_type = other DNA
atgcctgtccggttcaaggggctgtctgagtaccagagaaattttctgtggaagaaatcatatttatccgagtcttgcaacagctctgtggggcggaagtatccctgggccgggctgaggtcagatcagctggggattaccaaggaaccctctttcatttctaaaaggcgagtcccttatcatgacccccaaattagtaagagtctcgaatggaatggggctatctccgagtccaacgtcgtggccagccccgaacctgaagcgccggagactccaaaatcacaggaagcagagcagaaggacgtgacccaggagcgggtacacagtcttgaagcgagccgagtgcccaagcgaacacgatctcactccgcagacagcagagcggaaggggcgagcgatgtggaaaacaatgagggcgtcacaaaccacacacccgtaaacgagaatgttgagctcgaacactcgacaaaggtgctgtctgagaacgtcgataacggcgtcgggattttcaccgcatttctgttcaagtccattgagttttttatcggattcatcgtcatcagcgtaatactccacttcgttttccagaacttcccactgctttttagttgtcttatgtctatcaggatagtcgacaatcgcttgctgacactggtaattgtgaactag

SEQ ID NO: 123585 - DNA, 2040 bp, synthetic construct
  misc_feature 1..2040: note = Description of Artificial Sequence: Synthetic coding sequence
  source 1..2040: mol_type = other DNA
atgccagtgcgcttcaagggcctttctgagtaccagaggaactttctgtggaagaaatcttacctgtcagaatcctgcaattcatcagtcgggagaaaatatccttgggccgggctgcgatcagatcagttaggcataaccaaggagcctagcttcatatcaaagcgacgcgtgccgtaccacgacccacaaatctctaagtcactggaatggaacggcgcaatctccgaaagtaacgtcgttgcaagtcctgagccggaggcccccgagacccccaagtcacaggaggccgaacagaaagacgttacccaggaacgggtgcactcattagaggcttccagagttcccaaaagaaccaggtcacactctgccgatagcagggctgaaggggcctcggatgtagagaacaacgagggtgtgaccaaccacaccccagtgaatgagaacgttgagttggaacatagtacaaaagtcctgtccgaaaacgtggacaacggcgtctttcataacaagagccagtttgtcccccctttcaagggcaatagcgtcatccacgagacagagtataagcgaaatttcaagggactgagcccagttaaagagcctaagctccgcaatgatttgcgagaaaatagaaatttggaaacggtgagtcctgagagaaaaagtaataaaatcgatgaccggctaaaactcgaggcagaaatggagctgaaagacctgcatcagcctaaacgaaagcttaccccatggaagcatcagaggctggggaaagttaactccgagtatcgcgcaaagttcctcagtcccgcacagtacctgtacaaggctggggcatggactcacgtgaaggggaatatgcccaaccaagggtcgctgaatgctatgtggtatgctgaggttaaggagctgagagagaaggctgagttctacaggaaacgcgtccagggcacgcatttcagtcgcgaccatctcaatcagatactgtcagactccaattgctgctgggatgtctcatcaactaccagttccgaaggcacagtctcaagtaacataagagccctggacctggccggcgacccgacttcgcataaaactcttcaaaagtgccccagcacggagccggaagagaaagggaacatagtggaagagcagccccagaaaaatacaaccgagaagctgggggtctcagcacctacgattcccgttcggaggagattggcctgggacacggaaaacacctccgaggacgtgcagaagcagccgggagagaaagaggaggaggacgacaatgaggaggaaggcgatagaaagaccggaaagcaagcattcatgggcgaacaggagaaactcgacgtgagggaaaaatccaaggccgacaaaatgaaggaagggtcggactcgagtgtctcatccgagaagggaggtcggctgccaactcccaaactccgcgaactgggtggtatccaaaggacccaccatgacctgacaaccccggcagtgggaggggccgtcctggtttcacctagtaagatgaaacctcctgccccagagcagaggaagagaatgactagccaggactgcctggaaactagcaagaatgattttacgaagaaggaatcccgtgcagtaagcctcctaacgtcaccggcagccggtatcaaaacagtggatcctctccctcttcgggaagactctgaagataacatccacaagtttgccgaggccaccctgccagtcagcaagattcctaaataccctaccaatcctccaggacagttgccctcacctccacatgtgccaagctattggcatccttcaaggaggatacaagggtccctgagggatcctgaattccaacataatgtcggtaaggctcggatgaacaatctacagttgcctcagcatgaggcttttaatgacgaggacgaggaccgcctgagcgagatttctgccagaagcgctgcctcctctctgcgagccttccagacccttgccagagcgaagaagcggaaggaaaatttctggggtaaaacctag

SEQ ID NO: 123586 - DNA, 2715 bp, synthetic construct
  misc_feature 1..2715: note = Description of Artificial Sequence: Synthetic coding sequence
  source 1..2715: mol_type = other DNA
atggaccgctatctcctactggtgatctggggagagggcaagtttccaagcgcggcctcaagggaagcagagcatggccctgaggtgtctagcggggagggcacagagaatcaaccagatttcaccgccgcaaacgtgtatcacctgctgaaaagaagcatatccgcaagtatcaaccctgaggatagtacatttcctgcgtgttccgtgggggggatacctgggtccaagaagtggttttttgctgtgcaggccatttacggtttctatcagttttgctctagcgactggcaggaaatacatttcgacacagagaaggacaaaattgaagacgtcctccagacaaacattgaggagtgtcttggcgccgtagagtgttttgaggaggaagactcaaacagtagggaatcgttgtcactcgcagacctgtacgaagaagcagccgagaacttgcaccaactgagcgataagcttccagcccccggacgcgccatggtggatattatcttactgttgtcagataaggatccgcctaagttgaaagactacttacctaccgtcggcgcgctgaaacacctcagagaatggtatagcgcgaaaatcacaatagccggtaatcactgcgagattaactgtcagaaaatcgctgaatatcttagcgccaatgtcgtgtccctcgaggacctgaggaatgtcatcgacagtaaggagctatggaggggcaaaatccaaatttgggagcgcaagtttggattcgagatttcgttcccggagttttgcctgaagggtgttactctgaagaacttctccaccagtaacctaaatactgacttcttggcaaaaaaaatcatccccagcaaggacaaaaacattctacctaaggtgttccactattacggacctgcccttgaatttgtgcagatgattaagctgtccgacttgccgtcgtgttatatgtcagacatcgaatttgagcttggccttacaaactctactaaacagaactccgtgttgctcctggagcagattagctctctgtgcagtaaagttggagctctctttgtactgccctgcacaatctccaacatccttattcccccacccaaccaactcagttcacggaagtggaaggaatacatcgccaagaaacctaaaaccatctctgttccagacgtcgaggtcaagggtgagtgtagctcatattacctgcttcttcagggcaacggtaatcggagatgtaaggcaaccctaatccacagcgccaaccaaatcaacggaagcttcgccttgaacttgatacacggtaagatgaaaactaagactgaggaagccaaactctcctttccttttgatctgctgagccttcctcactttagtggcgagcagatcgttcagcgggagaaacaactggctaacgtgcaggttttggccctggaggagtgccttaagcgcaggaagttggccaagcaaccagagacagtctcagttgccgagctcaagagcctgctcgtattaacccgaaagcacttcctcgattattttgatgcggtaatccccaaaatgatcctgcggaaaatggacaagatcaagacgtttaatatactgaatgattttagccccgtggaacccaactcgtccagccttatggagactaatcccttagaatggcccgaacgccatgtgctgcaaaatctggagaccttcgaaaaaacgaaacagaagatgagaaccgggtcgctgcctcactcctccgaacaacttctgggacacaaggaaggtccgagagactctatcaccctcctggatgccaaggaactcctcaagtacttcacctcagatggacttccgattggcgatctgcagcccctcccaattcagaagggcgagaagacatttgtcctaacccctgagctgtcaccaggaaagctccaggtactcccatttgagaaggcatccgtgtgccattaccacggtatagaatattgcctagacgaccgaaaagccctggagcgggacgggggcttttctgagctgcagagtaggctgattcgctatgaaacccaaacaacctgcactagagagtccttccccgtgccaacagtcttaagcccactgccctccccagtggttagcagcgacccaggatcagtgcccgacggagaagtcctgcaaaatgagttgagaactgaagtgagccgacttaagaggcggtctaaggacctcaactgtttatacccccggaaaaggctagtcaagtctgaatcttctgaaagtttactctctcagacgaccggcaacagtaaccattaccatcaccatgtgaccagccggaagcctcaaaccgagaggtcattgcctgtcacttgcccactggttcctataccttcctgtgagaccccaaagcttgctacgaaaacgagctctgggcagaaatccatgcacgaaagcaaaacgagccgccagattaaagaaagtcggagtcagaaacacacacgcatacttaaggaagtcgtcactgagaccctgaaaaagcactctataactgagacacatgagtgctttacagcttgctcccagcggctgtttgagatatctaaattttacctaaaggacttgaagactagccgcggcctatttgaagagatgaaaaaaaccgctaataacaacgccgtgcaggttattgattgggtgctggaaaagacttccaagaaatag

SEQ ID NO: 123587 - DNA, 1374 bp, synthetic construct
  misc_feature 1..1374: note = Description of Artificial Sequence: Synthetic coding sequence
  source 1..1374: mol_type = other DNA
tgaatggcggaaaccgtctggagcacagacactggcgaagccgtgtatcggtctcgcgaccccgtgaggaacttgaggctcagggtgcatctgcagcgtattacatcctccaacttcttacattaccagccagcagccgagctcggcaaggatttaatcgacctcgcgacatttagaccacagcccactgcctcggggcaccgaccagaggaggacgaagaggaggagattgttatcggatggcaggagaaattgttcagtcaatttgaagtggacctgtatcagaatgaaacagcctgtcagtcaccactcgactatcagtatcgtcaggagatcctgaaacttgagaatagtgggggcaagaagaatcggaggatcttcacatacacggattctgatcggtataccaacctagaagaacattgccaacgaatgactaccgccgctagtgaggttccatcctttctggtagagaggatggctaacgtgaggcggcgtaggcaagacagacggggaatggagggtggcattctcaaatctaggatcgtgacttgggagccctcagaggaattcgtaaggaataaccatgtaatcaacacgccactccaaaccatgcatatcatggccgatttaggaccatataagaagctgggatacaagaagtatgaacacgtgctctgcacactgaaggtggactctaatggcgttataactgtgaagcctgactttaccgggcttaaggggccctatcgaatcgagacagaaggcgagaagcaggaactgtggaaatatacaattgataacgtgagcccgcatgcccagcccgaggaggaagaacgagagcgccgcgtgttcaaggacctgtatggacggcataaggaatatctgtctagcctggtcggtactgactttgaaatgaccgtcccaggagcacttcgcctctttgtgaatggcgaggtggtgtctgcccaagggtatgaatatgataatctgtatgtccacttcttcgtagaactccccaccgcccattggagttctcctgcctttcaacagctctccggggtaacccagacatgtactacaaaatccctggcaatggataaggtggcacacttttcttatcccttcaccttcgaagctttttttctgcatgaggacgagtctagcgacgctctgcctgaatggccagtgctctactgtgaggtgctttctttggacttctggcagcgctaccgagtggagggctatggtgctgtcgttcttccagcaacaccaggcccttcttggaaccgtgcaccatttagaaaaggctgcggagtgtgttggacagtgtggaagggatctgcgtcgcgtgtgccattcaccatgtgttag

SEQ ID NO: 123588 - DNA, 1566 bp, synthetic construct
  misc_feature 1..1566: note = Description of Artificial Sequence: Synthetic coding sequence
  source 1..1566: mol_type = other DNA
atggccgagactgtgtggagtaccgataccggggaggctgtatacaggtcccgagaccccgttcgtaaccttaggctcagagttcaccttcaaagaattaccagctcaaattttcttcactatcagcctgctgctgagctgggtaaggatttgatagacttagctaccttcagaccacaacccaccgccagcggccacagacccgaggaggatgaagaggaggaaatcgtgatcggttggcaggaaaagctctttagccagttcgaagttgacctgtaccagaacgagacagcttgtcaaagtccattagactatcagtaccgccaggaaatcctgaagttggagaactctgggggcaaaaaaaatcgtagaattttcacttatactgactcagatcgctatacaaatctggaagagcactgtcaacgcatgaccacagcagcttcagaggtgccaagctttctggttgagcggatggcgaacgtgaggcgaagacggcaggatagacgagggatggagggtggcattctgaagagccgcattgtgacatgggaaccatctgaggagtttgtgcggaacaaccatgtgattaacacgcctctacaaaccatgcatatcatggcagatcttgggccctacaagaagctcggatacaagaagtacgaacacgtgctgtgcactctgaaagtggactccaacggagtgattaccgtcaaaccggacttcaccggtttgaaaggtccctaccgaatcgagactgagggagaaaaacaggagctgtggaaatacaccatagataatgtcagcccacacgcccagccagaggaggaagagcgcgagcgccgagtctttaaggacctctacggcagacacaaggagtacctttcctcgctggtcgggaccgatttcgaaatgactgtgccgggtgccctccgcctttttgtcaatggtgaggtggtgtcagcccagggatacgaatatgacaatctctatgtgcattttttcgtggaattgcctacagcacactggtctagccctgctttccagcagctgagcggagtaacgcagacctgtaccaccaagtctttggccatggacaaagtggcgcacttctcttacccgtttaccttcgaagctttcttcctgcacgaggacgagagtagtgatgccctgccagaatggccagtgttgtactgtgaggttctgagcttggatttctggcaacgctaccgcgtggaggggtacggggcagtagtgctccccgctacccctggttcccatacactcacggtatccacctggcgccccgtggagctcggcactgtggcggaactgaggcgcttcttcattggcggatcccttgaattagaagacctatcttatgtcagaattccaggttcgttcaaggccctcttaagctcaagtaagaccaaggaagggcgtaaagtggacggggagcgagtgctgaatccgcagcctgtcagcctctccctattccctggtaagcctcactccaccgcttggggccttttacgcctaaggtacgaactgtttttatcgaaatag

SEQ ID NO: 123589 - DNA, 1680 bp, synthetic construct
  misc_feature 1..1680: note = Description of Artificial Sequence: Synthetic coding sequence
  source 1..1680: mol_type = other DNA
atggcagaaaccgtttggtctaccgataccggagaagccgtgtacaggtccagggacccagtgaggaatctccgcctccgagtccacctacagcgcataacgtcctccaattttctacactaccaacctgcagctgaactggggaaagatctcattgacctagctaccttccgtcctcaaccaacagcctccggccatcgcccagaagaggatgaagaagaggaaattgttatcggatggcaagaaaagctattttctcaattcgaggtggacctttaccagaatgagaccgcgtgtcaaagccctctggattaccagtaccgacaagagatcctgaagctggagaacagcggaggaaaaaagaaccgtcggatctttacctatacagatagtgataggtacacgaacctggaggagcattgccagcgaatgactacggctgcatcagaggtgccctcctttctggttgaaagaatggcgaacgtgagaagaaggcgacaagaccggcgtgggatggaaggaggtatccttaaatcccggattgtgacttgggaaccatcagaagagttcgttcgtaataaccacgtgattaacacgcctctgcagactatgcacataatggccgatctgggaccatacaaaaaactcgggtacaagaaatatgagcatgtcctttgtactctgaaggtcgactcaaatggcgtgattactgtgaaacctgatttcactgggttaaaggggccttatcgcatagaaactgagggcgaaaagcaggagctgtggaaatatactatcgacaacgttagccctcatgcccagcctgaagaggaggagcgggagaggagagttttcaaagacctctatggaagacataaggaatatcttagttccctggtggggactgacttcgaaatgacggtccctggagccctgcgcctgtttgtgaatggcgaagtggtgagtgcccagggatacgagtatgataatctgtatgtgcatttcttcgtggagcttcctaccgcgcactggtcctcacctgcattccagcagctgagcggtgtcactcagacctgtactacaaagagtctggcgatggacaaggtggcacacttttcctacccattcacatttgaagccttctttctacacgaggacgagtcctctgacgccctccccgagtggcctgtgctgtactgcgaggtgctgtccctggatttttggcagcggtatagggtcgaaggctatggcgccgtcgttcttcccgccaccccgggctcgcacactttgaccgtgtccacatggagaccagttgaactgggcacagtcgccgaactgagaagattttttatcggcggctcccttgagttggaggatctgtcatatgtgaggatcccaggctcctttaaaggcgagagactgtctcgattcgggctgcgaaccgagacaaccggcaccgttacttttcggttgcattgcctgcagcagtcgcgggcattcatggagtctagctcccttcagaagaggatgcgcagcgtcttagatcggctggagggcttcagtcagcaatcctctatccacaatgtacttgaggcctttcgaagagcgcggcgacggatgcaggaggcacgtgagagcctgccacaagaccttgtttctccatctggtaccctggtgagctag

SEQ ID NO: 123590 - DNA, 1563 bp, synthetic construct
  misc_feature 1..1563: note = Description of Artificial Sequence: Synthetic coding sequence
  source 1..1563: mol_type = other DNA
atggccgagactgtctggagtacagacacgggggaggccgtgtatcgctctagagatccggtgcggaatctccgccttcgtgtgcacttgcagcgcataacatcttcaaactttctccattatcaaccggctgccgaattgggtaaagacctcatcgacctggccacttttcgcccccagccaaccgcctccggtcacagacccgaggaagatgaagaggaagagattgtaatcggatggcaagagaaactgttctcccaatttgaggtggatctctatcagaacgaaacagcttgtcagtcacccttggattaccagtaccggcaagagatcctcaaactagagaattccggcgggaagaagaaccgcaggatctttacttatacagacagcgacaggtatactaatctcgaggaacattgtcaacgcatgacgaccgcagcatctgaggtaccatctttccttgttgaacgcatggccaatgttcgcaggaggcgacaggacagacggggtatggagggcgggatactgaagagtcggattgtgacttgggagccttctgaagagtttgtgaggaataatcacgtcattaatactcctttgcagactatgcatataatggcagacctgggaccctataaaaaactgggttataaaaagtacgaacacgtactttgtaccctgaaagtggactccaatggagtaatcaccgtcaagccagacttcacagggctgaagggaccatataggatagagactgagggcgaaaagcaggagttatggaaatacactattgataatgtatcccctcacgcccagccagaggaagaagaacgcgaacgccgggtattcaaggatctctacgggcggcataaagagtatttgtcctccctggtgggaactgactttgagatgaccgttccaggagcactgagactgttcgtgaacggcgaagtggtaagtgcccaagggtacgagtacgataatttgtacgtgcacttctttgtggaattaccaactgcacattggagttcaccagcattccagcagctgagcggggtgactcagacctgtactaccaagtccttggctatggataaggtcgcccacttttcttacccattcactttcgaggctttttttcttcacgaggacgaaagctccgatgcccttcccgagtggcccgtgctctattgcgaggtgctttccctggacttttggcaacgttaccgtgtggaaggctacggggcagtggtcctgcccgcaacaccaggatctcatacactgactgttagcacatggaggccagtcgagctgggcacagtggcagagctgaggagatttttcatcggaggatctctggaactggaagatctctcctatgttagaatccctggaagcttcaaagggttgtctagtagtaaaacgaaagagggtagaaaagtggacggagaaagagtactgaatcctcagccagttagcctgtccctttttcctggcaagccccacagtaccgcctggggcctgcttaggctgcggtacgaactgttcttgagcaaatag

SEQ ID NO: 123591 - DNA, 1650 bp, synthetic construct
  misc_feature 1..1650: note = Description of Artificial Sequence: Synthetic coding sequence
  source 1..1650: mol_type = other DNA
atggccgtacccgtctctagctttgctcaacgtacccggtccaggttcagagtccatctgcagcggataactagtagtaatttcctgcactaccagccagcagccgaactgggcaaggatctgattgacttagcaaccttccgcccacagcctacagccagcggccacaggcctgaggaggatgaggaggaggaaatcgtcatcggttggcaagagaagctgttcagccagttcgaggtggacttataccagaacgaaaccgcttgccagagccctttagactaccagtacagacaggaaatcctcaaattggaaaactccggagggaagaaaaaccgcaggatctttacctatacagattccgatcggtatactaacctggaagaacattgccagaggatgactacggcagcttcagaggtgccgtccttcttagtggaacgcatggccaatgtgcggcgtaggagacaggatcggagggggatggaggggggcatactgaagtcccgaattgttacgtgggaaccaagcgaggagttcgtaaggaacaatcacgtcatcaatacccctttacagactatgcacattatggctgaccttgggccctataagaagctggggtacaaaaaatatgaacatgttctctgtaccttaaaggtggatagcaacggagtcatcacagttaaacccgattttactgggctgaagggcccgtatcgtattgagactgaaggggaaaaacaggagctgtggaagtacaccatcgacaatgtgagcccccacgcgcagccggaagaggaggaacgggagcgccgggtgtttaaagacctctatggacgtcacaaggaatacctaagcagcctcgtcggtactgactttgaaatgaccgtgccaggagcattgcgcttgtttgtgaacggcgaggtagtttccgcacaaggctacgagtatgacaacctgtatgttcacttcttcgtcgaactaccgacagctcactggtcttccccagcatttcagcagctttcaggagttactcagacatgcacaaccaaatctctggccatggacaaggtcgcccatttctcttatccctttacgttcgaggcctttttcctccatgaggatgaaagcagcgacgcgctgcctgagtggccagtactatactgcgaggtccttagtctggatttttggcagcggtacagagtggaaggctacggcgctgttgtactcccagccacacctggcagccacactttaacggtttctacctggaggcccgtcgagctcgggacggtcgcagagctcagaaggtttttcattggtggctctctggagttagaggatctctcctacgtgcgaattcccggatcttttaagggagagcggctgagtcgatttgggctgcgaacagagacgactggcaccgtgacatttagactgcattgtcttcagcagtctcgggcctttatggagagtagctccttgcagaagcggatgcgatccgtcctcgatcggctcgagggtttcagccagcaatctagcatccataatgtgctggaagccttcagacgcgctcgtcgaaggatgcaggaagcccgagagtctctcccacaggatctggtctccccatcagggacactcgtttcgtag

SEQ ID NO: 123592 - DNA, 1071 bp, synthetic construct
  misc_feature 1..1071: note = Description of Artificial Sequence: Synthetic coding sequence
  source 1..1071: mol_type = other DNA
atgcatatcatggccgacctgggtccctataagaagttagggtataaaaagtatgaacacgtgctgtgtactctaaaagttgactctaacggggtgattacagttaaacccgacttcaccggccttaagggcccctatcggatcgagaccgaaggtgaaaagcaggaactctggaagtacaccatcgacaatgtaagcccccacgctcagcccgaagaagaagagcgggagcggagagttttcaaggacttgtacgggcggcacaaggagtaccttagtagtttagttggtacagacttcgagatgacagttcccggtgccctccgtctgtttgtcaatggagaggtggtatccgctcaggggtacgaatacgacaatctgtacgtacatttcttcgtggaactgcccactgcgcattggtctagcccggccttccagcagttaagtggggtaacccaaacatgtacaaccaagtctctagccatggacaaggtagcacacttctcttaccctttcacattcgaagcattcttcctgcacgaagatgagagtagtgatgccctccccgagtggccagtcctgtactgcgaagttttgagtctggacttctggcagcggtaccgcgtagaaggttacggcgctgtagtgctccccgccacccctgggtcacacacactgactgtgtctacttggagacccgttgaactcggcactgtggccgagttacgacgcttcttcatcggtggatcactcgagcttgaggatctgagttacgtgcgcatcccaggttcattcaaaggcgagcgcttatcccggttcgggcttagaacagaaacgacaggcacggtcacatttaggctgcactgtttgcagcagtcgagggcttttatggaaagtagctccttgcagaagcggatgcggtcagtgctcgaccggctcgagggcttctcacagcagagtagtattcacaatgtccttgaggcctttcggcgggcaagacgcagaatgcaagaagcccgggaaagcctccctcaagacctcgtgtccccctccggcacattggtttcctag

SEQ ID NO: 123593 - DNA, 4746 bp, synthetic construct
  misc_feature 1..4746: note = Description of Artificial Sequence: Synthetic coding sequence
  source 1..4746: mol_type = other DNA
atgaaagcccagggtgagaccgaggaaagcgagaaactgtccaagatgtccagcctactggaacgactgcacgccaagttcaaccaaaacagaccttggtcagagacaatcaagctagttagacaagttatggagaaaagagtcgtcatgtcctccgggggccaccagcacctagtcagctgtctggaaacactgcaaaaggcacttaaggtgacttccttgccggcgatgaccgatcggttggaatctatcgctcgccagaacggcctgggatctcacctcagcgcgtccggtaccgagtgttatatcacttcagacatgttctacgtggaagtgcagctggacccagccggccaactttgcgatgttaaggtcgcacaccatggagagaatcctgtgtcctgcccagaactggttcagcaactgcgcgaaaaaaattttgacgaatttagtaagcatttgaagggcctagtgaacctttataacctgccgggcgataacaagctcaaaaccaagatgtacttagccctgcagagcctggagcaggatttaagcaaaatggccatcatgtactggaaggccactaatgccggaccattggacaagatcttgcacggttccgtagggtatctcacccccaggtcaggtgggcacctgatgaaccttaaatattatgtgagccctagtgatctgctcgacgacaagactgcgagtcctattattctgcacgagaataatgtctctcgcagtctgggaatgaacgcctccgtgaccatcgagggaacctcagctgtttataaactccccatcgcaccactgatcatgggatcacacccagtagataacaagtggacgccatccttttctagtatcacatcagccaatagtgttgatttacccgcctgcttcttccttaagtttcctcagcctattcccgttagtcgggccttcgtccaaaaattgcagaattgtaccggaatccccctctttgaaactcagcccacttatgctcccctttacgaactcattacccagtttgagctgagcaaggatccagatccaattccccttaaccataatatgagattctatgccgcactccctgggcagcaacactgctatttcctgaacaaggatgcacctttacccgatggaagatctttgcagggcactctggtgtctaagatcacctttcagcaccccggtagagtccccctgatcctgaacctgataagacaccaagtggcttacaatacgcttattggatcctgtgtgaagaggactattctgaaagaagattctccgggtctgttgcagtttgaagtgtgtcccctttccgaatctcgtttttcagtcagctttcaacacccagtgaatgattccctcgtgtgtgtggttatggatgtgcaggatagcacccatgtttcttgcaagctctataaaggcctgtctgatgccctaatttgtaccgatgactttattgccaaggtcgtgcagcgatgtatgagcatcccggtgacgatgagggccattaggaggaaagctgaaactatccaggcagataccccagctcttagcctgatcgccgagactgtggaagatatggttaagaagaacctgccgccagcctcctctccgggctacgggatgaccacaggcaacaaccccatgtctggaaccacaacacccaccaataccttccctggtgggccaattaccacattgttcaatatgtcaatgagtataaaggatcggcacgagagcgtcggccatggggaggacttttccaaggtgtcccagaacccaatcctgacctcactgctgcaaattaccggcaacggcggtagcactattggttcctcccccacccctccgcaccatacacctcctcccgtgtcctcaatggctggcaacacaaaaaaccaccctatgcttatgaatctgctcaaagacaatcctgcgcaggattttagtacactgtacggctccagtcccctggagcggcagaattcttcaagtggctccccacgcatggagatctgcagcggctctaacaagactaagaaaaaaaagagctcgaggctccccccagagaagcctaagcaccagaccgaagacgatttccagagagaactgttctcaatggatgtcgattcccagaatccaatcttcgacgttaatatgactgccgataccctggacaccccacacattactccggcccccagtcagtgcagtacccctcccacgacttacccacagccggtcccccatcctcagccctcgatccagagaatggtccggctgagcagttcagactctatcggacccgacgtgacagatatcctatctgatattgctgaggaagcctcaaagcttccatcaacctccgacgattgtcccgccatcggaactcctctcagagacagctccagcagtggccattcacagtcgacactgtttgattccgatgtctttcaaactaataataacgaaaatccttatacagacccagccgacttgatcgctgacgctgctggtagcccatccagcgactccccgacgaaccactttttccacgatggggtggatttcaatcccgacttactgaattcccagagtcagtccggtttcggtgaggagtactttgatgagtctagccaaagcggagataatgatgactttaagggctttgcctcgcaggccttgaacaccctgggagtgccaatgctaggtggtgacaatggagagacgaagttcaagggaaacaatcaggctgacaccgtggacttttccatcattagcgtcgctggtaaagctctggccccagccgacctgatggaacatcactctggtagccaaggacctctcttaacgactggtgacttagggaaggagaaaacacagaagagggtgaaggaaggaaacggcacttcaaattccacgttaagcggtcccgggctcgatagtaagcccggtaagcggagccggacaccatccaatgatggaaaatccaaggacaagcctcctaagaggaagaaagctgatacagaaggaaagtctccctctcattcatctagcaaccggccattcactccccctaccagcacaggggggtccaaatcccctggctccgccggacgctctcaaacacctcctggggtggccaccccaccaatcccaaagataactatacagatccctaaaggcactgtgatggttgggaagcctagcagccactctcaatatacatcatccgggtcagtctccagctctggttctaaaagccaccacagtcatagcagctcttccagcagcagcgcttcaacgagtgggaaaatgaaatcttctaagagcgaaggctcatccagctctaagttatcgagcagcatgtattcctcgcaaggtagtagtgggagttcacaatctaaaaatagctctcagtctggtggaaagcctggaagctctccaattaccaagcacggcctgtcctctggcagctcatctactaaaatgaagccacaggggaagccatcatcgctaatgaacccctctttgagcaagcccaatattagtcccagtcatagcagacctccggggggcagtgataagctcgcttcccctatgaagcctgtgcccggaacgccccctagctcgaaagccaaaagccccattagctctggaagcggcggtagccacatgagcggcacgtcaagctcctctggtatgaaaagcagcagcggtttggggagctctggctccttgagtcagaaaaccccaccttcgtccaattcatgtaccgcgtcatcaagcagtttctcctcaagtgggtcctccatgtcatcttcacagaaccagcacggctccagcaaaggaaagtcaccctctagaaataaaaaaccatctctaaccgctgtcattgacaaactgaaacatggggtcgtgaccagcggtcccggcggggaggacccgcttgacggccaaatgggcgttagcacaaactcaagctcccaccccatgagtagtaaacacaacatgtcggggggggagttccagggtaagagagaaaaatcggataaggataagtcaaaggtgagcacctctgggtcctccgtcgactcctctaaaaaaacgtcagaatcaaagaacgttggcagcacaggtgtggctaagatcatcatcagcaagcatgacggtggctcgccctcgattaaggccaaagtgaccttgcagaagcccggagagtcctctggagaagggctgcgtccccagatggctagttccaagaactacggtagtcccctcattagcggtagcacacctaagcatgaacggggtagcccttcccactccaagtctccggcctatactccacagaatctggattcagaatctgagagtgggagttctatagctgagaagagttaccagaactctccgtccagcgacgatggaattagacctcttcctgagtacagcaccgaaaaacataagaaacacaagaaagagaagaagaaggtgaaggacaaggatcgcgatagggacagggacaaagaccgggataaaaagaaaagccattctataaaaccagagtcgtggtccaagagtcccatttctagcgaccagtcactgtctatgacatcaaatacgatcctgtcagctgataggccaagcagactatctcctgactttatgatcggtgaagaggacgacgatctgatggacgtggcacttatcggaaactag

SEQ ID NO: 123594 - DNA, 1671 bp, synthetic construct
  misc_feature 1..1671: note = Description of Artificial Sequence: Synthetic coding sequence
  source 1..1671: mol_type = other DNA
atgaaggcacagggggagacagaggagagcgagaaactatccaaaatgtcgagcctgctggaaagactgcacgccaagttcaaccagaaccggccttggtctgagaccataaagctcgtaagacaggtgatggagaaacgagtagtcatgagttccgggggacatcagcacctggtgagctgcttggaaactctgcagaaagctttgaaggtaacatcattgcctgccatgacagatcgccttgagtcgattgcacgccagaacggcctaggatcccatcttagtgcctctgggacggaatgttacatcacctccgacatgttttacgtggaggtgcagctggatcctgccggacagttgtgtgatgtaaaggtggcgcatcacggcgaaaaccctgttagttgtcccgagcttgtgcagcaactgcgggaaaagaattttgatgagttctccaaacacttgaaagggttagttaacctgtacaatcttcctggcgataacaagcttaaaacgaagatgtacttggcccttcagtccctggaacaagacctcagcaaaatggccatcatgtattggaaagccaccaacgctggcccactcgataaaatcttacacggaagtgtggggtaccttacccctagaagcggcgggcacctcatgaacctgaaatattatgtttcgccttctgatctcctagatgataaaactgcgtcacctatcatcctgcacgagaataatgtttcccggtccctaggtatgaacgcgagcgtcaccattgaggggacaagcgcagtctacaagctgcccatcgctcctctaattatgggctctcatccagtcgataataaatggaccccctctttcagcagtattacttcagccaatagcgtcgacctcccggcttgtttttttctgaagttcccacaaccgattcccgtgtctcgtgcgttcgtccagaagctgcaaaattgcactgggatcccactgtttgagacgcagcccacctacgcacctttatatgaactaatcacacagttcgagttgtccaaggatcctgaccccatacctctgaatcacaatatgaggttctacgctgctctgcccggtcagcaacattgctactttcttaataaggacgcccccctgccagacgggaggtctctgcagggaactctggtaagcaagatcacgttccagcatcctggaagagtgccattgatcctcaacttgattagacaccaggtggcctataatacactaatcgggtcatgcgttaaaaggactatcctcaaggaagacagccctggccttctgcaattcgaggtctgccccctctctgaatcccgattcagcgtgtcatttcagcaccctgtgaacgattctctcgtttgcgttgtgatggatgtccaagacagtacccatgtatcctgtaagttatacaagggattaagcgacgcgctgatctgcactgacgatttcattgcaaaggtagtccagaggtgtatgtcaatccctgtgacaatgagggcaatcagaaggaaagcggaaacgatacaggcggatactccagcgctgagtttgattgctgaaacagtggaggacatggtcaagaagaatctgccacctgccagcagtcccggaagcaaaaaccctgagttggggagcggctag

SEQ ID NO: 123595 - DNA, 408 bp, synthetic construct
  misc_feature 1..408: note = Description of Artificial Sequence: Synthetic coding sequence
  source 1..408: mol_type = other DNA
atggcagaaaagtttgaccacctggaagagcatttagagaagtttgtggagaacatcaggcagctggggattattgtgagtgatttccagcccagcagccaagccggtttgaatcagaaactcaatttcattgtaacaggactccaggacatagacaagtgtagacagcaactccacgacatcacagtgcccctggaagtttttgagtacatcgaccaggggcgcaatccccagctttacacgaaggagtgccttgaacgggcattggctaaaaacgagcaagtaaagggaaagattgacaccatgaaaaaattcaagagtctgttgatccaagaactctctaaggtattccccgaggatatggcaaagtacaggtcaatccgaggagaagatcatccaccgtcgtag

SEQ ID NO: 123596 - DNA, 354 bp, synthetic construct
  misc_feature 1..354: note = Description of Artificial Sequence: Synthetic coding sequence
  source 1..354: mol_type = other DNA
atggctacttattctctggctaatgagcggctgagggctttagaggatatcgagagggagattggcgcaatcctgcagaacgccggcacagtgattctcgagctctcgaaggagaagacaaacgaaagattgctggataggcaggccgccgcattcaccgctagtgtgcaacatgtcgaagcagagctatctgcccagataaggtacctgacccaagttgcaacaggtcaaccccacgagggaagttcctactcctcccggaaagattgccagatggctctgaagagggtagactatgctcggctcaagctgtcagacgtcgcccgtacgtgtgaacagatgcttgagaactag

SEQ ID NO: 123597 - DNA, 6543 bp, synthetic construct
  misc_feature 1..6543: note = Description of Artificial Sequence: Synthetic coding sequence
  source 1..6543: mol_type = other DNA
atggctgcttttgggatattgagttacgaacaccgcccactaaagcggcccagactggggccaccagatgtgtacccgcaggatcccaagcagaaagaggacgagttaaccgccctcaatgtaaagcagggttttaataaccaacctgccgtctcaggggatgaacatggaagcgccaagaatgtctcatttaatccggccaagatttcctcaaacttttctagtattatagcagaaaaactaaggtgcaacacgctccctgacacaggacgaagaaaaccacaggtaaaccagaaagataatttttggctggtgaccgccagatctcagagcgctattaatacttggtttacagacctcgccggcaccaaacccctaacccaattggctaaaaaggttcctatcttcagcaagaaagaggaagtcttcggctacctcgcaaagtacaccgtgccagtgatgagggctgcctggcttatcaaaatgacttgcgcctattatgccgcaatcagtgagaccaaggtaaaaaagaggcatgttgatccttttatggagtggacacagatcatcacgaaatacctgtgggaacagctccagaaaatggctgagtattaccgcccagggccagccggcagtgggggctgcgggtctactattgggcccctcccccacgatgtggaagtggctattcggcagtgggattataccgaaaaactggcaatgttcatgttccaagacggcatgctcgatcgtcatgaattcttgacctgggtccttgagtgttttgaaaagatcagacctggggaggatgaattattaaaacttctgctgccactgcttctgagatactccggtgagtttgtgcagtcagcctacctgtcgcggcggcttgcatacttttgtacccgccggctggccttgcaacttgacggcgttagctctcactcttcccacgtcatcagcgctcaatcgacttctactctccccaccactccagcaccccagccccctactagctccacccctagcaccccctttagcgacctgttaatgtgtcctcagcatcggcctctggtgtttggtttaagttgcatcctgcagactatcctcctttgctgccccagcgcgctggtctggcattacagcctaactgactcccgcatcaaaacgggtagtcctctggaccacctgccaattgctccatccaaccttcccatgcctgagggcaattcagcctttacacaacaagtgagagccaaattgagagaaatcgagcagcagatcaaagaaagggggcaggctgtggaggttcgatggagttttgacaaatgccaagaggccacagctgggttcactattggcagggtgctgcatactctggaagtgcttgattcccacagcttcgagagatccgacttctcgaactcgcttgactcactctgtaaccgcatctttggcctggggccgagtaaagacggtcacgagatttctagtgatgacgacgcggtggtgtctctcctgtgtgaatgggcagtgagctgtaagcgcagcggacgacaccgcgcaatggtggtggctaaactgctggagaaacgccaggcggaaattgaggccgagcgctgcggagaatctgaggccgcagatgaaaagggcagcattgcttcagggtctctgagcgctccttccgcccccatcttccaggacgtgctgttacagtttcttgacacccaggctcctatgctgacagatcctcggtccgaatccgagagagtggaatttttcaatctggtcctgctattctgtgagctcatcagacacgatgtatttagccacaatatgtatacctgcacactcatctctagaggggatctggccttcggagcccctggacctaggcctccgtctccctttgacgatcctgccgacgaccccgagcacaaagaagctgaaggtagcagctcaagcaagctggaggatcccggcctgtctgaaagcatggatattgatccatcctcctctgtgctgtttgaggacatggaaaagcctgacttctctctctttagccccactatgccttgtgagggcaagggaagcccaagcccagagaaacctgacgtcgagaaggaagtcaaacccccacctaaggagaaaattgagggcacacttggggtcctttatgatcagcctcggcacgtgcaatacgcaacccacttccctatcccccaggaggagagttgttcacacgagtgcaatcagaggctggtggtcctatttggggtggggaaacagagggacgacgcgaggcacgccataaagaaaatcaccaaggacatcttgaaagtactgaaccgtaagggaaccgcagagaccgatcagctagctcccattgtcccactgaaccccggggacctgacattcctgggaggtgaggacggacagaaaaggcgacgaaatcggcccgaggccttccctactgccgaagacatctttgccaaatttcagcacctgtctcactacgaccagcatcaggtaacagctcaggtttctcgcaatgtgctggagcaaattacttcgtttgctttgggcatgagttaccacctgcccttggtccagcacgtgcaatttatctttgacctgatggagtactctttatcaatatccggcctcatcgactttgcaatccagctactgaacgagctgagcgtagtggaggccgagcttctgttgaagagcagcgatctcgtcgggtcctacaccacctccctgtgtctctgcatagtcgcagtgctgaggcattatcatgcctgcctgattttaaatcaggaccaaatggcacaggtcttcgagggattgtgtggtgtggtcaaacatggcatgaaccgttcagacgggtctagtgccgagagatgtattctggcctatctgtatgacctgtataccagttgttcacacctcaagaacaaattcggcgagctgttttccgacttttgttctaaggttaagaatactatctactgtaacgtcgaacctagcgaatcaaacatgcggtgggcccctgaatttatgatcgacactttggaaaatcctgctgcgcacacgtttacatatacgggcctgggtaagtcactctccgagaatcccgcgaaccggtatagtttcgtgtgtaacgccctgatgcacgtgtgcgtaggccaccacgatccagacagggtaaacgatatcgcaattttatgcgccgagctgaccggctactgtaaaagtctcagcgcggagtggctgggcgtcctgaaagccctttgctgtagctcaaataatgggacgtgcggctttaacgatctcctttgtaatgtcgatgtgagtgacctctcatttcacgacagtctagctacatttgtggccattctgattgcaaggcaatgtctgcttttggaggatctcattcggtgtgcggccatcccttccctgttgaacgccgcctgctcagaacaggattccgagccaggggcgcgcctcacatgccggatcctgctgcacctatttaagacgcctcagctcaacccctgtcagtccgatgggaataaacccacagtggggatcaggagctcttgcgaccggcacttactggctgcgtctcagaacaggattgtcgacggagccgtgttcgctgttctgaaggcagtgttcgtgcttggggatgcagaattaaagggcagtggcttcaccgtgaccggagggaccgaggaactgccagaagaggagggtgggggggggtctggcggtaggcgccagggcggaaggaacatctcagttgaaacggcttctctggatgtctatgccaagtacgttttacgatccatttgtcagcaggagtgggtgggagagcggtgtctgaagagcctgtgcgaggattccaacgacctccaagaccctgtgctgagcagtgcccaggctcagcgtctcatgcagctcatctgttaccctcaccgcttgctagataacgaggacggtgaaaacccccagcggcagcgcatcaaacgcatacttcagaaccttgatcagtggactatgaggcaatctagcctggagttgcaactcatgatcaaacaaacccccaacaacgagatgaattccctgctggagaacatcgccaaagcgactatcgaggtctttcagcagtccgctgagaccgggtcgtcaagcggatcaacagcctccaacatgcctagttcctcaaaaactaaacctgtattgtcctcgctggaaagatccggggtctggctggttgctcctcttatcgctaagctgccgacatccgtgcagggccacgtcttgaaggcagcgggtgaagagctagagaaagggcagcatctcggctcatcgtctcgaaaggaacgggatcgtcagaaacagaagtctatgtctctgctgtcccaacagcccttcctctcactggtgctgacctgtctgaagggccaagacgaacagagggagggcctgttgacatccctttactcacaggtgcaccaaattgtcaataactggcgggacgaccagtacttagacgattgcaagcctaaacagcttatgcatgaagccctgaagctgcgcctgaacttagtgggcggtatgttcgacaccgtccagcgtagcacgcaacaaaccacagaatgggccatgctcctgttggagattattatctccggtacggtcgatatgcaatcgaataatgagctatttactaccgttcttgatatgctaagcgttttaattaatggaaccctggccgccgacatgagctccatttctcaggggtctatggaagaaaacaaaagagcgtacatgaacctggctaagaagttgcagaaagagctgggtgagcgacaatctgatagtctagaaaaggtgagacagctgctacctctgccaaagcagactagggacgtaatcacttgtgagccgcaaggttcactcatcgataccaagggaaacaagattgccggtttcgacagtattttcaaaaaagagggcctccaggtgtcaacgaaacagaaaattagcccctgggacctctttgaaggtcttaagcctagcgcacctctctcttggggatggttcggtaccgtgcgtgtggaccgtcgggtggccagaggagaggagcaacagcgcctgctgctatatcacacccatcttagaccacgacccagagcttactacctggagcccctgccactccctcccgaggatgaagagcctcccgctccgaccctcttggagccagaaaaaaaggcgcctgagcctcctaaaactgacaagcccggcgctgctccaccaagcactgaagagcgcaagaagaaaagtaccaaaggcaaaaagagaagtcagccggccacaaagaccgaggattacggtatgggtccagggcgaagtggcccgtatggcgtcacagtgcctccagatctgctccaccacccgaatccaggctctatcacccatttgaactaccggcaaggttctatcgggttatatacacagaatcagcccttacccgccggaggacctagggtggacccttatagacctgtccgccttcctatgcagaagttgccaacaagacccacctaccccggtgtgctgcccaccaccatgaccggcgtaatgggactggaaccttcttcctataagaccagcgtctataggcaacagcagcctgcggtgcctcagggccagcgtcttcgccagcaactccaggccaaaattcaatcccagggaatgctagggcaaagtagcgtgcaccagatgacaccctctagctcatatgggctacagaccagccagggctacactccctacgtgtcacatgtgggcctccaacagcatacaggacccgccggtaccatggtgcctccctcatactctagccagccctaccagagtacacacccatctactaatcccacccttgtggatccaaccagacatctgcagcagcgccctagcggctacgtacatcagcaggctcccacgtatggtcacgggcttacgtctacacagaggtttagccaccaaaccctgcagcagacaccaatgataagcaccatgaccccgatgtctgcccagggggtccaggccggcgtcagatcaacggcaatcctgccggaacagcagcagcaacagcagcagcagcagcagcagcagcaacagcagcaacagcagcagcagcaacaacagcagcaacagtaccacattcggcaacagcagcaacaacaaatcctgcggcagcagcagcagcagcagcagcagcagcaacagcagcagcagcagcagcagcagcagcaacagcagcagcaacaacaacatcagcagcagcagcagcagcaggcggcaccgcctcaaccacaaccgcagtcacaacctcaattccagcggcaggggctccaacaaacccagcagcagcagcagactgctgcccttgtgcgccagttgcagcaacagctgtccaacacccaaccgcaaccatccaccaatatttttggcaggtactag

SEQ ID NO: 123598 - DNA, 6534 bp, synthetic construct
  misc_feature 1..6534: note = Description of Artificial Sequence: Synthetic coding sequence
  source 1..6534: mol_type = other DNA
atggccgcattcggcatactctcctatgaacaccggcccctcaaaaggcctagactcggcccacctgatgtgtatcctcaggatcccaaacaaaaagaagacgagttgaccgccctgaacgtgaagcaggggttcaacaaccagccggcggtctctggggatgaacatggatccgctaagaatgtgagctttaatccggcaaagatctcttctaatttcagctcaattatcgccgaaaaactgagatgtaacaccctgccagatacaggccgaagaaagccccaggttaaccagaaggacaatttctggcttgtaactgctcgctctcagagcgcaatcaacacgtggtttaccgacttggctggaacaaagcccctgacccagctggccaagaaagtccctatcttcagcaaaaaggaggaagtgttcgggtatctggccaagtatacagtgcccgtgatgcgggccgcttggcttattaagatgacctgcgcctactatgctgccatctctgagaccaaggtgaagaagagacacgtagacccttttatggagtggacccaaatcatcactaagtatctgtgggagcagctgcagaagatggctgaatattatcgaccgggtcctgctggcagcggaggctgtggctcaacgatcggacctctgccccacgacgtggaagtcgccattagacagtgggattatacagaaaagctcgccatgttcatgtttcaggatggaatgttagaccgacatgagttcttgacttgggtgctggaatgctttgagaagattaggcccggcgaagatgagctgctaaagttgcttctcccactccttctgcgctactccggagagtttgtgcagtctgcatacctgtctcgcagacttgcttacttctgcacacgaaggttagccctccagttagacggtgtctccagtcattcctcccatgttatctccgcacaaagcacgtcaactttacctacaaccccagctccgcagccaccaaccagctccactccttcaacgcctttctccgatttgctcatgtgcccgcagcacaggcccctggtgtttggtttgtcatgtatcctccagacaatccttctctgctgtcccagtgccctggtgtggcactacagcctgaccgactcccgcatcaagaccggatcccctctcgatcacttgccaattgcaccctccaatttgccgatgccagaggggaacagcgctttcacacagcaggtgagagccaagctgcgcgagatagagcaacagattaaggaacgtggacaggccgtggaggtgcgatggagttttgacaaatgccaggaagcaaccgctgggttcactatagggcgtgtccttcacactttggaggtgctggactctcactctttcgaacgaagtgacttcagtaacagcttggattcactgtgcaataggatttttggactgggcccttctaaagatggccatgagatctccagcgacgacgatgcggtcgtgtcgctgctgtgtgaatgggctgttagttgtaagcgaagcggaaggcaccgcgcaatggtggtggcaaaactccttgaaaagaggcaggcagaaatcgaagccgaaagatgtggagaatctgaggccgcggacgagaagggaagcattgccagcggaagcctctctgccccctctgccccaatattccaggatgtcctgttgcagttcctcgacacccaggcaccaatgctgaccgaccctcgctcagagagcgagcgtgtggagttttttaatttagtgctgctgttctgcgagctgattcgccatgatgtgttttctcataacatgtacacatgtacattaatctcacggggcgatcttgcattcggggcacccggtcccaggcctccctctccatttgacgatcccgcggatgatccagaacataaggaagctgagggtagctcctcgtctaagctagaggaccccggcttgagcgagtccatggatatagatccttcctccagcgtgctgttcgaggatatggaaaaacctgacttttcccttttctcccccacaatgccttgtgagggcaaaggctcaccatctccggaaaaaccggacgtggaaaaggaagtgaaaccccctccgaaagagaaaatcgaaggaactctcggggtactgtacgaccaacctcgccatgttcagtacgcaacccattttcccatccctcaagaagagagttgcagtcacgagtgtaatcaaaggttagttgtccttttcggagtgggaaaacagagagatgacgccagacatgctattaagaaaattaccaaggatatcctgaaagtgctgaatcggaaggggactgctgagaccgaccagcttgcgcctattgttcccctgaatcctggtgacttgacttttttaggaggtgaggacggccagaaaagaaggcggaatcggccagaagcttttccgaccgctgaggacatttttgcgaagtttcagcacttaagccattacgatcagcaccaggtgaccgcgcaggtatctaggaacgtactggagcagatcacctccttcgcgctgggaatgtcataccatcttcccctagtccagcatgtgcaattcatctttgatctgatggaatattcacttagtataagtggactaatcgacttcgccatccagttgttgaacgagctgtcagtagtggaggccgagttgctgcttaaatctagtgatttagtcgggagctacaccacttccctgtgcctgtgcatcgtcgctgtgctaagacactaccacgcgtgtctgatcctgaaccaagatcaaatggctcaggtcttcgaaggcctgtgtggcgtagtgaaacatgggatgaaccgctcagatggctcctccgctgagcgctgtattctggcctatctgtatgatttgtatacctcttgtagccacctgaagaacaaattcggcgagttatttagcgatttttgtagtaaagtaaagaacaccatttactgcaacgtcgagcccagtgagtctaacatgcgatgggctcctgagttcatgattgacactctggagaatcccgcagcgcacactttcacctacactgggctgggcaagtccttatccgagaaccctgcgaacagatactctttcgtttgtaatgcactgatgcatgtgtgtgttggccatcatgatccggacagggtcaatgatattgctattttatgtgcagaattaacgggatattgcaaaagcctctcagcagagtggctcggcgtgttgaaagctctgtgttgctctagcaataacgggacttgcggattcaatgatcttctctgcaacgtcgacgtgagcgaccttagtttccatgattctctagccacattcgtggcaatcttaatcgctcgccagtgtctcttacttgaggatctgatcagatgtgcagcaatcccttcattactcaatgccgcgtgtagtgaacaggactccgagcccggcgcgagactcacttgcagaatcctattacatctgttcaagactccacagcttaacccttgtcagagcgatggcaacaagcctacagtggggatccggagtagctgcgatcgccatctgctggccgcttctcaaaacaggatcgtggatggtgccgtgttcgccgtcctaaaagcagtcttcgtgttgggcgatgcggagctgaagggatctggtttcacggtgactggagggaccgaggagctcccagaggaagagggtggcgggggcagcggaggacgtcgccaggggggacgcaatatatcggtagaaaccgctagcctggatgtctatgctaaatatgtgctgcgctctatttgccagcaggagtgggtcggcgaaaggtgtctgaagagcctgtgtgaggatagtaacgatctccaggatccagtcctgagctctgcccaggcccagagactgatgcagctgatatgttacccacatcggctgctcgacaacgaggatggagaaaatccccaaagacaaaggattaaaaggattctacagaacctggatcagtggactatgcgccagtcttctctcgagttacagttaatgatcaagcagacccccaacaacgaaatgaactcacttcttgaaaacattgctaaagccaccatcgaggtgttccaacaatctgcagagacagggtcaagcagtggatcaactgcctcaaacatgccctcatcatcaaagacaaaacctgtactcagtagtttggaaagatctggggtgtggctcgtggctcctttgattgccaaactgcccacatccgtacagggccacgtgctgaaggccgccggcgaggagctcgagaaggggcaacatttgggctcatcttcgaggaaggagcgggacagacagaaacagaaaagtatgtccttactcagccaacagcctttccttagcctggtattaacttgcctaaaaggccaggatgaacagcgcgagggactgctgactagcctttactcccaggtccaccagatcgtaaacaattggcgggacgatcagtatctggatgattgcaagcctaaacagctgatgcacgaagccttgaagctgaggctgaacttagtcgggggtatgttcgacacagtccagagaagtacacagcagacgaccgagtgggccatgctgctgctcgagatcattataagcgggacagtggatatgcagtctaacaatgaactgtttactaccgtcctggacatgctcagtgtgctgatcaatggtacactcgccgccgacatgtcatctatctctcaggggtcgatggaagaaaataaaagggcatatatgaacctggccaaaaaattacagaaggagctgggggaaaggcagtcggactccctcgaaaaggtgcggcagctattaccgctgcctaagcaaacgagagatgtgattacctgcgagccacagggttctctgattgacacaaagggcaacaagatcgcggggtttgacagcatttttaaaaaggaagggcttcaggtgtccacgaagcagaagatttcaccctgggatctgtttgaaggcttaaagccgagcgctccactgtcttggggttggttcggcactgttcgggtggaccgcagagtggctaggggcgaagaacagcaaaggctgttgctataccatactcacctgcgacctcggcccagagcgtactatttagaaccattacctctgcccccggaggacgaggagccaccagctcctaccctgctagaacctgagaagaaggctccggagcctccaaagactgataagccaggcgcagccccaccgtctacagaagaacgcaaaaagaaaagtaccaaaggaaaaaaaaggagccaaccagccacaaaaaccgaggactatgggatgggccccgggagatccgggccctacggcgttactgtccctcctgacttgctccaccacccaaatcccggctctattacacatctgaactaccgacaagggagcattggcctgtacacccagaaccagcctctgcccgccggtgggccccgagtggatccctatagacccgtcaggctgcccatgcagaaactgcctactcggcccacataccccggagtgttgccaaccacgatgaccggggttatgggcctggagccgagttcctataaaacttctgtgtatcgccaacaacagcccgctgtgccccaggggcagagactcaggcaacagctccaacagtcccagggcatgcttgggcaaagctctgtgcatcagatgacaccctcatcatcctatgggctccagacatcccaaggttacacgccttacgtcagccacgtgggacttcagcagcacacagggcctgctggtaccatggttcctccctcatactcatcacagccgtatcagagtacacatcctagcactaatccaactctggtggaccctacccgccatctccagcaacggcctagtggctacgtccaccaacaggcacctacttatggacatggactgacgtccacacaaagattctctcaccagaccctgcagcagactcctatgatcagtaccatgactcccatgtcagcacagggcgttcaagcgggggtgagatccaccgccatcctgcccgagcagcagcagcaacagcagcaacaacagcagcagcagcagcaacagcaacagcaacaacagcagcagcaacagcagcagtaccatatacgtcagcagcaacagcaacaaattttgagacagcagcagcagcaacagcagcagcagcagcaacagcagcagcagcagcagcagcagcagcagcagcagcagcaacaacatcagcagcagcaacagcaacaagccgcccccccccagccacagccacagtcacaaccgcagtttcagcgtcagggtctgcaacagactcagcaacagcagcagacagccgcactggtgcgtcagttacagcaacaactatccaatacccaaccccaaccatcaaccaacatattcggtagatattag

SEQ ID NO: 123599 - DNA, 6531 bp, synthetic construct
  misc_feature 1..6531: note = Description of Artificial Sequence: Synthetic coding sequence
  source 1..6531: mol_type = other DNA
atggccgcgtttggaattttgagttatgaacacagacctctgaaaaggccaaggttgggccctccagatgtgtacccccaagatcccaagcagaaagaggatgaacttaccgcactgaatgtgaagcagggattcaataaccagcccgcagtaagcggggatgagcacggcagcgcaaaaaacgtttctttcaacccagccaaaatctcctctaacttttcctctatcatcgctgaaaagctccgctgtaacactttaccagataccgggcgtagaaagccacaggtaaaccaaaaggacaatttctggcttgttaccgctcgctcacagagtgccataaacacctggtttacagatctggcgggcaccaagccgttaacccagctggctaaaaaggttcccatcttttcaaaaaaggaagaagtctttggctaccttgcaaagtacacagttcctgtgatgcgtgccgcatggctaataaaaatgacctgtgcctactatgccgccattagcgagacaaaggtgaaaaaaagacatgttgaccccttcatggaatggacccagattatcacaaaatacctttgggagcagctgcagaaaatggcggagtattacagaccaggcccagcgggcagcggggggtgtgggagcacaattggcccattgccccatgacgtggaagttgccatacgacaatgggactataccgagaagctcgccatgtttatgttccaggatggtatgctcgaccggcacgaattcttgacttgggttctcgaatgcttcgaaaagattcgtcctggagaggacgagttgttaaagttgctcctccctcttctccttcgatattccggggaatttgtgcagtcagcttacctttcgcgaagattggcctacttttgcaccagaaggttggcactgcagctggacggggtcagctcacacagtagccacgtcataagcgcccagtcaacgtcaactctgcccaccacccccgccccgcaaccccctacctctagcacaccatctacccccttctctgacctgctgatgtgtccccagcatcggcctcttgtcttcggtctgtcttgcattcttcagaccattctcttgtgttgtccttcagctttagtctggcattacagcctcactgactcacggatcaagacaggctccccactggaccatctgcctattgcgccctccaacttgccaatgcccgagggcaacagtgcgtttactcagcaggtgagagcaaaattgcgggagatcgaacagcagattaaggagaggggccaggctgttgaggtgagatggagtttcgataagtgccaggaagcaacagccggtttcactattggacgcgtgttgcacacactcgaggtgctagacagccattcgtttgaaagatccgattttagcaatagcctggacagcctgtgcaatcggatattcggcttgggcccaagtaaggatggccatgaaattagcagtgatgatgatgcagttgtgtcactcttatgcgaatgggcagttagttgcaaaagatctgggcgccatcgagccatggtagtggccaagcttctcgaaaaaagacaggccgaaattgaggctgaaaggtgcggcgagagtgaggcagcagatgaaaaggggagcatcgccagcgggagcttatcagctccttccgccccaatttttcaggacgttctgctccagtttcttgatacccaggcccctatgctgaccgatcctaggtccgagtctgagcgcgtagaatttttcaacctcgtgttactgttttgcgaactgatacggcacgatgtattctcccacaatatgtatacatgcactctgatctcacggggcgacttggccttcggcgcacctggaccaaggcccccctccccttttgatgacccggcagacgaccccgaacacaaagaggcagaaggaagttccagcagcaagctggaggatccaggcttgagtgagtctatggacatagacccatcctcgtctgtgcttttcgaggacatggaaaaacctgacttttcattgttctctcccactatgccatgtgaaggcaagggtagtccttctcccgagaagcctgatgtggaaaaagaggttaaaccccctccaaaggagaagattgaaggtacccttggagtcctttacgatcagccacgccacgtgcagtatgctactcatttccctattccacaggaggaaagttgcagccatgagtgtaaccaacggcttgtcgtcctttttggcgtcggcaaacagcgagatgacgcacggcacgctatcaagaaaataacaaaggacattctgaaggttctaaataggaagggtactgccgagacagatcaactggccccaatagttccattgaatcccggagacctgacatttttgggaggcgaagacggccagaaacggcgtcgtaatagacctgaagcgtttcccaccgccgaggacatcttcgccaaattccagcacctgtcacattatgaccagcatcaagtgactgcccaggtctcccggaatgtgctagagcagatcacctcattcgctctgggcatgtcctaccatctaccgcttgtacagcacgtacagtttatatttgatctcatggaatactccctgagcatttcaggattgatcgattttgcaattcagctgttgaacgagctatcagtggtcgaggctgagctgttgcttaaatcttctgatctcgtggggtcctataccacgtcactgtgtctgtgcatcgtcgccgtactgcgtcactaccatgcctgcctgatcctgaaccaggatcagatggctcaggtgtttgaagggctgtgcggcgtcgtgaaacatgggatgaaccgctctgacggctcctcagctgagcgttgcatcctggcctacttatacgatctgtacacctcttgcagccatttaaaaaataagttcggggaactcttctctgatttttgttccaaggtgaaaaacaccatctattgcaatgttgagccttcggagtccaatatgagatgggcccctgaattcatgatagataccctggagaatccagccgcgcacacttttacctacaccggcctaggcaaaagcctcagtgagaatccagcaaaccggtatagcttcgtgtgcaacgccctcatgcacgtgtgcgtgggtcatcatgaccccgatcgggtgaatgacattgcaatactttgtgctgaactgactggctactgcaaatcgttgtctgccgaatggctgggggtcttgaaggccctttgctgttcatctaataatgggacatgcgggtttaatgatcttctgtgtaatgtagacgtgtccgacctgtcttttcacgattccctggctaccttcgtggcgatattgattgccagacaatgcctgctgttggaagacttaatccgctgcgccgccatcccttccctgctcaacgcagcctgttctgagcaggattcagagcctggtgcccggctgacctgtcggatcttgctgcacctgtttaaaactccacagcttaacccatgccaaagtgacggcaacaagccgacagtgggaatccgttcatcctgtgatagacacttactggccgcaagccagaatcgaatagtggacggggctgtctttgctgtactaaaggctgtttttgtcctgggcgacgccgaactgaagggcagcggattcacagtcacaggcggcactgaagagttaccagaggaggagggaggcgggggttccggtggacgacgccaaggcgggcggaacattagcgttgaaacagcctccctagatgtttacgcaaaatacgtgctgaggagtatttgtcaacaagagtgggttggggaaagatgcttgaagagtttatgcgaagacagtaatgacctccaagacccagtcctctcaagcgctcaggcccaacgcctgatgcagcttatttgctacccacatcgtctcttggataatgaggacggtgagaacccgcagcggcaaaggatcaaacgtattctccagaaccttgaccagtggacaatgcgacagtcatccctggagttgcagctcatgattaagcagaccccaaacaacgagatgaattcattgctggaaaacattgcgaaggccactattgaagttttccagcagagcgctgagaccgggtctagctccggctccactgctagcaacatgccatcttctagcaagacgaaacccgtgctcagctcactggaacgctccggagtatggcttgtggcccctttgattgccaaacttccaactagcgttcagggccatgtgctgaaggcggcgggcgaggaactcgagaaaggccaacacctcggcagcagctcccgtaaggaaagggacaggcaaaaacaaaagtctatgtctttgttgtctcaacagcccttcctgagtctggttctgacatgcctgaagggtcaggatgaacaaagagagggactgttaacatctttatactcccaggtccaccagatcgtgaataattggagggacgaccagtatttggatgactgtaagcccaagcagttaatgcacgaggcccttaagcttcgccttaatctggttggtggcatgttcgacacagtccagagaagcacccagcaaacaacagaatgggctatgctcctcttggagatcattattagcgggaccgtcgacatgcaaagcaacaatgagctgtttaccaccgtgctagacatgctgagtgtgctaattaacggaactctggccgcggacatgtcttctatttcccagggaagtatggaggagaataagcgcgcctatatgaacctggctaaaaagctgcagaaagaactgggcgagcgccaatccgatagcctggaaaaagtgcggcagcttcttccgcttcccaaacaaacaagagacgtgatcacatgtgagccccaggggagtcttatcgacaccaaggggaacaaaatcgcgggtttcgactccattttcaaaaaggaaggcctgcaggtgagcacaaagcagaaaatatctccctgggacttgtttgagggcctgaaaccgagcgctccgctgagttgggggtggtttggtaccgtccgggtggaccggcgagtagctaggggtgaggaacagcagcgacttctcctctaccacacacatttgagaccccggccccgagcctattacctcgaacctctgccactgcctcccgaagacgaggagcctcctgccccaaccctcctggaaccagagaaaaaagctccagaaccgcccaaaacagataagccaggcgccgcccctcctagtactgaagaacggaagaagaaaagcaccaaaggcaagaaaaggtcacaacccgcaaccaaaacagaggactacggtatgggccctggcagatccggcccctacggagtgacagtcccccccgatctgctgcatcatcccaatcccggatccattacccacctgaactataggcagggcagtatcggcctgtatacccagaaccaaccactccctgcaggaggacctcgggtggacccttatcgaccagtgcggctgcccatgcagaaactgccaacccgaccaacttatcccggggtgctgccaaccactatgaccggggtgatgggactagagccatcttcctataaaactagcgtgtatagacagcagcagcccgctgtgcctcagggccagcgccttcgacagcagctgcaatcacaaggaatgctcggccagagttctgtgcaccagatgacccccagtagttcctacggcctgcagacttcccaagggtataccccttatgtgagccatgtcggtctgcaacaacacactgggccggccggaaccatggtccccccgtcgtactcttctcagccataccagagcacacacccttctaccaatcctactttggtggatccaaccagacacctccagcagcggccctcaggctacgtgcatcaacaggcccctacttacgggcatggcctgacctcaacccaacgcttcagccatcagaccctccagcaaacaccgatgatctcaacgatgacacctatgtccgcacaaggggtgcaggccggtgttcgaagcaccgccatcctgcctgagcagcaacagcagcagcagcagcagcagcaacagcagcagcaacagcagcagcagcaacagcagcaacagcaacagcagtaccatattcgccaacagcagcagcaacagatcttaagacagcagcaacagcagcagcagcagcagcagcagcagcaacagcagcagcagcagcagcagcagcagcagcagcaacaacaccagcagcagcagcagcaacaagctgcaccccctcagccccagcctcagtcacaaccccagttccagcgacaaggactgcaacagacacaacagcagcagcagacggccgctctggtaagacaactgcaacagcagctgagtaatactcagccacagccttctacaaacatattcggaaggtattag

SEQ ID NO: 123600 - DNA, 393 bp, synthetic construct
  misc_feature 1..393: note = Description of Artificial Sequence: Synthetic coding sequence
  source 1..393: mol_type = other DNA
tgaacacccaatcggcgcagaaagaagcagctcaatgccgctttccttccacaggatgaactgacagctctgaacgtgaagcagggcttcaacaaccagcccgcagtcagtggtgatgaacacgggtctgctaaaaatgtaagctttaaccctgccaagatttcctcaaacttctcatcgatcattgcagagaaactgagatgcaataccttgccagacaccggcaggcggaaaccacaggtaaatcagaaagacaatttctggttagtgactgcaagaagccagagcgctataaacacctggtttacagatctcgcgggcacaaagccccttactcaactggcgaagaaggtgcccatcttttctaaaaaggaagaggtgtttggctattag

SEQ ID NO: 123601 - DNA, 6384 bp, synthetic construct
  misc_feature 1..6384: note = Description of Artificial Sequence: Synthetic coding sequence
  source 1..6384: mol_type = other DNA
gaggacgaactcacagccctaaacgtcaaacagggattcaataaccagccggcggtgtctggagatgaacacggttccgctaagaatgtcagttttaacccagccaagatcagctccaattttagtagcatcatagccgagaaactgcgttgcaataccctaccagacacaggacgccgtaagccacaggtgaatcaaaaggacaacttctggctggtgacagcacgatctcagagcgccatcaacacctggttcaccgacttagcaggcactaagccactcacacagctggcaaagaaagtgcctatcttctccaagaaagaggaggtctttggatatctagccaaatacacagtgcctgtgatgagagctgcatggttaatcaaaatgacttgtgcgtactatgcggcgatatccgaaacaaaggtgaaaaaacgccatgtcgatccgtttatggaatggactcagatcatcacgaagtatctgtgggagcagttgcagaagatggccgagtattacaggccagggcctgccggttcaggcggctgtggaagcactatcgggcccctgccccacgatgttgaggtggccatccggcagtgggattataccgaaaaattagccatgtttatgtttcaggacggcatgcttgacaggcacgagttcctaacctgggtactggagtgctttgagaagattagacccggcgaggatgagctgctgaagcttctgttgccgctgctgctccggtactcaggggaatttgtgcaaagtgcctacttatctcgcagactagcttacttttgcactcgccggcttgctcttcagctagacggtgtttcttctcactcgtctcacgttatctcggctcagagcacttcaacccttcctaccactcctgccccacagccccccacctccagtacgcctagcacccctttctccgatctcctcatgtgtccccagcacaggcctttggtgttcggcctgtcctgtattctgcagaccatattactgtgttgcccctcagcgttagtctggcactactccctgactgacagccgaatcaagactggctcacctttggatcatttgccaatcgccccaagcaacctacccatgccagaggggaatagcgcattcactcagcaggtcagggccaaattgcgagaaatcgaacagcagattaaagaaaggggccaggcagtggaagttaggtggagttttgataagtgtcaggaggcaacggccgggttcacgattgggcgggttctgcacacactggaggtgctggattctcatagtttcgaacgaagcgatttctccaacagtttggactccctctgcaatcgaatatttgggctcggtcccagtaaagacggccacgaaatctcatcagatgacgatgcagtcgttagcctcctctgcgaatgggcagttagctgcaaacgatccggccgccaccgagctatggttgtggcgaaattgctcgagaagaggcaggctgaaatcgaggcagagcgctgcggtgaatccgaagccgcagatgagaagggttcaattgcttcaggaagcctgagcgccccatcagccccaatatttcaggatgtgttgctccagttcctcgatactcaagctcctatgctcacggatcctcgctcagaatcagagagggtggagttttttaacctggtgctcctgttctgtgaacttattcgtcacgacgttttttcacataatatgtacacctgcactctaatttctcggggggaccttgcctttggcgcaccgggaccccggccaccctccccatttgatgatcctgcggatgatcctgagcataaggaggccgagggatcctcctccagcaagttggaggatccaggtctgagcgagtctatggacatcgatccgtcttcctctgttttgttcgaagacatggagaagccagacttttctctcttctcacccacgatgccttgcgagggcaaaggatcgccttcacccgagaagccagatgtggaaaaagaggtgaagccccccccaaaggaaaagatcgaagggaccctaggcgtgctatacgatcagccaaggcatgtgcagtacgccacacacttccccatcccacaagaggaatcttgctctcacgaatgcaaccaacggctagtcgtgctgtttggtgtggggaagcagagggacgatgcacgacacgcgatcaaaaaaataacaaaggatattctgaaggtgttgaatcggaaaggcacagccgagaccgaccagctcgcccccattgtgcccctcaaccctggagacctcactttcctgggtggcgaagacggtcagaagaggaggagaaataggcctgaagcgttcccaacagccgaagatatattcgccaagttccagcatctgtcgcactacgatcagcaccaagtcactgctcaggtctcacggaacgtactggagcagataacaagcttcgccctggggatgagttatcacctgcccttagtacagcatgtgcaatttatcttcgatctcatggagtatagcctgtcaatctctggccttatcgatttcgccatccaactactgaatgagttgtcagtggtcgaagccgagctcctcctcaagagttccgacctggtgggcagttatacgactagcttgtgcttgtgcatcgtggcggtcttaagacattatcacgcctgcctcattctgaaccaagatcaaatggcacaggtctttgagggtctatgtggagtggtgaagcatggaatgaatagatccgacgggtccagcgcagagagatgcattctggcttacttgtacgacctgtacacttcctgctcccatctaaaaaacaaatttggggaactgttctccgacttctgctccaaggtgaaaaacacaatctattgcaacgtggaaccaagcgagtctaatatgcggtgggcccccgaattcatgatagataccttggagaatccagccgcacatactttcacctacacaggattggggaaaagcttatccgagaatcctgccaacaggtactcattcgtatgcaatgccctgatgcacgtgtgcgtcggccaccacgacccggatcgggttaatgacatagcaatcctgtgcgctgagctcaccggttattgtaagagcctatccgccgaatggttaggggttcttaaggctttatgttgcagttctaacaatggaacctgtggcttcaatgacctgctctgtaatgtggatgtgtcggacctgtctttccacgactcactggcaactttcgtggccattctgatcgctagacagtgcctccttctggaggatcttatccgttgcgcggcaattccatccttgctcaacgccgcttgtagtgagcaggactctgaacccggtgcccggcttacgtgtagaattctgctccacttattcaaaaccccccagctaaacccctgtcaatccgatgggaataagcctaccgttgggattagaagcagctgtgacagacacctgcttgccgcgtcacagaatcgtattgtcgatggagcagtgtttgccgtcctcaaggcggtgttcgttctaggcgacgcagagctcaaaggatccgggtttactgtaaccgggggaaccgaagagttgcccgaagaagagggggggggcgggagcggaggccggcggcaggggggccgcaatatttccgtggaaacagccagcctggacgtgtatgccaagtacgtcctgaggagtatatgccagcaggaatgggtgggcgaacggtgcctgaagtcgctgtgtgaggattctaacgatcttcaagaccctgttctgagcagtgctcaggcccaaagattgatgcagttgatctgctacccccatagactactcgacaacgaggacggggaaaatcctcagaggcagaggattaaacggatcttgcagaatttggaccaatggactatgcgccagtcctcattagaacttcagctgatgatcaaacaaacacccaacaatgaaatgaacagcctcctcgagaacatagcaaaggccaccatcgaggtattccaacaaagcgccgaaacaggctcttcaagcggcagcaccgcgtcaaatatgccttcaagtagcaagacaaaacccgtcttgagttcccttgaacggtcgggcgtgtggctggtggcacctctcatcgctaaattaccaacatcagtgcagggccatgtgctcaaggcggccggggaagaactggagaaggggcaacacctcggctcatccagccggaaagagagggaccgccagaaacagaaaagtatgagcctgttgtcacagcagccgtttctctcactggttctaacatgcctgaaggggcaagatgagcaacgcgagggcttattaacaagcctatacagtcaggtacatcagatagtaaacaactggcgggatgatcaatatcttgatgattgtaaacccaagcagttaatgcatgaggctctgaaactccgccttaatcttgtaggaggtatgtttgacacagtccagagatccactcagcagactacagaatgggctatgctgttgctcgagatcatcatctcggggaccgttgacatgcagtcaaataatgagctgtttaccacagtgcttgatatgttatctgtgctgattaacggaacgctcgccgctgatatgtcctcaataagccagggatccatggaggagaataagcgtgcctacatgaatttggcaaagaaactgcagaaagagctgggtgagagacagtccgatagtcttgaaaaggtgcgtcagctgctgccactgcccaaacagactcgggatgtaattacatgcgagccacagggatctctcattgataccaaggggaataagatcgctggtttcgactcaatcttcaagaaagaagggctgcaagtgagtaccaagcagaaaatctcaccttgggatctcttcgaaggcctgaaaccttctgcccctctgagctgggggtggtttgggacagtcagagtggacaggagggttgcgcgtggggaggagcagcagaggctcctgctctaccatacacacctccgcccaagacccagggcttattacttagaaccgctccccctgcctcctgaagacgaggagccaccggctccaacactcctggagcctgagaaaaaggcccccgaacctcctaaaacagacaagcccggtgccgccccgccatctactgaagaacggaagaaaaaaagtactaaaggaaagaagagaagtcagcctgcaactaagacagaggattatgggatggggccaggccgcagcggtccctacggcgtaaccgtaccccccgatttgctacatcatcctaatcccgggtctattacgcatcttaattaccgtcagggctctatcggtctgtacacacagaatcaacccctgcctgccggaggccctagggtggatccctatagaccggtgcggctacctatgcaaaagttgcctacccgtcccacatatcctggggttctcccaacgacgatgacaggggtcatgggcctggagccctcctcatacaaaactagcgtgtaccggcagcaacagccggcggtgccccaaggccagaggctgcgccagcagctgcagcagagccagggtatgctcggacagtctagtgtgcaccagatgacaccaagtagtagctatggactgcagacgagccagctctcacctagctctcttcagggctacaccccctatgtctcccatgtcgggctacaacagcatactggccccgctgacccaacgagacacttgcagcagaggccatctgggtacgtgcaccagcaagcccctacctatggccacggactgacctcaacgcagcgcttctcgcatcaaaccctgcagcagacccccatgattagtacaatgacacctatgtcggcacagggcgtgcaggcaggcgtcaggtctaccgctattctgcccgagcaacagcagcagcagcagcagcagcagcagcaacagcaacagcagcaacagcagcagcagcagcaacaacaacagcagtaccacatcaggcagcaacaacagcagcaaattttgcgccagcagcagcagcagcagcagcagcagcagcaacagcagcagcagcagcagcagcagcagcagcagcagcagcagcagcaccaacagcagcagcagcagcaggcagcacccccccagccacaacctcagtcccaacctcagttccagcggcagggcctgcagcaaacccagcagcagcagcaaactgctgcgcttgttaggcagttgcagcaacaactgtcaaatacgcagccacaaccctccaccaacatatttggcaggtactag

SEQ ID NO: 123602 - DNA, 2778 bp, synthetic construct
  misc_feature 1..2778: note = Description of Artificial Sequence: Synthetic coding sequence
  source 1..2778: mol_type = other DNA
ggaggtagcggtggccgaaggcagggcggaaggaacatctcggtcgaaaccgcaagtttagatgtgtacgccaagtacgttttgagaagcatttgccagcaggaatgggttggggagagatgcctaaaatcactctgtgaagattctaacgacctgcaggatccagtgctcagctccgcacaagcacagcgtcttatgcagctaatctgttatccacaccggctgctcgacaatgaggatggcgagaatcctcagcggcagaggatcaaaagaattctgcagaatctggatcagtggaccatgaggcagtcatcattagaactgcaacttatgatcaagcagacgcccaataatgaaatgaacagcttgctggagaacatcgctaaagccacaatcgaagttttccagcagagcgcagagacgggatccagttctggatcaaccgccagtaacatgccttcaagctccaaaacaaaacccgtattgtcctctttagaacgaagtggagtgtggctggttgcccccctaatcgccaaattgccaaccagcgttcagggccatgtgctcaaagctgccggcgaagagcttgaaaagggccagcatctgggatcctcatctaggaaagagagggatagacagaagcaaaaaagtatgagcctgctcagccagcagccattcctgagtctcgtgctgacctgtctcaagggtcaagatgagcaacgggagggcctgctgacatctctatactctcaggtgcaccagatcgttaataattggagagatgaccagtacctcgacgattgcaagcctaaacagctcatgcacgaggccctcaaattacggctcaatctcgtcggtggaatgtttgatacagtgcagaggtccacccagcaaacaactgaatgggccatgctgcttctagagattattatctcgggaactgtggacatgcagtccaacaacgaattatttacaacggtgctcgacatgctcagtgtcctaattaatggaactctcgcagctgacatgagcagcatatcccagggttcgatggaggaaaataaacgggcttatatgaatttggccaagaaactgcagaaggagctcggtgaaagacagtcagattctctcgaaaaagtgagacagctgctgcccctgcccaagcaaactagagacgttataacgtgtgagccccaagggtccttgatcgacacaaaaggcaacaaaattgctggattcgattccatcttcaaaaaagagggcttgcaggtgtcaacaaagcagaagattagcccgtgggatttgttcgaaggcttgaagccctcggccccactgtcgtgggggtggtttgggaccgtaagggtggacagacgggtcgcgagaggcgaagagcagcagcgacttctgttgtaccatacgcacctcagaccccggccccgggcatactatctcgaaccccttcctctaccacctgaggacgaggaaccacccgccccgactctcctcgaacccgagaagaaggctccagagcctccgaagacagataagcccggcgccgcaccccctagcactgaggagaggaagaaaaaatccacaaaaggcaagaaaaggtctcaacctgcgactaaaaccgaggactatgggatggggccaggcaggagtgggccctatggggttacagtgccgccggacctcctacatcaccccaatcccgggtcaatcacccacctgaactacagacaggggtccatcggattatatacccagaatcaaccactcccagcagggggccccagggtggatccttacagacccgttaggcttcctatgcagaagttacctactcgcccaacgtacccaggcgtgctgccaaccaccatgaccggagtaatggggctagagccttcttcctataagacgtctgtttaccggcaacagcaaccagcagttccccagggacagcggctccggcaacagctgcaggccaaaatccagagccaaggtatgctcggccagtcaagtgtgcaccagatgactccatcttcatcgtatgggctacagaccagccagggctataccccatacgtgtcccacgtcggacttcaacagcacacgggtccagccggtacaatggtaccgccttcttactcttctcagccatatcagagcacacaccctagtactaatcccacccttgttgatccaacaaggcatttgcagcagaggcctagcgggtatgtacatcaacaagccccgacctacgggcatgggctcacaagtacccagaggttctcccaccaaactctccagcagaccccaatgatcagcaccatgacacccatgtccgcccagggggtacaggccggggtacggtcaaccgctattctcccagaacagcagcagcagcagcaacaacagcagcaacagcagcaacaacagcagcagcaacagcagcagcagcagcaacagcaataccacataaggcagcagcaacagcagcagattctgcgacagcagcagcagcagcagcagcaacagcagcagcagcagcagcagcagcagcaacagcagcagcagcagcagcaacagcaccagcagcagcagcaacagcaggctgctcccccccagccacagcctcagtcacagccccagttccagcggcaggggctgcagcagacccagcagcagcagcagactgctgccttagtaagacagctacagcagcaactttctaatacccagccgcaaccatccactaatatcttcggaaggtattag

SEQ ID NO: 123603 - DNA, 756 bp, synthetic construct
  misc_feature 1..756: note = Description of Artificial Sequence: Synthetic coding sequence
  source 1..756: mol_type = other DNA
taggagaggaaaaagaaatctacgaagggcaaaaagagatcgcagcctgcaactaagacagaagactacggaatgggccctgggaggtccggcccctacggagtcactgtgccgccagatctgctgcatcaccctaatcctggctccattactcacctgaactaccggcagggcagtataggcttgtatacgcagaaccagcccctacccgctggcggcccaagagttgatccttaccggcctgtgaggttgcctatgcagaagttacccactcgaccgacttatcccggggtgctccccaccacgatgaccggagtgatgggcttggagcctagcagctacaagacatctgtttacaggcagcaacaacccgcagtcccacagggtcagaggctgcggcagcagctccagcaatcccagggtatgcttggccagagcagtgtgcaccagatgaccccgtcatcaagttatggattgcagaccagtcagggttatacgccctacgtatcacatgtgggattgcaacagcatacagggcctgccgatccgacgcgtcacttacagcaacgaccaagtggctatgttcaccagcaggcacccacttacggacatggtctgaccagtacacagcgtttttctcaccagactctccagcagacaccaatgatctcaaccatgacgcccatgtcagcgcagggcgtgcaggccggcgtacgtagtacagcaattctcccggaacagcaacagcagcaatag

SEQ ID NO: 123604 - DNA, 6003 bp, synthetic construct
  misc_feature 1..6003: note = Description of Artificial Sequence: Synthetic coding sequence
  source 1..6003: mol_type = other DNA
atggcggccttcgggatactgtcctacgagcatcggcctctgaaaaggccccgcttgggaccaccggatgtttacccccaggacccaaagcagaaggaagacgagctaaccgctctcaacgtcaagcagggatttaacaatcagccagcagtgagcggtgacgagcatggctcggccaaaaacgtttctttcaatcctgccaaaatatcatcaaacttcagcagtattatcgcagagaaacttagatgcaacacgcttccggataccggccggagaaagccgcaggtgaaccaaaaagacaacttttggttggtcacagcacgaagccagtctgccattaacacctggttcacggacctggcgggaactaagccacttacacagctggccaagaaagtacctatcttttctaagaaagaagaggtgtttggatatcttgctaagtacacagttcctgtgatgcgcgcagcttggttgatcaaaatgacgtgtgcctactacgccgctataagcgagacaaaggtgaagaagcgacatgttgatccctttatggagtggacccaaatcattacaaaatatttgtgggagcagcttcagaaaatggccgaatactatcgccccggcccagctggaagtggaggatgcggatctacgatcgggcctttgcctcatgacgtggaggtagctatacgtcagtgggattacacagaaaagcttgctatgtttatgttccaggatggcatgctcgacagacacgaatttcttacgtgggttttggaatgctttgaaaaaatccggccaggtgaggacgagctgcttaagctgctccttccactcctgctaaggtatagcggtgaattcgtgcagtcagcttacttaagcaggcggcttgcctatttttgtaccaggcggctggcgttgcagctggacggagttagcagccactcatctcacgtaatttccgctcaatcaacttctaccctgcctaccacccctgcaccccagccccctacatctagcacccccagcacccccttctctgatttgctaatgtgcccccagcatcgcccactcgtgtttggactgtcttgtattctgcaaacgatcctgctgtgttgtcccagcgcccttgtatggcactactcacttaccgactcccgaataaagaccggctcacccttggatcatctccccatcgctccctctaacctcccaatgccagagggaaattccgccttcactcagcaggtgagggcaaaactgcgcgagatagagcagcagataaaagagagggggcaggccgtagaagtccgatggagtttcgataaatgccaggaggcgactgccgggttcacaatcggtcgcgtgttgcacaccctggaggtgctcgacagtcactcattcgaacgaagtgacttctctaatagtcttgattccctgtgtaaccgaatatttgggttgggcccatcaaaggatggccacgagatcagctctgacgacgacgctgtggtttccttattatgcgagtgggcagtctcgtgtaaacgatccgggcgtcacagagcaatggtggtggcaaaacttctggaaaagagacaagctgagatcgaggccgagcgctgcggggaatccgaggctgccgatgaaaaaggtagtattgcctctggatcgctgagcgctcccagcgctcctatctttcaggacgtgctactccagtttctagacacgcaggcacccatgctgaccgacccacgcagtgaatcagaacgagtggagttcttcaatctcgtcctcctgttctgcgaactgattcgccacgacgtcttctcacacaatatgtatacttgtaccctgatttcaagaggcgatctggctttcggggccccggggccaagaccccctagcccattcgatgatccagccgacgatccggagcacaaggaggcggaagggtcaagcagtagcaaactggaggatcccggactgtcggaaagcatggatatcgacccatctagctcagtcttattcgaggacatggaaaagccggatttttcccttttctctccgacaatgccatgcgaaggcaaagggtcgccatctcccgagaagcctgacgtggagaaggaggtcaagcctccacccaaagaaaaaatcgagggtactttgggagtgttgtacgaccagccaagacatgtgcaatacgctacacacttccctattccacaggaagaatcttgtagccatgaatgtaatcaaaggctagtcgttctgtttggagtcggtaagcagcgagatgacgcacgacacgccattaagaagataaccaaagatattctcaaagtgctgaatcggaagggcacagctgagactgatcaattggctccaattgtcccgttgaacccaggcgatctgacctttctgggcggcgaggacgggcagaaacgacggcgaaacaggccagaagcattccccaccgctgaagacatttttgccaagttccagcatctaagccactatgatcaacaccaggtgactgcccaggtcagccgtaacgtgctggaacagatcacctccttcgcgctcgggatgagctaccacctgccattggtgcagcatgtccagtttatctttgacctcatggaatattcattgagcattagcgggctgattgatttcgccatccagctgctgaacgaacttagtgtggttgaggctgaacttcttctcaaatcctcagatctggttggcagttacaccactagtctgtgcctgtgtatcgtcgcggtgctgcgccactatcacgcatgtttaattttgaaccaagaccagatggcccaagtatttgagggcctgtgcggcgtcgtcaaacacgggatgaacaggagtgacggttcttctgctgaacggtgtatcctcgcgtacctgtacgatttgtatacctcatgtagccacctgaaaaataagttcggcgaactgttctccgatttttgtagtaaggtgaagaataccatctactgtaatgtggaaccgtctgaaagcaatatgaggtgggctccagagtttatgattgataccttagagaaccccgccgcccataccttcacctatacaggccttggcaagagtttgtctgagaatcctgccaaccgctattcattcgtctgcaatgcactgatgcacgtctgtgtgggtcatcatgatcccgacagagttaacgacatcgctattttatgtgcggagctgactgggtactgcaagagtctttctgccgaatggctgggtgttttgaaagccctgtgttgcagctccaacaacggcacctgcggctttaatgatctcctgtgtaacgtagacgtaagcgacctcagcttccacgactcgctggcaacttttgttgccattctcatagctagacagtgtcttctgcttgaggacctaatccgttgtgccgctataccctcattgctcaacgctgcctgcagcgagcaagatagcgagcctggagcccggcttacatgtagaatcctcttgcacctattcaagactccacagctgaatccctgccagtccgatggaaacaaaccaacagtgggaataagatcctcatgcgatcgccatttactcgccgctagccaaaacaggatagtggacggcgcagtgtttgccgtgttgaaggctgtgttcgtcctcggtgacgcagaactcaaaggctccgggttcaccgtgaccggaggaaccgaggaactaccagaggaggagggcggcggagggtctgggggccggaggcagggagggagaaatatctctgtcgagactgccagtcttgacgtgtacgcgaaatacgtcctgagaagcatctgccagcaggaatgggtcggagagcgctgcctcaagtccctgtgtgaagacagtaatgacctgcaagacccagtcctctctagcgcacaagcccaacgactcatgcagctgatctgctatccacatagactactcgataatgaagatggggagaatccccagcgacagcgcattaagcggatcctccagaatctggatcagtggactatgcgacaatcctctctggaattacagcttatgatcaagcaaaccccaaataacgagatgaattccctactggagaacatcgctaaggccacaatcgaggtgtttcaacagtcggctgagacgggatcgtcttctgggtcaaccgcatctaatatgcccagtagcagtaagacgaaaccggtgttatctagcctggagcgctctggagtctggctagtggcacccctcatagccaagctgcctacaagcgtgcagggacacgtgctgaaagccgcaggagaggagctcgagaaaggacagcatttgggctccagcagcaggaaagagcgcgatcggcaaaaacagaagtccatgtccttactctcacagcagcctttcctcagcctggtcctgacctgcctgaaagggcaggatgaacagcgcgagggactgttaacttcgctttatagccaagtacatcagatcgtaaacaattggagggatgatcaatacttggatgactgtaagccgaagcaactgatgcacgaggcgttaaagctgcggctgaatctcgttgggggcatgtttgatactgtacagcggtcaactcagcagacaaccgaatgggccatgctgctgctggagatcatcatttccgggaccgtagacatgcagtcaaacaatgagctgttcactacagtgctggacatgctaagcgtcctcatcaatggcactttagctgcagatatgagtagcatttcgcaaggctcaatggaggagaataagcgtgcatacatgaatctagcaaagaagctgcagaaggagctgggagagagacaatcggattcattagagaaggtccgccagctccttcctctgcctaagcagacacgggacgtgatcacgtgcgaacctcaaggtagccttattgatactaagggaaacaagatcgccggttttgactcgatctttaaaaaggagggactgcaggtgtccaccaagcagaaaatttcaccttgggacctatttgagggactgaagccatcggcccccctgagttggggatggttcggcaccgtacgtgtagacagaagggttgctcgcggagaggaacagcagaggctgctgctgtaccacactcacctgcgacctcgaccacgcgcttattacttggagcccctgccactgcctccagaagacgaagaaccacccgccccaaccctgctggagccagaaaagaaggctcccgagcctccaaaaactgataagcctggcgctgcacccccaagcactgaggaaagaaaaaaaaaaagcacgaaaggcaagaaaagaagtcagcccgctacaaagacagaggattacggtatgggtccagggagatccggaccatacggagttactgtcccccctgaccttctacaccatcccaaccctggcagcatcacacatcttaactaccggcagggatccatcggtttgtatacacagaaccagcctctgccagcagggggcccccgcgtcgatccttaccgtccagtcaggcttcccatgcagaagcttcccaccaggcctacctatcctggagtgctgcccacaacaatgacaggggttatgggactagagccaagctcttataagacttccgtctacagacagcaacaacctgctgtgccgcaagggcagaggctacgacaacagctgcagcagtcacagggaatgttgggacaatccagcgtgcatcagatgaccccctcttcatcatatggacttcagacttcacagggatatactccctacgtgagtcacgttggcctgcaacagcatacaggtccggcagatcccactcgacatctgcaacagagaccttccggctacgtgcaccagcaggccccaacctatggccacggcctgacgtctactcaatcttttcatacacgtcactgctcaaggcatccctag

SEQ ID NO: 123605 - DNA, 2271 bp, synthetic construct
  misc_feature 1..2271: note = Description of Artificial Sequence: Synthetic coding sequence
  source 1..2271: mol_type = other DNA
atggcggcctttggccttctcagttacgagcaacgacccctgaagagacctcgtctgggtcctcctgacgtgtacccgcaggacccaaagcagaaggaagacgagctcaccgctgtgaatgtcaaacaggggttcaataatcagcccgcttttactggagatgagcatggctccgcaagaaacatcgtgatcaacccatccaagatcggcgcatacttcagcagtatcttagctgagaaactaaagcttaacacgtttcaggacaccggaaaaaagaagccacaggtgaatgcaaaagacaactattggctggtgactgccagatcccagtctgctatccactcctggtttagcgacctcgccggcaataaaccactctcaatacttgcaaaaaaggtgccaatcctgtccaagaaggaggacgtctttgcctacctggcgaagtacagtgtgccaatggttcgtgcgacatggttaatcaaaatgacatgtgcatattatagcgccatcagtgaagctaagatcaagaagagacaggctcccgatcccaatttagaatggactcagatttctactcgctatctgcgtgagcaactggccaaaattagtgacttctaccatatggcctcgtcaaccggagacggccccgtccccgtgccccctgaggtcgagcaagctatgaagcaatgggagtacaatgagaaactcgcttttcacatgttccaggagggcatgttggaaaagcatgaataccttacttggatactcgacgtacttgagaagatccgacctatggacgatgaccttttaaagctgctgctccctctgatgttacagtattccgacgagttcgttcaatcagcttatctgtctcgtcggctggcttacttttgcgcccgaaggctgagcttgttactctcagatagtccaaacctgctggctgctcatagtccccacatgatgattggcccgaataattctagcatcggagcacccagccctggtcctccaggtcccggtatgagcccagtgcagctggctttctcagattttctttcctgcgcccaacacgggcccctggtttatgggctatcgtgtatgctgcaaactgtgacgctttgttgtccttccgcccttgtctggaactactccacaaacgagaataaatctgctaatccgggtagccctcttgacctgcttcaggtggccccgagctccttgcccatgcccggcggcaatactgcctttaatcagcaggtgcgcgcccgcatatacgaggtggaacagcaaatcaagcagcgtgggcgggctgtggaggtgaggtggagctttgataagtgtcaagagagcacagcaggagtaaccatttcccgagtcctccacactctagaagtgctggaccggcactgttttgatagaaccgattccagtaattctatggagactttgtatcacaagatattttgggccaaccagaacaaggataaccaggaggtggcaccgaacgacgaggcagtcgtgactttgctgtgcgaatgggccgtgtcctgcaagcgttccgggaagcacagagcgatggccgtagcaaagctgctagagaagcgacaggccgaaatcgaggccgagagatgtggcgagtctgaggtgttggacgaaaaagagagtattagttccagctccttagccgggtctagccttccagtcttccagaacgtgctcctgagattccttgacacacaggcgccaagcctgtcagatcccaactcggagtgtgaaaaggtggaattcgtgaatctcgtgctcctgttttgtgaattcatacgccacgatgtgtttagtcacgatgcttatatgtgtacactgattagccggggcgatctaagtgtcaccgcttcgactagaccccgcagcccggtgggcgaaaacgcagacgagcactactctaaggatcacgatgtgaaaatggaggaacaatctatcatggcccatatggggatcgactctggtacgactaacatattcgatgaagttgataagtcggactttaagactgattttggttctgagttcccgattttctcccccatgcctggagagtcatgcgagaatgcaaatacatcgctgggccgaaggatgtcagttaactgcgagaagctagttaaacgcgagaaaccccgtgaattaatcttcccctccaattatgacctgctcaggcacctgcagtacgctacgcacttccccatccctctggtgagtcattgttttagctag

SEQ ID NO: 123606 - DNA, 2166 bp, synthetic construct
  misc_feature 1..2166: note = Description of Artificial Sequence: Synthetic coding sequence
  source 1..2166: mol_type = other DNA
atggcggcctttggattgctcagctacgagcagaggcctttaaagcgcccacgtcttgggcccccagacgtgtatccccaggatcccaaacagaaggaggatgaactgaccgcagtaaatgtcaagcagggctttaataaccaacccgcatttaccggcgacgaacacggcagcgccagaaatatagttatcaaccccagcaaaatcggagcttacttctcctcaatactggccgagaagctgaaactgaacaccttccaggacacgggcaaaaagaagccacaggtgaacgccaaggacaactactggctcgtcaccgccaggagtcaaagcgcgatacatagctggttctcggaccttgccggcaataaacctttgtctatccttgcaaagaaggtgcccattctttccaagaaggaagacgtattcgcatacttggccaagtactcggtgcccatggttagagccacctggcttattaagatgacctgcgcctattactcggcgatttccgaggcaaaaattaagaagcggcaagctccggatcctaatctagagtggactcagatctctacgcgctacctgagggagcagttagccaagatttccgacttctaccacatggcgtcctctacaggggacggtccagtccccgtgccccctgaggtagaacaagccatgaagcaatgggagtacaatgaaaagctggcattccatatgttccaggagggcatgttagagaaacatgagtacctcacctggattctggatgtcttggaaaagatccgcccaatggatgatgatctcctgaagttgctattgccccttatgttgcaatacagcgatgagtttgtgcaatctgcctacctctcacgcaggctcgcctatttttgtgccaggcgactgtcccttctgctgtcagattcccctaacctgctggcagcccattcccctcacatgatgatcggacctaataacagttcaattggcgctcccagccccggtcctcccggtcccggtatgtcccccgtccagctggccttcagcgactttcttagttgcgctcagcacggtcccctggtgtacggtctgtcttgcatgttgcagaccgtgaccctctgctgcccgtctgcattagtctggaactattcaaccaatgaaaacaaatcagcgaaccccggatctcccctagaccttctgcaagtggcaccaagcagtcttcctatgccgggggggaatacagccttcaaccagcaggttagggccaggatctatgaagtcgagcaacaaattaagcagaggggaagagcagtggaggtgcgctggtcctttgataagtgccaggagagtaccgctggggtcactatcagccgcgtgcttcacaccctggaggtcctggacaggcattgctttgaccgaactgacagttcaaactctatggaaaccttataccataagatcttctgggcaaaccagaataaagacaaccaggaagtcgcccctaatgacgaggccgttgttactctgctgtgcgagtgggccgtgtcatgcaagcggtctggtaaacaccgcgcgatggccgtggctaaacttctggagaagcgccaagcggagatcgaggcagaaaggtgcggcgagtcggaggttctagatgaaaaggaatccatatcgtctagttccctcgccggttccagtctgcccgtctttcagaacgtgctgctcagattcctcgatactcaagcaccttcactctccgaccccaattctgaatgtgaaaaggttgagtttgttaacctcgtgttacttttctgtgagttcatcaggcatgatgtgttttcccacgacgcatacatgtgcacacttatttctagaggtgacttgagcgtaactgcgtctacaaggcccaggtcgcccgttggagaaaacgccgatgagcattatagcaaagaccatgatgtgaagatggaaattttctctcctatgccaggagaatcctgcgaaaatgctaatacaagcctgggccgcagaatgtccgtgaactgtgaaaagttggttaagcgagaaaagccgcgcgagttaatttttccgtccaactatgacctgctgagacacctgcagtatgccacccacttcccgatccctctggtgagccactgcttcagctag

SEQ ID NO: 123607 - DNA, 6438 bp, synthetic construct
  misc_feature 1..6438: note = Description of Artificial Sequence: Synthetic coding sequence
  source 1..6438: mol_type = other DNA
atggctgcatttggattactgtcttacgaacagcggcccctgaagcgtcctagactgggacccccagatgtgtacccacaagacccgaagcaaaaggaggacgagctcactgcagtaaacgtcaagcagggctttaataaccaacctgcttttaccggcgatgagcacgggtcagcacggaatatcgttatcaacccctccaaaatcggcgcctatttcagcagtatcctcgccgagaaattaaaactgaataccttccaagatactgggaagaaaaagccacaggtcaatgctaaagacaactattggctcgtcaccgcccggagccagtctgctatccactcctggttttctgacttggcggggaataaacctctgtctatcctggcaaaaaaggtgcccattctgtcaaagaaagaagatgtgtttgcctatctggctaagtacagcgtgcctatggttcgcgccacttggctcatcaaaatgacttgcgcatactacagtgccatttctgaggcgaagatcaagaagagacaggcacccgacccaaatttggagtggactcaaatttccacacggtatctcagggagcagctggccaaaatctcagacttctatcacatggcgagctcaacaggagatggcccagtgcccgtgccacctgaggtggagcaggccatgaagcagtgggagtacaacgaaaagcttgcttttcatatgtttcaagagggaatgctcgagaagcatgagtacctgacatggatactcgacgttctagagaagatcaggcctatggatgatgacctcctgaaattgctgctcccgctgatgttgcaatactccgacgaattcgtgcagagtgcttacctgtcccgccgtctggcgtacttttgcgctagacgcctgtccctgcttctctccgattcaccaaaccttctagctgcccatagtccacacatgatgatcggtcctaataactcttctatcggagctcctagcccaggtccaccaggtcccgggatgagtcccgttcagctggcattctccgattttctgtcatgtgcccagcacggacccttggtctacggcctgtcatgtatgcttcagacagtcaccttgtgttgtcccagtgccctggtgtggaactattccacaaatgagaacaaaagcgccaatcccggctctccactggatctgttacaggtcgctccatcttctctacccatgcccggtgggaatactgcttttaaccaacaagtacgggcacgcatctacgaggtcgagcagcagatcaaacaaaggggacgcgctgtggaagtgcggtggtccttcgataaatgccaggaatccacagctggggtgacaatttcaagggtactgcacaccctcgaggtactggatcgacattgcttcgacaggacagactcatctaattccatggagacgctctatcataaaattttctgggcaaatcagaacaaggacaaccaagaagtggcccccaatgatgaggccgtggttactctgctctgcgagtgggcagtgtcctgcaagagatccggcaaacaccgggcgatggctgtggcgaaactgctcgaaaaacgccaggctgagatcgaggccgagaggtgcggagagtccgaggtgctagacgagaaagaatccatatcctcctctagccttgccggatcctcattaccggtctttcagaatgttctgttgagatttctggacactcaggctccctccctgtctgatccaaatagtgaatgtgagaaggttgagtttgtcaatttggtcctgttattctgtgaattcattagacacgatgtattcagccacgatgcttacatgtgtactctgattagtagaggggacctgtcggttacagcctctacccgtccaagaagccccgtgggcgagaacgccgacgagcactacagcaaggaccatgatgtgaagatggagatttttagccctatgcctggcgaaagttgtgagaatgccaacacctcgttggggagacgaatgagtgtaaattgcgaaaagctggtcaaaagagagaagccgagggagctgatcttcccctccaattacgacctgttgcgacatctgcagtacgcaacccacttcccaattccattggatgagtccagtagtcatgagtgcaatcaacgcactatcctgctttatggtgtgggcaaggaacgcgatgaagcaagacatcagctgaaaaaaatcaccaaagatatccttaagattctcaataaaaaatcaactacggagacgggcgtcggagacgaggggcagaaagcacgcaaaaacaagcaggagacttttcccactcttgagacagttttcacaaagctccaactgctctcatatttcgatcagcaccaggtgacgtcccaaatcagtaacaacgtgttggaacaaatcacaagcttcgcctcaggcacgagttatcacttaccactggctcatcacatccagctgatattcgacttaatggaaccagccctaaatatcaatggtttgatagacttcgctattcagttgttaaacgagctgtcagtcgtcgaggcagagttactgctgaagtcatcatccctggctggttcatacacaactggactatgcgtctgcatcgtcgccgttctgcggcggtaccacagttgtttgatcttgaatcctgatcagacagcccaggtcttcgaagggctgtgcggtgtggtgaaacacgtggtaaacccaagtgaatgctcttcccccgaacgatgcatcctggcttacttgtatgatctgtatgtgtcttgttcccatctgcgatcaaagtttggagatttatttagctccgcctgtagtaaggtgaagcaaactatttataacaacgtaatgcccgccaacagtaacctgcggtgggaccccgatttcatgatggatttcatagaaaatccgtccgccaggtctatcaattatagtatgttggggaaaatcctgtccgataacgccgccaaccgctacagctttgtttgcaatacgctgatgaatgtgtgcatgggtcaccaggatgcggggcgcatcaacgacatcgcaaatttcagctctgaattgaccgcatgttgcactgtgctcagttctgagtggctgggggtgctcaaggcactgtgttgctcatctaaccacgtctggggtttcaatgatgtcttatgtacagtcgacgtatctgatcttagttttcacgactctcttgctaccttcatagcgatccttatcgctcggcagtgtttttcattagaagacgttgtgcagcacgtggcactgccaagtctcctggccgcagcgtgcggagacgccgacgcagagccaggcgctcgaatgacatgtcgactgctgctccaccttttcagggcgccccaggcatgctttctgccccaggcgacaggaaagcctttcccaggcataagaagcagctgcgatcggcacctgttagcggcagcacataacagtatcgaagtgggggcagtcttcgcagttctaaaagcgatcatgatgctgggggatgctaagatcggtaataattccgtgtcatctctgaaaaacgacgactttactatgagaggcctgagatgcgacggcaacgcagacgatatttggactgccagccagaatcctaagagctgcgggaaaagcatctcaattgagaccgcaaatcttcgcgagtatgcaaggtacgtcctgcgcacaatatgccagcaggagtgggttggcgagcactgcctcaaagagccggagagactttgtacagataaagagcttatcctggatcccgttttgtccaatatgcaagcccagaaactcctgcagctgatctgttacccacacggcattaaagaatgtacagaaggtgataacctgcaaagacagcatattaaacgcattctgcagaacttggagcaatggacattacgacagagctggctggaactgcagttgatgataaaacagtgtctgaaggatcccgggagcggttctgttgctgaaatgaacaatctcctggataacatcgccaaggctaccatcgaggtattccagcaatctgcagacctgaacaacagcagcaacagcgggatgtcactcttcaatcctaactcaattggaagcgccgacacttcctctacccgacaaaacggcattaagacattcctgagttcctctgaacgtcgaggagtctggctggtggcccccttgatagctagactgccaacatctgtacaaggccgggtcctaaaagccgcaggcgaagaactggaaaaagggcagcacttaggatctagctcaaagaaagagcgcgaccggcaaaagcagaagagcatgtccctgctctcccagcaaccgttcctgtccttggtcctaacgtgcctgaagggacaggatgaacaaagggaggggcttctgaccagtcttcagaatcaggtgaaccaaatccttagcaactggagagaagaaaggtatcaggatgacattaaggcacgtcagatgatgcacgaagccctgcagctccggcttaatttggtggggggcatgttcgacactgtgcagagaagtacacaatggactacggattgggctctcttgctcctccagatcataacaagcggaacagttgacatgcacaccaacaacgagctgttcacaacagtgctggatatgttgggagtgctgatcaacggcaccctcgcctcagacctctctaacgcttcccccggaggaagtgaggaaaacaagcgcgcttatatgaacctcgtgaaaaagctgaaaaaagaactcggtgacaaacgcagcgaatccattgacaaggtgagacagctcctccccctccctaagcagacctgcgacgtaatcacttgtgagcctatgggctctctgattgacaccaagggaaataagatcgctggttttgatagtattgacaagaaacaggggctgcaggtatcaactaaacagaaggtgtccccgtgggatctttttgaggggcagaagaaccctgcacctctcagctgggcatggttcgggacagttcgcgtcgaccggcgggtgattaaatatgaggagcagcaccacttactactctaccacactcatcccatgcctaaacctagaagttactacctgcagccacttccactgcctcccgaggaagaagaagaggagcctacttccccagtttcacaggagcccgagaggaagtctgccgagctctccgatcaggggaagactacaacggatgaagaaaagaagactaagggccgcaaaaggaagaccaaatcatcctcaagggtagatgagtacccccagagcaacatctaccgggtccctccgaattactctccaatatccagccagatgatgcaccacccacagtccaccctttggggatataatctggtgggtcaacctcagcaacctggcttttttttgcaaaaccagagcctaacccccggaggatctagactagatcctgctggaagcttcgttcccactaacacgaaacaagccctgagcaacatgctacaacggagatccggggccatgatgcagccaccttccctccatgccattacatcacaacagcagttgatccagatgaagttgcttcaacagcagcagcaacagaggctgttacgccaggcccagacacgcccctttcagcagggccagcccggcgaccaggccgcactctttgcggctcaggcacgaccatcacctcagctgcctcagtacccaggtctgcaacaggcacagacaatgcctcaagggtatacgatgtatggtactcagatgcctctgcagcaaacaagccaacagcaggctgggtccgtcgtcctgtccccttcgtacaacagtcgcgcctatcccgcggcccatagcaatccggtgctgatggagcgactgaggcaaattcagcagcagccgagtggctacgtccagcagcaggcctccccctatttgcagcctttaaccggttcacagaggctcaatcatcaagccttgcagcagtctcccctggttggtggaggcatcgatgccgttttgaccagtgcacatcctaatcttccttccgtcccactcccacaggacccaatgcggccacggcagccccaggtgagacagcagcagcgcttgttgcaaatgcagcaaccgcagcaaccgcagccccagcagcccccccagccccaacaatccagccagtcacagagccagacccttggactacaggctatgcagcctcagcagcccttgttcccaagacagggtcttcaacaaacacagcagcagcagcagactgccgcccttgtgagacagttgcaaaagcagctgtcatccaaccagccgcagcaaggggtgaccccttatggacatccgtcgcatttttag

SEQ ID NO: 123608 - DNA, 6522 bp, synthetic construct
  misc_feature 1..6522: note = Description of Artificial Sequence: Synthetic coding sequence
  source 1..6522: mol_type = other DNA
atgtccgcttctttcgtccctaatggtgcaagcttagaagactgccattgtaatctgttctgtctcgccgacctgaccggaattaaatggaagaagtacgtttggcagggcccgacctcagctccgatacttttccctgtcacagaggaggatcccatcctctccagcttcagtaggtgtttgaaggccgatgtgctgggggtatggcggagagatcagcgcccaggaagaagagaactgtggattttttggtggggcgaagaccccgtgctgctcactctgtttaccatgacatatcagaagaaaaaaatggaatgcgggaggatggactttcctatgaatgccgtactgtgctttcaagctgtacacaacctgctcgaaagatgcttgatgaaccgtaacttcgtgcggatcggaaaatggttcgtaaagccctacgagaaagatgagaaacccatcaataagtctgagcatctgagctgttcatttaccttcttcctgcatggggattccaacgtgtgtaccagcgttgagatcaatcagcatcagccagtctacttgctgtccgaagagcacatcaccctagctcagcagagtaactctcccttccaggttatactgtgtccatttggcctcaatggcacgctgaccggccaggctttcaagatgagtgactcagcaaccaaaaagctgattggcgaatggaaacagttttatcctatctcctgctgcctgaaggagatgagcgaagagaagcaggaagatatggactgggaggatgacagcctcgccgcagtggaggtgcttgtcgccggggtcagaatgatttaccccgcatgcttcgtcttagttccccagtcagatattccgaccccctcaccagttggcagtactcattgtagcagcagctgtctgggcgtacaccaagtgccggctagtactagagaccctgctatgtcatctgttacactgacccctccaacttctcccgaagaggttcagactgtcgacccccaaagcgtgcagaaatgggtaaagttctcttccgtgtccgatggtttcaattcggatagtaccagccatcatggcgggaagattcccaggaagctcgccaaccatgtcgtggacagggtttggcaagagtgcaatatgaatcgtgctcagaacaaaaggaagtattccgcttcttcaggcggtctgtgcgaggaagccaccgctgcgaaagtggccagctgggactttgtagaggctactcagcgtaccaactgtagttgcctccgacataaaaatctgaagtcacgaaacgctggccaacaggggcaagcaccaagcctgggtcagcaacagcaaatcctacccaaacataagacaaatgagaaacaggagaagtcagaaaagccccaaaaacggccactgactccctttcaccatagggtgtcagtaagcgacgacgtgggcatggatgccgacagcgcatcccagcgactggtgatctctgcaccagactctcaagtgcggttctcaaatattaggaccaatgacgttgctaaaacccctcaaatgcacggcaccgagatggcaaatagtccccaaccacctcctttgagtccccacccatgtgatgtcgtggatgagggagtaacaaaaaccccatccactccccagagtcagcacttttatcagatgccaactccagaccctctggtgccctcgaagcctatggaagaccggatcgactctctgagccagtcgtttccacctcaataccaggaagctgtcgaacccacagtttacgtgggaacagctgtcaatcttgaggaggatgaggctaacatcgcatggaagtattacaagttcccgaagaagaaggatgtggaatttctgcctccccaactgcctagcgacaagtttaaggatgatcccgttggaccgttcgggcaagaatccgtaactagtgtgacagagctgatggtccagtgcaagaagccgctgaaagtgtctgatgagctggtgcaacagtatcagattaaaaaccagtgtctgtcggccatcgcgtcagacgcggagcaggagcccaaaatcgacccatatgccttcgtggaaggtgatgaagagttcttatttccagacaaaaaagacagacagaattctgaacgggaagccggcaaaaagcataaggtggaagacggcactagcagcgtcacagtcttgagccacgaggaggacgccatgtctctcttctccccctcaatcaagcaagatgcacctagacccacctcacacgcgaggcctccttctacctctttgatatatgatagtgaccttgccgtgagctatactgacttggataacctctttaattcagacgaagacgagttaacgcccggatccaagaagtccgctaacggcagcgacgataaagccagctgtaaagaaagcaagacaggcaatctggaccccctgagttgtatctctactgccgatctccataagatgtatcccacaccaccttccctggaacagcacattatgggtttctcaccaatgaatatgaataataaggagtatggcagcatggacacaaccccaggtggcacagtgctggaggggaatagtagctccataggagctcagttcaagattgaagtagatgaaggattttgtagccccaaaccctcagagatcaaagacttctcttacgtgtataaacctgagaactgccaaatcttagtggggtgttctatgttcgccccactcaagacccttccaagccaatacctgcccccaatcaaactgcctgaggaatgcatctaccgccagtcttggacagtaggcaaactcgagctactgagttcaggcccatccatgccctttataaaggagggggatggatcaaacatggaccaggagtacgggaccgcctatacaccacagacacacaccagttttggaatgccccctagtagcgctcctcccagtaactccggagcggggatcttaccttctccctcgaccccacgtttccctacacctaggacccccagaacgccacgaacgccacggggtgcagggggcccagcttccgcccaaggatccgtgaagtacgaaaactcagacttgtattccccagcatccaccccctccacgtgccgtcctctgaacagcgtggagccggctacagtaccctccatccccgaagcccacagcttatatgtgaacctgatcctttctgagagcgtgatgaacctcttcaaggactgtaactttgacagttgttgtatttgcgtgtgcaatatgaacataaaaggagctgacgtgggcgtgtacatccccgaccctacacaagaggcccagtacagatgcacatgcgggttctccgcagttatgaatcgaaagtttggaaacaactccgggctgttcctcgaggacgagctggacataattggccgcaatactgattgcggaaaagaggccgagaagaggttcgaggcactgagagctacatccgccgagcacgtgaatgggggccttaaggaaagtgaaaagctctctgatgatctgatactgttgctacaagaccagtgcacgaatctcttcagtcctttcggagccgccgatcaggatccattccctaaatcaggggttatcagcaactgggtacgcgtggaagagagagattgctgtaatgattgttaccttgccctggagcacgggcggcagttcatggataacatgagcgggggtaaggtggatgaagcgctggtcaagtcttcctgtttacatccatggagcaaacggaatgatgtcagtatgcagtgctcccaagatatcctgaggatgcttttgagtctccagcccgtattgcaggatgcaatccagaaaaaacgcaccgttcggccctggggggtgcagggcccactgacatggcagcagttccacaaaatggctggaagaggctcttatggaacagacgaatcccccgaaccgctccccatcccaacattcctgcttggctatgattatgattatctggtgctcagcccgttcgcgttgccatattgggaaaggttaatgctggagccatatgggagccagcgggacattgcttacgtggtgctgtgccccgagaacgaggcgctccttaacggggccaaaagcttttttagagacctcacagcgatctatgaaagctgcagactgggtcagcatagaccggtgtcccggctgctgacggacggcattatgagggtgggttctactgcatccaagaagctgtctgaaaaactcgtggcagagtggtttagccaggcagcagatggcaacaacgaagccttctctaagcttaagctttacgcacaggtctgcaggtatgatcttggcccctacttggcgtcactaccgctcgatagctcactcctaagtcagcccaatcttgtcgcaccaacaagtcagagcctgattactccgccacagatgactaatactggcaatgccaacacgcccagtgcaactttggcttctgctgcctctagcaccatgaccgtcacaagcggtgtggccattagcactagcgtcgcgaccgccaattcaacattgactactgccagtacatcctcgtcaagctcctcaaatctcaattccggcgtctctagtaataagttacccagcttcccccctttcggctccatgaattccaacgccgcaggatcaatgtcaacccaagctaatactgtccagtccggccagctcggtggacagcagacatctgccttacagacagccggcattagtggagagtctagctccttaccaactcagccacacccagatgtgtccgagagcaccatggatagggacaaggttgggatccccacagacggtgacagccatgcggtgacataccccccggcgatagttgtttacattatcgacccttttacatatgaaaacactgacgagtccacgaattcctctagtgtgtggacgctgggactcctcagatgttttttagaaatggtgcaaactctaccaccacacattaaatccactgttagcgtccagatcataccgtgccagtatcttttgcagccagtgaagcatgaagatagggaaatctatccgcaacatctgaagagccttgcattctccgccttcacccaatgtaggcgccctttgcctacatctacaaacgttaaaacccttaccgggttcggacccggattggccatggaaacagccctccgttctcccgacagacctgagtgcatccggctgtatgctcccccctttattctcgcacccgtcaaggacaaacagactgaactgggagagacctttggggaagctgggcaaaagtataatgtcctgtttgttggctattgtttgtctcatgatcagcgctggattttagctagctgcacagacttgtacggcgagttactggagacatgcatcatcaacattgacgtgcccaacagagctagaaggaagaagtcatccgctcgaaaattcggcctacaaaaactgtgggaatggtgtctaggcctggtccagatgtcgtctctaccctggagagtggtcattgggcggctcggtcgcatcgggcatggcgaactcaaggactggtcgtgtctcttgagtagacggaacctgcagtccctgagtaaacgccttaaggatatgtgtaggatgtgcggcatcagcgccgcggactctccaagtatattgagcgcttgcctcgtagctatggagccacagggcagttttgttattatgcccgattctgtctcaactggatctgtctttggcaggtcgacgaccttgaatatgcagacctcccagctgaacaccccccaggatacttcctgtactcatatcttagtgtttcctacttcagcatcggtacaggtggcatctgctacctacaccaccgaaaatctcgacctggcgttcaaccccaacaatgatggtgctgatgggatgggcatcttcgacctcctcgacaccggagatgacctcgatcctgacatcatcaatatactccctgcgtctccaaccggcagccccgtccacagtccaggctcccactatccgcatggaggtgatgccggaaaagggcagtccaccgaccgtctcctgtctaccgagcctcatgaagaggtgccgaacatattacagcagcctcttgctttggggtatttcgtcagcacagctaaagccggccccctgcccgattggttctggtctgcatgcccacaggcccagtaccagtgtccattattcctcaaagcctccctacacttgcacgttccgtcggtgcagtcagacgaactactacattcaaaacactcacacccgttggactctaaccagacctccgatgtgctgcggtttgtcctcgaacagtataatgctttatcttggcttacttgtgatcccgctacccaggatcggcgctcatgtttacctatacacttcgtcgtgctgaaccagttgtacaattttatcatgaatatgctgtag

SEQ ID NO: 123609 - DNA, 6525 bp, synthetic construct
  misc_feature 1..6525: note = Description of Artificial Sequence: Synthetic coding sequence
  source 1..6525: mol_type = other DNA
atgtcggcctccttcgttcctaatggggctagcttggaggattgccactgcaatcttttttgtttggccgacctgacagggatcaaatggaagaagtatgtgtggcagggtccaacctccgctcctattctgtttccagtgaccgaggaggaccctattctgagctcgttttctaggtgtctgaaggctgacgtgctgggcgtgtggagaagagaccaacgtccaggacggagagagctgtggatcttttggtggggagaggatccaagcttcgccgatctgatacaccacgacctgtccgaggaagaagacggtgtgtgggagaacggactatcctacgaatgccggactttgctgttcaaggcagtgcacaatttactcgaacggtgcctcatgaaccgaaatttcgtacgcatcggaaagtggttcgtcaagccttacgaaaaggatgagaagccaattaataaaagcgagcacctgagttgctctttcacgttcttcttacatggtgacagtaacgtttgcaccagcgtggagattaaccagcaccagccagtttatcttttgagcgaggaacacattacgctggctcagcagagtaactccccctttcaggtgattctgtgccctttcggtctcaatggcactctgacaggccaggctttcaagatgtccgactccgcgactaaaaagcttatcggagagtggaaacagttttatcctatttcttgctgcctcaaggagatgtctgaggagaagcaagaagacatggactgggaggatgacagtctcgcagccgtggaggtgctcgtggccggcgtgaggatgatttacccggcttgtttcgtcctggtgccccagtcggatataccgacaccttctccagttggttctacacactgctcgagcagctgtctcggagtgcaccaagtgcccgcgtccacccgggatcctgccatgtccagtgtcactcttacacctcccaccagccctgaggaggtccagacagtggatccccagtccgtgcagaaatgggtaaagttcagtagcgtgagtgacggatttaattctgactcaacctcgcatcacggcggcaagatacctagaaagcttgcaaatcacgttgtcgatagggtgtggcaagaatgcaacatgaacagggcacagaataaacgcaagtactccgcaagcagcggtggcctgtgcgaggaagccaccgccgcaaaagtggcaagttgggatttcgtggaagccacacagcgaaccaattgttcatgtctccggcacaagaaccttaaatcccgtaacgccggtcagcaaggccaggctccctctctggggcaacagcagcagattctgccaaagcacaagacaaatgaaaaacaagagaagagcgagaaaccccagaagcgaccactgacaccattccaccatagagtcagcgtcagtgacgatgtcgggatggatgctgactctgccagccaacggttagtaatctcagccccagacagccaagtgagattttctaacatcagaacgaacgatgttgcgaagacacctcaaatgcatggcaccgagatggccaatagccctcagcccccaccgctcagcccccatccctgtgacgtggtagatgagggagtaaccaaaaccccctcgacgccccagagccagcacttctatcagatgcccactcctgatcccctagttccctctaagcccatggaggataggatcgacagtctaagtcagtctttcccacctcagtaccaagaagccgtggaacctaccgtgtacgtaggcactgccgtcaatctggaggaggatgaagctaacatagcctggaaatattacaaatttccgaagaagaaagatgttgaatttctgcctccccaactgcctagcgacaagttcaaagatgaccctgtgggcccattcgggcaagaaagcgtgacctccgtaactgaactcatggtgcagtgcaaaaaaccactgaaggttagcgacgagctcgtacaacagtatcagattaagaatcaatgtctgagtgcgatagcgtctgacgctgaacaggaacccaagatcgatccttatgcctttgtagaaggcgacgaggaatttctgtttcccgataagaaggaccgccagaattccgagagggaggctggtaagaaacataaagttgaggacggtaccagcagtgtcaccgtcctctcgcatgaggaagatgctatgtccctgtttagtccgtcaattaagcaggacgccccacgccctactagtcacgcgcggccccccagcacatctctgatatatgactctgatctcgctgtgagttacacggaccttgacaacctgttcaactccgacgaagatgaactgacccccgggagtaaaaagtccgccaatgggagtgacgacaaggcctcctgtaaggaatctaaaaccggcaacctggatcccctctcctgtatttccaccgcagacttacataaaatgtacccgaccccaccctctctggagcagcacatcatgggcttttccccaatgaacatgaataataaggagtatggcagtatggatactacacctgggggcacagtgctcgaagggaattccagtagcataggagcccaatttaaaatcgaagtagacgaaggcttctgttccccaaagccttccgaaattaaagacttctcttatgtctacaaaccagagaactgtcagattttagtgggctgctccatgttcgcaccactcaagactttaccatcacaatacctgcctccaatcaaattgcctgaggaatgcatctatcgccagtcctggaccgtgggcaaactcgaactgctgtcgtccgggccctccatgcccttcattaaggagggtgatggatcgaatatggatcaggagtacgggaccgcgtatacccctcagacccatacctcgttcggcatgccgcccagtagtgcaccaccgtccaactccggcgccggtatactgcctagtccctctacacctagattcccaacgcctcgcacaccacgcaccccacgcactcctcgcggagccggaggccctgcatccgcccaggggtcagtcaaatatgagaactccgacctgtatagccccgcttccaccccatctacgtgcagacccttgaattccgtcgagcccgcaacggtccctagcattccagaggcccactcactctacgtaaacctgatcttaagtgagagcgtaatgaacctgttcaaagattgcaactttgatagttgctgtatttgtgtgtgcaacatgaacatcaaaggagctgacgtgggtgtctacataccagatccaactcaggaggcccagtaccgctgcacatgcggattctctgccgtgatgaacaggaaattcggcaataacagcggcttgttcctcgaagatgagctggacatcattgggcgtaacaccgactgtggaaaagaggcagaaaagcgtttcgaagcactaagagctacatcagccgaacatgtcaatggcggtctgaaagaatccgagaagctcagtgacgatctgatcctgctgcttcaggatcagtgcaccaacctcttcagcccctttggagcagccgatcaggatccattccctaagtcgggtgttatcagcaattgggtgcgagtggaagagcgtgactgttgtaacgattgctacttggccctcgaacacggcagacagttcatggataatatgtcgggcggaaaggtcgacgaagcactcgtaaagtctagctgcctgcacccttggagcaagagaaacgatgtttccatgcagtgctcccaggacatccttagaatgctcttatcactgcagccagtgctgcaagatgctattcagaaaaagcggacagtcagaccatggggtgtccaggggcctctcacctggcagcagtttcacaagatggcggggcgggggagctatgggacggatgaatctccagaacccctgcccatcccgacattccttttgggatatgattacgattatctcgttttatcgccctttgccctgccctattgggagagactcatgctcgaaccctatggatcccagcgcgatatagcatacgttgtcctgtgtcccgagaatgaggccctgcttaacggggccaagtccttcttccgcgatctgaccgccatttacgagtcttgtaggctcggccagcacagaccagtgtccagactgctcaccgacgggattatgcgcgttggaagcacggcaagcaaaaagttgagcgaaaaactggttgcagagtggttctcgcaagccgccgatggtaacaatgaggcattctccaaactcaagctctacgcccaggtatgccgctacgatttaggaccgtatttagccagccttcccctggactcctcgctcctttcccaaccaaatctggtcgcccctacgtctcagtcccttattactccacctcagatgaccaacacaggcaatgccaatacaccctccgccactttagcatccgcggctagcagtacaatgaccgttaccagcggcgtcgccatcagtacttctgtggcaacagctaacagcaccctaacgaccgcaagcacatcaagttcctcgagctcaaaccttaattctggagtgtcttcaaacaagctaccgtcatttcctccgttcggtagcatgaattctaatgccgccggttctatgtcaactcaggcgaataccgtccagtcaggtcaactcggaggacagcaaacatctgcactccagaccgcaggcatctcgggagagtccagttcactcccgacccagccgcaccccgatgttagtgagagcacaatggaccgcgataaagtcggcattccaactgacggagatagtcacgcagttacctatccaccagccattgtcgtgtacattatcgatccattcacctacgagaataccgatgaaagcacaaatagttcaagtgtgtggactctgggcctcctcagatgtttcttagaaatggtccagacattgcctcctcatatcaaatctactgtttcagttcagattattccgtgtcagtaccttcttcaacctgtcaaacacgaggaccgagagatctacccccagcacttgaagagcctggcattttcagcctttacccagtgtcggcggccacttcctaccagcacaaacgtgaagacactgactgggttcggccctggcctggctatggaaaccgcactgcgatcccccgataggccagaatgcatccggctgtatgcgccccccttcatcctggcaccggtgaaggacaagcaaaccgagctgggtgaaacctttggagaagctggccagaaatacaacgtgctgttcgtcggctactgcctttctcatgaccagcgctggatcctcgctagttgcacggatctgtacggtgagctgttagagacctgcatcatcaatatcgatgttccaaaccgggcacgtcgcaagaaaagcagcgcacgcaaatttgggctgcagaagttgtgggaatggtgcctgggcctggtccagatgtcttccctgccttggcgtgttgtgattggacggctgggtcgcataggacacggggagctgaaggactggtcatgtctgctgtcacgaagaaacttgcaatccttgtctaaacggttgaaagacatgtgcagaatgtgtggaatctctgccgccgactcccccagcatcctctctgcttgtctagttgccatggagccccagggctcattcgtaataatgccggacagtgtgagtactggctctgtcttcggcaggagtactactctcaatatgcagacctcacaactgaataccccacaggacactagctgcactcatattcttgtgttccccacctcagcttcagtccaggtggcttctgcaacatacactactgagaatttggacctggcctttaaccctaacaatgacggagccgacggcatgggaatctttgacctcctggacaccggcgacgacctcgacccagacatcattaatatactgcccgcatcacccactggaagcccagtccatagccccgggagccactacccacatgggggcgatgctggaaaaggccagagcacagacaggttactgtcaacggagcctcacgaggaggtgccaaacattctgcagcagcctctcgccttaggatactttgtttctactgcgaaagctggcccgctaccagattggttctggtctgcttgcccacaggcacaataccagtgtccactgtttttaaaggctagcctccacctccatgtgccttccgtgcaatccgatgaactgcttcacagtaagcattcccacccactcgactccaatcagacaagcgacgtactgagatttgtgcttgaacaatacaatgcccttagttggctgacctgcgacccagcaacacaggacaggcgtagttgcctgcccatccacttcgttgtcctgaaccagctgtataactttattatgaacatgctgtag

SEQ ID NO: 123610 - DNA, 6633 bp, synthetic construct
  misc_feature 1..6633: note = Description of Artificial Sequence: Synthetic coding sequence
  source 1..6633: mol_type = other DNA
atgaccgccgctgccaactgggtggctaacggagcatcccttgaggattgtcatagcaatctgtttagccttgccgagcttacgggaataaaatggcgacgatataatttcgggggacatggagactgtgggccaatcataagcgccccggcccaagatgatccaatcctcttgagctttattcgttgccttcaggccaacctgctgtgcgtgtggcggcgggatgtaaagcccgattgtaaagaactgtggattttctggtggggcgatgagcctaacctggttggtgtcatccaccacgaattgcaagtagttgaggaagggctttgggaaaacggtttgtcttatgaatgcagaacactgttattcaaagcaatacataatctcttggagcgctgccttatggacaaaaactttgtccgtataggaaaatggttcgtgcggccttatgagaaggacgagaaacccgttaacaagtctgaacacctgtcctgtgcttttactttctttctgcacggagaaagcaatgtatgtacaagcgtggagatcgcgcaacatcaacccatttacttgattaacgaggaacatattcacatggctcagagctccccagccccatttcaggtcctcgtgagcccttatggcttgaatggtacattgactgggcaggcttacaaaatgtctgaccctgccacccggaaactcatcgaggagtggcaatatttttatcctatggtccttaaaaaaaaggaagaatccaaggaagaggatgagcttggttatgatgacgacttcccagttgccgtggaagtgatcgtaggcggcgttaggatggtctatccctccgccttcgtgcttatatctcagaacgatatcccggtccctcagagcgtggcatcagccggcggccatattgctgtgggtcagcagggtctgggcagtgtgaaagaccctagcaattgtggtatgccactgaccccacctactagccctgaacaagctatactgggcgagagtggcgggatgcagtctgctgccagccatctagtgtcgcaggacggcggcatgatcactatgcattcgcccaagagaagcgggaagatcccacccaaactgcacaaccacatggtccaccgagtgtggaaggaatgtatcctcaataggacacaatccaagcggtcgcagatgagtacccccaccctggaagaagagcccgcctctaatccggccacctgggactttgtcgaccccactcagcgggtcagctgctcatgtagcagacacaagctgctgaaaaggtgcgccgtgggaccaaatagaccgcctacagtgagccaacctgggttctccgcaggaccatcatctagttcatccttgccaccacctgcctcttcaaagcacaagactgccgagcgccaggagaaaggggataagctgcagaaacggcccttgattccttttcatcatagaccgagtgttgcagaagagctatgtatggagcaggataccccgggccagaaacttggcttagccggaatcgattcaagtctcgaggtgtccagttctcgcaagtatgataagcaaatggccgtgccctcccggaatacaagtaagcagatgaatctgaacccgatggactccccccactcacccatctcccccctgcccccaactcttagcccacagccgcgggggcaggagaccgagtcccttgaccccccaagtgtccccgtgaatccggcattatacggcaatggactggaactccagcagctcagtacactcgacgaccggacagtgctcgttggtcagcggctgccactgatggcagaagtcagcgagacagcactgtactgcggcatcagaccatccaaccctgaatccagtgagaagtggtggcactcctatcgactgccacccagcgatgacgccgagttccgccccccagaactacagggagaaaggtgtgatgccaagatggaggtgaacagtgagtctacagccttgcagcgccttctggctcagcccaacaaaagattcaaaatctggcaggataagcagcctcagctgcagccattgcattttctcgatcccttgcctctaagccagcagcccggtgatagcctcggggaggtcaatgacccgtacacattcgaggacggggacattaagtatatctttacggcaaacaaaaagtgtaagcagggaacagaaaaagactcactgaagaagaacaaatccgaggacgggttcggcacaaaagacgtaactacccccggccattctacacctgtgccagatggcaagaacgccatgagcattttctctagcgcgacgaaaacagacgtgagacaggacaatgctgcagggcgcgcaggcagcagtagtctgactcaagtcacggacttggctccttccctgcacgatctggacaacatctttgacaacagcgacgacgacgagcttggggcggtctcaccggcactacgatctagtaaaatgcccgccgttgggactgaggatcgtcccctcgggaaggacggcagagctgccgtcccgtacccccccaccgtggctgacctgcaacggatgttcccaacacccccttcactggaacaacatcctgccttctcgcctgtaatgaactataaggatggaatctcctccgagactgttaccgccctgggcatgatggaaagtccaatggtgagcatggtgtcaacacagctgacagagttcaagatggaagttgaggatggtctggggagccccaagcctgaggaaattaaagacttttcctacgttcacaaggtgccatctttccagccctttgtggggagtagcatgtttgccccccttaagatgcttccctcgcactgtcttctgcccctgaagatcccagacgcctgtctcttccgaccttcctgggcaatcccccctaagatcgaacagctccccatgcctccggcggccactttcatcagggatggctacaacaatgtcccatccgtcggaagcttagccgatcctgactacttaaatactcctcaaatgaacacaccagtgactctgaatagcgcggccccggcctctaactctggcgccggggtgctgcctagccctgctacaccgaggttctcggtcccaactcctagaacaccccgtactccccgcacaccccgcggcggtggaaccgcctccggacagggaagtgtaaaatacgattcgaccgatcagggatccccagcttcaactccatctacgacaaggcctctcaacagcgtcgaacctgctaccatgcagcccattccagaagctcactcactttatgttacactgattctcagcgacagtgtcatgaatatttttaaggaccgcaatttcgactcatgctgcatctgtgcttgtaacatgaatattaaaggggcagatgtgggcttgtatatcccagattccagtaatgaggaccagtacagatgtacctgcggcttctccgccataatgaaccggaaactaggatacaattcgggactgttcctggaagacgagctggatatcttcgggaaaaactctgacatcggacaggccgctgagaggaggctaatgatgtgccagtctacattccttcctcaagtcgaggggacaaaaaagcctcaggagcctcccatcagcctgcttctcttgcttcagaatcaacacacacagccgtttgcatctctgaactttctagattatatcagctcgaataatcgacagacgttgccatgtgtgtcatggagctatgaccgggtgcaggcggacaacaatgattattggacggagtgcttcaacgccctggaacagggcaggcaatatgtcgacaatcctaccggtggaaaggtggatgaagccctcgtgcgatctgccaccgtacacagttggccccatagcaatgtgctggacatttccatgctgagctcacaggacgtcgtgaggatgctgttgagcctccagcctttcctgcaggacgcgattcagaaaaagaggactgggcgaacgtgggaaaatatacagcatgtccagggcccgttgacatggcaacaatttcataagatggccggaagggggacgtatggctcagaggagtctcccgagcctctgccaattcccaccttactggtcggctatgacaaggacttcctcaccatctcccctttttccttaccattctgggaaagactcctattagatccgtacggtggtcacagggacgtggcatatattgtggtttgccccgagaatgaagcacttctggagggggcaaaaacttttttcagagatttgtccgcggtgtacgaaatgtgcagattgggccaacataaaccaatctgcaaggttctcagggacggcattatgcgagtcggtaagaccgtagcccaaaagctcaccgatgagctggtgagcgagtggttcaatcaaccatggtcaggggaagagaatgacaaccacagcaggctcaagctatatgcccaggtctgccgacaccatctggccccctacttggccacactgcagctggacagctccctcttgatcccaccgaaatatcagacaccaccagccgcggcacagggccaagctacacccggtaatgccggcccactggcacccaacggcagtgcagcccctcccgcgggcagcgcattcaatcccacctctaatagtagcagtaccaacccagccgcaagttcctcagccagcggctcttcagtgccgcctgtgtcttctagcgcttcagcacctggcattagccaaatcagcaccacttcgagcagtggattttctggttcggtgggtggccagaatccctcaactggggggattagtgccgatcggacacagggcaatatcggatgtgggggcgacactgacccaggccagagttcatcccagccctcgcaagatggacaagagtctgtgaccgagcgcgaaagaatagggatccctacggagcccgatagtgccgattcacatgcccacccccctgcagtcgtaatctatatggtggacccctttacctatgccgcggaagaagatagcactagcggaaacttctggcttctgtccctgatgcggtgctatacggagatgctcgataacctcccagaacacatgcgcaacagctttatattgcagatcgtgccttgtcagtacatgctgcaaaccatgaaagacgaacaggttttctatattcagtacttaaaatcaatggcatttagcgtttactgccagtgtcgccgaccacttcctacccagatacatatcaagtccctgaccggttttggacccgccgcttctattgagatgaccctaaagaaccccgaaagaccaagcccaattcaactgtactccccaccctttatcctggcccccatcaaagataaacaaacggaactcggcgagaccttcggagaggcttctcaaaaatacaacgtgctgtttgtaggatactgtctgtcccacgatcagagatggctgctggcttcctgcacggacttgcatggtgagctattggagacctgcgtggtaaacatcgccctgcccaataggagtcggcgttctaaggtgtccgcgcggaaaatcgggctgcagaaattgtgggagtggtgcataggcatcgttcagatgacgtctcttccttggcgcgtagttatcggacggctcgggaggctggggcacggcgagttgaaggactggtccattttattgggagaatgctcattacagacgatatcaaaaaaactgaaagacgtgtgtcggatgtgcggcatatctgcagctgattcaccatctatcctttcggcctgcctggttgcaatggaaccacaaggaagctttgtggtcatgcccgatgctgtgaccatgggcagcgtctttggccggagcacagccctgaacatgcagtccagccagctgaacaccccccaggacgcctcctgcacgcatatcttggtatttcctacttcaagcaccatccaggtggcccccgctaactatcctaacgaggatggattttcacccaacaatgatgatatgttcgtcgacctcccttttcccgacgacatggacaatgacattggaattcttatgaccggcaatttgcacagctcacccaacagtagcccagtaccctcacctggatcgccatccgggatcggcgtcggctcacatttccagcattccaggagtcagggagagcgtttactgtcccgggaagctcctgaggagctgaagcagcagcccctagctttaggctattttgtttccactgctaaggcggaaaatttgccacaatggttttggtcaagttgcccccaggctcagaaccagtgccccttgtttctgaaggcttccctccaccaccatatatctgtcgcccagaccgacgagcttctcccagctagaaattcacagcgcgtgcctcatcccctggattccaagactacaagtgacgtgctgcgtttcgtcctggaacagtataatgctctcagttggctcacctgtaatccagctacccaggacagaaccagctgcctacctgtgcatttcgtcgtgctgacccagctttacaacgcaatcatgaatatcttgtag

SEQ ID NO: 123611 - DNA, 4365 bp, synthetic construct
  misc_feature 1..4365: note = Description of Artificial Sequence: Synthetic coding sequence
  source 1..4365: mol_type = other DNA
atggctcccgtgcaacttgagaaccatcaactcgtgccacccgggggtggtggtggcgggtctggaggtccacctagtgcacccgctccccccccacctggtgccgcagtggcggctgccgccgctgccgcagcatcaccgggttacaggctgtccactctcattgagtttctgctgcatagggcttactcagaattgatggtactgacggatctgctccctagaaagtccgacgtggagagaaaaattgagattgtgcaatttgcaagcaggactcgtcaactgtttgtacggctgctcgccctggttaagtgggccaacaatgcaggcaaggttgagaaatgcgctatgatatccagtttcttggatcaacaggcaatactgtttgtcgacaccgcggatcgtctggcatccctcgcaagggacgccctggtgcatgcacgcctgccctcattcgctatcccgtacgcaatagatgtactgaccactgggagttatccgcggcttcccacttgtatacgcgacaagattatccctccagacccgatcaccaaaatcgaaaagcaggctacactgcatcagctgaaccagatactacgacatcggctggtgacaactgatcttccacctcagctcgcaaacttgacagtggccaatggacgcgtgaaattcagggttgagggcgagtttgaggcgacccttaccgtcatgggagatgaccccgatgtgccatggagattgctgaaattagagatacttgtagaggacaaggagacaggagacgggcgagccctggtccactctatgcaaatcagtttcatccaccagcttgtccagtctcgactgttcgctgatgaaaaaccattgcaggacatgtacaactgcctccatagcttctgtttatccctgcagttagaagtattgcactcacagacattaatgttaattagggagcgttggggtgacttagtgcaggtagaacgttatcacgctggtaagtgtctctccctgtctgtttggaatcagcaggtcctaggcaggaaaactggtactgcttccgttcataaggtaaccatcaagatagatgagaacgatgtgtctaaacctctccagatatttcacgatcccccactgccagccagtgactctaagcttgtggaaagagctatgaagattgaccacctctctatagagaagttgttgattgacagtgtgcacgctcgggcacaccagaaattacaggagttgaaagctatattgcgagggttcaacgccaacgaaaacagcagcatcgagactgctctgccagctcttgttgtgcctatcctcgaaccatgcggcaattctgagtgtcttcacatatttgtggatctgcacagcggcatgtttcagctcatgttgtatgggttagatcaagcgacactcgatgatatggagaaatccgtgaacgatgacatgaagagaatcatcccttggatccagcagctgaagttttggttaggccagcagcgctgtaaacagagcattaagcacttacccacaatctcgtctgaaaccttgcagctcagtaattacagcacgcaccctataggaaacctctccaaaaacaagttgttcatcaaactgacccgactgccccagtactacatagtcgtagagatgctcgaagttccaaataagccaacgcaactctcttacaagtactacttcatgtctgtgaatgccgcggaccgcgaagatagcccagcaatggcgctcctgctccagcaatttaaagaaaatatccaggatctcgtatttaggaccaagactggaaaacagacccgaacaaatgccaagagaaagctgtctgacgacccatgcccggttgaatccaagaaaaccaagagggcaggtgaaatgtgtgctttcaataaagtcttggcacactttgtcgcgatgtgtgacacaaacatgccctttgttgggctgagactggagctgtccaatctagaaattccgcatcagggggtgcaggtagagggagacggtttttctcacgcaatccgcctgctcaaaattcctccctgtaagggtatcacagaggagacgcagaaggccctcgaccggagtcttctagactgtacgttcaggttgcaaggtcgcaacaataggacatgggtagctgagcttgtctttgctaattgtcctctgaacggcacatctactagagagcaagggccttcccggcatgtttatctcacctacgagaatctactgtctgaaccggtgggtggccgaaaggtggtggaaatgttcctgaacgactggaactccattgctaggctgtatgagtgcgtgctggagtttgcaaggtccctgccagatatccccgcacacctcaacatcttttccgaggtgcgtgtctacaactatagaaagctgatcctttgctatgggacgacgaaggggagctccatctccattcagtggaatagcatacaccagaaatttcacattagtctcggcacagtcggaccgaattctggctgtagcaactgccataatacaattctgcaccagctgcaggaaatgttcaataagacccctaatgtggtacagttattgcaggtgctcttcgacacacaagccccccttaacgctatcaataagctgcccaccgttcctatgctaggactgacacaaaggacaaacacagcctaccagtgtttctccatcttgcctcagtcaagtacacatatcagattagcttttaggaacatgtactgtatagatatctactgcaggtccagaggggtggttgctataagagatggtgcttactctctgttcgataactccaagctggtggagggtttctatccagcccctggccttaaaacattcctcaatatgttcgtagatagtaaccaggacgcaaggaggaggtcggtgaacgaggacgacaaccccccgagtcccattgggggcgatatgatggactctctgatttctcaacttcagccccctccgcagcagcagcccttcccgaaacagcctggcacatcgggcgcgtaccccctcaccagcccccccacatcttaccattctactgtcaatcagagcccttctatgatgcacacccagtccccagggaatctccatgcagcgtcttctccttcaggcgcacttcgcgctccttcgcccgccagtttcgttcctacgccaccaccatcttcccacggcataagcattggtcccggagccagctttgcctccccacatggtactctcgatcctagcagcccctataccatggtctccccttcaggaagagccggaaattggcccggctcccctcaggtatctggaccctctccggcagccaggatgccaggtatgagccccgccaacccatctttgcactcaccagtgccggacgcttctcacagtcctcgagcaggtacatcttcacagactatgccaaccaacatgcctccacctaggaaactgccgcaaagatcctgggccgcaagcataccaaccatcttgactcatagcgccctgaatatcctcttactgcccagcccgactccaggccttgtccctgggttagctggttcttacctgtgttccccccttgagaggttcctggggagcgttatcatgcggcggcatctgcagaggattatccagcaggagactctgcagctgattaatagcaacgaaccgggagtgattatgttcaaaacagacgcactgaagtgccgcgttgcactctcccccaagaccaatcagacccttcagcttaaggttacccctgagaacgcaggacagtggaagcccgatgagttgcaggtattagagaagtttttcgaaacacgggtggcaggaccccccttcaaggccaataccctgatagcatttacaaaactgctaggcgccccgacccacatcctgcgggattgtgtgcatatcatgaagctcgagttgtttcctgatcaggccacacaactcaaatggaatgtgcagttctgcctcacaatcccgccctctgccccccctattgctccccccgggacacctgccgtggtactgaaaagcaagatgctgtttttcttgcagctaactcagaagaccagtgtccccccacaggaaccagtgagcattatagtgccaattatttacgacatggcatccggaaccacgcaacaggccgacatcccaaggcaacagaactcatccgtcgccgctcccatgatggtgtccaatatactcaagcggttcgcagagatgaatccgcctaggcagggcgagtgcaccatcttcgcagcagtgcgtgacttgatggccaaccttaccctgcctcccggcggtcgcccctag

SEQ ID NO: 123612 - DNA, 468 bp, synthetic construct
  misc_feature 1..468: note = Description of Artificial Sequence: Synthetic coding sequence
  source 1..468: mol_type = other DNA
gtggcggggccacctttcaaagcgaacacattgattgcgttcacgaagcttcttggggcccccacccatattctccgggattgtgtacacatcatgaagctggagcttttcccagaccaggcaacccagctcaaatggaacgtccagttctgccttactatacctccaagcgcacccccaatcgccccacccggaactcctgccgttgtgttaaagtcaaaaatgctgttttttctgcagctcacacagaaaacatccgtaccaccccaggagcccgtgtctattatagtaccaatcatttacgatatggcgtccggtacgacccagcaggcagatatacctaggcagcagaattcatctgtcgcagcccccatgatggtgagcaatattctgaaacgcttcgcggaaatgaaccccccgcgacagggctcaatcaagggcaccggatgcccgagtgatttcctctag

SEQ ID NO: 123613 - DNA, 996 bp, synthetic construct
  misc_feature 1..996: note = Description of Artificial Sequence: Synthetic coding sequence
  source 1..996: mol_type = other DNA
ccctcaggtcgggccggtaattggccgggatccccacaggtgagcggccccagtccagccgcccgtatgccgggtatgtccccagccaacccaagtctgcactcccccgtccccgacgctagccactctcctcgggccgggacaagctcacagacaatgccaaccaatatgccacctccccggaaactccctcagaggagctgggcagcgtcaatacccacaatcttgacacacagcgcattgaacattctcctcctgccttcgccaacccccggccttgtgccagggctggccggaagctatctgtgcagccccctggaacgtttcctgggctccgtgatcatgaggcgacatctccagcggatcatccagcaagagacactccagctgatcaattccaatgagcccggggtaatcatgtttaagactgatgccctcaagtgccgcgtggccctgagcccaaaaaccaaccaaactctgcagctgaaagtgactccagagaacgccggacagtggaaaccagatgaactgcaggtcctagaaaaattcttcgaaacacgagtggccggccccccctttaaggcaaatacgctgatcgcctttaccaagttactcggggcgccaacccatatactgcgtgattgcgtgcacatcatgaaactcgaactcttcccagaccaggccacgcaactgaaatggaacgtgcagttttgccttactatccctccatccgcccctccgatcgctcctccagggacccccgctgttgtgctaaagagcaagatgctgttttttctgcagttgacccagaaaacctccgtaccccctcaagagcctgtcagtattatcgtccctatcatctatgacatggcctccggaactacccagcaggcagacattccccggcagcagaactcgtccgtggcagcccctatgatggtcagcaatattctgaagcggttcgccgagatgaatcccccgaggcaggggacatag

SEQ ID NO: 123614 - DNA, 2367 bp, synthetic construct
  misc_feature 1..2367: note = Description of Artificial Sequence: Synthetic coding sequence
  source 1..2367: mol_type = other DNA
atggatgtgagcggtcaggagacagattggagatccaccgcattcaggcaaaagctagtttctcagatcgaggacgcaatgcgcaaggccggcgttgcccacagcaagtcctctaaagacatggagtcacatgtgtttttgaaggccaagacaagagacgagtatttatccctggtcgccaggcttatcatccacttccgcgatatccataataagaaatctcaggcttctgttagtgaccctatgaacgctctacagagcttgaccggggggccagctgcaggcgccgccgggattggaatgccacctcgaggccccgggcagtctcttggtggtatgggttcactaggggcgatgggacaaccaatgtccctttctggtcagccacccccaggaactagtggaatggctcctcattctatggcggtcgtatccaccgcaacccctcagacgcagcttcagttacaacaagtggctctgcaacagcagcagcagcaacaacagtttcagcaacaacagcaggccgcgcttcaacagcagcagcaacagcagcaacagcaacagttccaggctcagcagtctgcgatgcagcagcagttccaagccgttgtacagcagcagcagcagttacaacagcagcagcagcaacaacagcaccttataaaactccaccatcagaatcagcaacagatccagcagcagcaacaacagctgcagaggattgctcaactccagctccagcagcagcagcaacaacagcagcagcagcagcagcagcagcaacaggcactccaagcacaaccacctatccagcaaccgcctatgcagcagccccagccaccccccagccaagcattgccgcagcagctgcagcagatgcaccatacccaacaccaccaacctcctcctcaaccgcagcaacctcccgtcgcacagaaccaaccttcacagttgcccccgcaatctcagactcagcctctcgtgagtcaggctcaagcattgcccggccagatgctgtacactcagcccccccttaaattcgtgcgcgctcccatggtggtccagcaaccaccggtgcagccacaagtgcagcaacagcagaccgcggtgcagactgctcaagccgctcagatggttgcaccgggcgtgcagatgattacagaggcactcgcccagggtggcatgcacatacgagcccggtttccccccacaactgctgtttcagcaataccttctagctccatacctctggggaggcagcctatggcccaggtcagccagtcgtccctgcctatgctcagtagtcctagccctggccagcaggtgcagacccctcagtccatgccaccacccccacagccttccccacagccagggcagcccagctcacagcctaatagtaacgtcagttcagggcccgcgccttccccttcgtcctttctgccctcgcctagtccacagccatcacaatcaccagtgaccgccaggaccccccagaacttctccgtgccctctccggggcctctgaacacaccagtgaacccgtcatctgtcatgtcgcctgctggctctagtcaggccgaggagcagcagtatttggataaactgaaacaactttccaagtatatcgagcccctaagaaggatgatcaacaagattgacaagaacgaagaccggaagaaggatctaagcaagatgaaaagcttactcgacatactgacggaccccagtaagcggtgccccctgaagactctccagaaatgcgaaattgcactagagaagctgaagaatgacatggcggtccccactcctcctcctccccctgtgccccccaccaaacagcagtatctgtgtcagcctctgctcgatgccgtgctcgcaaatattaggtctcctgtgttcaatcactccctgtaccggacattcgtccccgctatgacagcaatccatggccctcccatcacagcgcctgttgtgtgcactcggaaaaggcgactggaggacgatgaaagacagagcatcccttctgtcctccagggggaagtagctaggctggaccccaagtttctggtcaaccttgatcccagccattgctccaacaatgggaccgtacacctgatttgtaaactggatgacaaggatcttcctagtgtgccgcccctcgagctgagcgtgcccgcagactatcctgcacaatcccctttatggattgaccgtcagtggcaatatgatgccaaccctttcttgcagtccgtccacagatgtatgacaagcaggcttttgcagctacctgataaacacagtgtgactgcgttgcttaatacatgggcccagagcgtgcatcaggcctgcctgtctgcggcttag

SEQ ID NO: 123615 - DNA, 2247 bp, synthetic construct
  misc_feature 1..2247: note = Description of Artificial Sequence: Synthetic coding sequence
  source 1..2247: mol_type = other DNA
atggacgttagcggacaggagactgactggcggagcaccgctttccgacagaaactcgttagtcaaattgaggacgccatgcgcaaggccggtgtggctcactccaaaagtagtaaggatatggagtctcacgtctttttgaaggccaagacacgggatgaatatctgtcactggtcgccagactgattatccactttagggatatccacaacaaaaaatcccaggcctccgtgagtgatcctatgaatgccctccagagcctcacgggaggccccgccgctggtgctgccgggattggcatgcccccaagaggccccgggcaaagcttggggggaatggggtccctcggagccatgggccagcctatgtctctgagcggacagccccccccagggacgtccggcatggccccccactctatggcagttgtgtccaccgccacaccccagacacaattacagctccagcaagtggccctccagcagcagcagcagcagcagcagtttcagcagcagcaacaagccgcgttacaacaacaacagcaacagcagcagcagcagcaattccaggcacagcagagtgcgatgcaacagcaattccaggccgtggtgcaacagcagcagcagcttcagcagcagcagcaacagcagcagcatttaatcaaattgcaccaccagaatcagcagcagattcagcagcagcagcaacagctccaaaggattgcacaactgcagttacaacagcagcaacagcagcagcaacaacaacaacagcaacaacagcaggctctgcaggcccagcccccaatccagcagccccccatgcagcagccgcagccaccccccagccaagctctcccgcagcaactccagcagatgcaccacactcagcaccatcagccccccccccagcctcagcagcctcctgttgctcagaaccaacccagccagctccctccacagtcgcagactcaacccttggtttctcaggctcaagccctccctgggcaaatgttgtatacacagcccccactcaaatttgtgcgagctcctatggtggtccaacagcctcccgtgcagccccaggtgcagcagcagcaaacagcagttcagacagctcaggctgcgcaaatggttgcacccggagtccaggtctcccagtcaagcctaccaatgttaagttcaccgagcccagggcaacaggttcaaaccccacaatccatgccgccacctccccagccctcgcctcaacccggtcagcccagctcccagccaaactcaaacgtgtcatccgggccagccccctccccctcttctttcctgcccagcccctcccctcaaccttctcagtccccagtgacggctcgtactccgcagaacttttccgtgccttcgcctggacctttgaatacccctgtcaacccatctagcgtgatgtcccctgcagggagcagccaagccgaggagcaacagtacctcgataaactgaaacagctcagtaaatacatagaaccactgcggcgtatgataaataagattgacaagaatgaagatcgcaagaaagacctctctaagatgaagagtctcctggatatcctcaccgatccaagtaagagatgtccgttgaagactctgcaaaagtgcgagattgccctagagaagctcaaaaatgacatggccgtgcctacccccccaccgcccccagtgccaccaaccaagcaacagtacctgtgtcagccgctacttgatgcggtgctggccaacattagatcaccagtattcaaccatagtttgtaccgcaccttcgttccagcaatgacggctatccacgggccccctatcacagctccagtggtgtgcacccgcaagaggcgcctggaagatgacgaaaggcaaagcataccttcagtgcttcagggagaagtggcaagattggatcctaagttccttgtaaacctagacccttcacactgttccaataatggtacagtgcatttgatttgcaaactggatgacaaagaccttccaagtgtaccgcccctggagctcagtgtgcccgctgattaccctgctcagagcccgctgtggattgataggcagtggcaatatgacgcaaatcctttcctgcaatcagtgcaccggtgcatgacctcgcgtctcttacagctgcccgacaaacacagcgttaccgccctcctgaacacatgggcccagtccgtgcatcaagcatgtttgagtgctgcatag

SEQ ID NO: 123616 - DNA, 2034 bp, synthetic construct
  misc_feature 1..2034: note = Description of Artificial Sequence: Synthetic coding sequence
  source 1..2034: mol_type = other DNA
atggacgtctcgggccaggaaactgactggcgctccaccgcttttaggcagaaattagtatctcaaattgaggatgccatgaggaaggccggggtggcacactccaagtcttctaaggatatggagagccacgtctttttgaaggcaaagaccagggacgaatacctttctctcgttgcccgcctgatcattcactttcgggacattcacaataagaaatctcaagcaagcgtgtccgcccaactccaacttcaacaggtagcgctccagcaacaacaacagcaacaacagttccaacaacagcaacaagccgccctccagcagcaacagcagcagcagcagcagcaacaattccaagcccagcagtccgctatgcaacagcaatttcaggccgttgtccaacagcagcagcaactgcaacaacagcagcagcagcaacagcatttgattaagctgcaccaccaaaatcagcagcagattcagcagcagcagcaacaactgcagcgaattgcccagctgcagttacagcaacagcagcagcagcaacagcagcagcaacaacaacagcagcaagcgttacaggcacaaccgccgatacagcaaccgcctatgcagcaaccacagccacccccgtcgcaggcactgccccagcagctgcagcagatgcaccatactcagcatcaccagcctccccctcagcctcagcagcccccagtagcccaaaatcagccttctcagctaccaccgcaaagccagacgcaaccactagttagccaggcccaggctctgcccggccagatgctgtacacccagccacccctgaaattcgtcagagccccgatggtggttcagcagccgccagtgcagccccaggtccagcaacagcagactgcggttcagaccgcccaagccgcacagatggtggcgccaggtgtccaagtctctcagtcttctctcccaatgctcagttccccttctcccgggcagcaggtgcagacccctcagtcgatgcctccacctccacagccctctcctcagccaggccagccatcctcccaaccaaatagtaatgttagctcagggcctgccccctctccttcgtccttcctgccctctccatcccctcagccctctcagagtccagtaaccgctcgcacccctcagaacttctccgtgccctcccctggccccctgaacaccccagtcaatccatccagtgtaatgagcccagcaggtagctcccaagctgaggagcagcagtacctggataagcttaagcaactcagcaagtatatcgaaccgttgcgcaggatgataaataagatcgataaaaatgaagacagaaaaaaagatttgtctaagatgaagagtctgctggacattctgaccgaccccagtaaacgatgccctctcaaaacactgcagaaatgcgaaatcgcgctggagaaactgaagaacgatatggcggtgcctacgccaccaccaccacccgttcctcctacaaagcagcaatatctctgccagcctttgttggacgcagtgctggctaatattcgctcacccgtgttcaaccatagtttatatcgaacttttgtgccagctatgaccgcaatccacggtcctcctattaccgcaccagttgtatgcacccggaagagaaggttggaagacgacgagcgccaaagcatcccgtctgtgttgcagggggaagtggcaagactagacccaaaatttctggtaaatctagatccaagtcactgctccaataacggcacagtacacctgatctgcaagcttgatgacaaagacctgcccagcgtcccacccttggagctaagcgtgccggctgattaccccgcccaatctcctctctggatagaccgccagtggcagtacgatgcaaatcctttcctccagagcgtccatcggtgtatgacctctaggctcctccagttgcccgacaaacatagtgttactgctcttctcaatacttgggcccagtccgtacatcaagcatgtctatctgccgcatag

SEQ ID NO: 123617 - DNA, 2169 bp, synthetic construct
  misc_feature 1..2169: note = Description of Artificial Sequence: Synthetic coding sequence
  source 1..2169: mol_type = other DNA
atgaggaaagcaggagtcgctcattctaagtcaagtaaggatatggagtcccacgttttcctgaaagcgaagactagggatgaatacctcagtttggtggctcgactaatcatccattttagagatatccacaacaaaaagagccaggcgtcagtctcggatccaatgaatgcactgcagtcactgactgggggccccgccgcgggcgccgccggaatcggaatgccaccccgtgggcctggccaatcattgggaggcatgggtagcttgggtgccatgggccagcctatgtctcttagcggtcagccacctccaggtactagcgggatggcgccccattctatggccgttgttagcaccgctaccccccagacccagcttcaacttcagcaggttgctctacaacagcagcagcaacagcagcagttccagcaacagcagcaggccgcccttcagcagcaacagcagcaacaacagcagcaacagttccaggctcaacaatctgccatgcagcagcagtttcaggcagtggtgcagcaacagcagcaacttcagcaacagcaacagcagcagcagcaccttatcaagctgcatcatcagaatcagcaacaaattcagcaacagcagcaacagcttcaacggatcgcgcagttgcagttgcagcagcagcaacagcagcaacagcagcaacaacaacagcaacagcaagccctgcaggctcaacccccaattcagcaaccccccatgcaacagccgcagccgcccccgtcccaagcccttccacaacagctccagcaaatgcaccacacacagcaccatcagccccccccacagccccaacagcctcccgtcgcccagaaccagccctcacaacttcctcctcagagccaaacccagccattggtgtcccaagcccaagcactgccagggcagatgctgtacacccaacccccgttgaaattcgtacgcgcacctatggtggtccagcagccaccagtgcaacctcaggtgcagcagcagcagaccgccgtgcagacagcccaggctgctcagatggttgcccccggagtacaggtcagtcagtcatctctccctatgttgtcttcacccagtccgggtcagcaggtccagacgcctcagtccatgccccccccgccacagccctccccacaacctggacagccatcctcacaaccaaactctaacgtctcgtccgggccagcccctagtccgtcatctttcctcccttctccctcccctcagccttcacagagccctgtcaccgctcgtactccccaaaacttttccgtcccctctccagggccccttaatacccccgttaacccttcttctgtgatgtcccccgcaggtagtagccaggcagaggagcagcagtacctggataagcttaagcagctgtccaaatatattgaacctctgaggcgaatgattaataagatcgataaaaatgaggataggaagaaagacctgtcgaaaatgaaatctctacttgacatcctgacggacccttctaagcggtgtccactgaaaactcttcagaagtgcgagattgctttagaaaagctgaagaatgatatggctgtccccacgcctcctccgccccccgttcccccaacaaagcagcagtatctgtgtcagcccttacttgatgctgtcttggcaaacatacggtctccggtgttcaatcacagcctatatcgtacatttgtgccagcaatgaccgcaattcacggtccgcctatcacagcgcccgtcgtatgtactagaaaaagaagacttgaagacgacgagcggcagtcgattccttctgttttgcagggtgaggtcgcacgcctggatccgaagtttttggtcaatctggatccaagtcattgttctaataacggtacggtgcacttgatctgcaaattggatgataaagatctcccatcagtacccccactggagctgtctgttcccgcagattatccagcccagtctcccctgtggatcgacagacagtggcaatatgatgctaacccttttctgcagtcagttcaccgctgtatgacctctagactgctacagctgccagacaagcactctgtgaccgcattgctcaacacatgggctcagagtgttcatcaggcctgtctcagcgcagcctag

SEQ ID NO: 123618 - DNA, 1914 bp, synthetic construct
  misc_feature 1..1914: note = Description of Artificial Sequence: Synthetic coding sequence
  source 1..1914: mol_type = other DNA
atggagtcacacgtgttcctgaaagcaaaaacaagagacgagtacctgtctttggtcgcccgacttattatacactttcgcgacatccacaacaagaagtcccaagctagcgtttcagcccaattgcaacttcaacaagtcgccctgcagcaacaacaacagcagcagcagttccagcaacagcagcaggccgccctgcagcaacaacagcagcagcagcagcagcagcaatttcaggcacagcagagtgccatgcagcagcagtttcaggccgtggttcaacaacaacagcagcttcagcagcagcagcaacaacagcagcacctgatcaaactccaccaccagaatcaacagcagattcagcagcagcaacagcagctccagagaattgctcaattgcagctacaacaacaacagcagcaacagcagcagcagcagcagcaacaacagcaagcattgcaagcccagcccccaatccagcaacctccaatgcagcagccccagccacctccctcccaggcgctgcctcagcagctgcagcagatgcaccacacccagcatcatcagccgccaccccagccacagcagcctcctgtggcacagaaccagccttcccagctccctcctcagtctcagacgcagccactggtgtcccaggctcaggccttgcccgggcagatgctgtacacccagccccccctaaagtttgtgagagctccgatggtggtgcaacagccccccgttcaacctcaggtgcagcagcagcaaacagctgtacagacggcccaggctgcccagatggttgcccccggtgtccaggtgtctcagtctagcctgcccatgttatcctcccccagccccggacaacaagtgcaaaccccacagagcatgcctcctccgccccagccctccccccaacctggacagcccagctctcagcctaattcaaatgtgagcagcgggcccgcacctagccccagtagtttcctgcctagccccagcccccaaccatctcaaagcccagtgactgctcggacaccgcagaacttcagtgtaccttcaccgggccccctgaatacacctgtcaaccccagctcagtgatgtctcctgctgggagttctcaagctgaggagcagcagtacctggacaagttgaagcagctatctaagtatattgagcctttgaggcgaatgatcaacaagatcgacaaaaacgaagaccggaagaaggatttatctaaaatgaagtccctgttggatattctgacagacccctccaagaggtgccccttgaagactctgcagaagtgcgagatcgctctcgagaagctgaagaacgatatggcggttccaaccccccccccccctcctgtccctcctacaaagcaacagtacctgtgccaacctcttctcgacgcggttttagcaaacatccggtcaccagtgttcaatcattccctttaccgtacttttgttccagcaatgaccgccattcacggcccccccataaccgcacccgtggtgtgtacaaggaaacggagactggaagacgacgaacggcagagtattccaagtgtgctgcagggagaagttgcaaggctggacccgaaatttttagttaatcttgacccatcccattgcagtaacaatgggaccgtccacctcatctgcaaactggatgataaggacttgccctccgttccacctttagaactttccgttccagcagattatccagcccagagtcctctgtggatcgaccgtcagtggcaatatgacgccaacccatttctgcaatcagtgcataggtgtatgacatcaaggctcctccagttaccagataagcacagcgttactgccttgctgaacacatgggctcaatctgtgcaccaggcctgtctgtcggcagcctag

SEQ ID NO: 123619 - DNA, 2169 bp, synthetic construct
  misc_feature 1..2169: note = Description of Artificial Sequence: Synthetic coding sequence
  source 1..2169: mol_type = other DNA
atgcgaaaagctggggtcgcccatagcaaatcttccaaagatatggagtctcacgtcttcctgaaggctaagaccagggatgagtatctcagcctggttgcccggcttattatccactttagagatattcacaacaaaaagtcacaggcatccgtctctgaccccatgaatgctctccagagcctgaccgggggccccgccgccggcgcagcaggcatagggatgcctcccaggggccctggccagtccctgggtggcatgggcagcctgggcgccatggggcaacctatgtctttgagcggccagcccccacccggaacaagcggtatggccccacactcaatggccgtagtgagcacggctaccccccagactcaactgcagctgcagcaagtggccctgcagcaacaacagcagcagcagcagtttcagcagcaacagcaggccgctttacagcaacagcaacagcagcagcaacagcagcagttccaagcccagcaatccgccatgcagcaacagttccaggcagtcgtacagcagcagcaacagcttcaacagcagcagcagcagcagcaacatctgataaaattgcaccaccagaaccagcaacaaatccaacaacaacagcagcaactgcagcggatcgcacagttgcagctccaacagcagcagcagcagcagcagcagcagcagcagcagcaacagcaagctttgcaggcccagccaccgattcagcagcctcctatgcagcagcctcaaccaccaccatcacaggcccttcctcaacaattgcaacagatgcatcacacccaacaccaccaaccccctccgcagccccagcagcctcctgtcgcacagaaccaaccgtcacagctgcctcctcagagccagacccagcctttggtgtctcaggctcaggctctacccgggcagatgctttacacccaacccccactgaaattcgtgagagctccgatggtggtacagcagcccccggttcagcctcaagtacagcagcagcagacagccgttcagaccgctcaggccgcccagatggtggccccgggtgttcaggtcagtcagtcttccctccctatgctcagctctccctcgcccggccagcaggtgcagacaccccagtccatgcctcctccccctcagccatcgccccagcccggtcagccaagcagccagcctaattctaacgtctcctctggacctgctccttcccctagtagttttctaccaagtccttcaccccagccttcacagtcgcctgtcacggccagaacaccccagaacttttccgttccatcccccggacccctgaacacgcccgtgaaccctagttccgtaatgtctcccgccggctcgagtcaagctgaagagcagcagtacttggataagctcaaacagctcagcaaatatatcgaacctctgcgaagaatgattaacaaaatagataaaaacgaagaccgcaaaaaagacttgtctaaaatgaagtcactgctggatattctcactgacccaagtaagcgatgtccacttaagacactccagaagtgtgagatcgcattagaaaagctgaaaaatgatatggctgtgccgacccctcctccgccaccagtccctcctaccaagcaacagtacctgtgtcagccgcttctcgatgccgtgttggcaaacatcaggtctcctgtgtttaaccacagcctctaccgcactttcgtgcctgccatgacagctatccacggcccccctataactgcccctgtggtgtgcacaagaaaacgacgcctggaagatgacgagcggcaaagcatcccgtcagtcctgcagggcgaggtcgcccgtttggaccccaaatttctggtaaatctggacccatctcattgcagtaacaacggaaccgtgcaccttatctgtaaactcgatgacaaggacctcccatctgttcctccattggaactcagcgtccctgctgactatcccgcccaaagtccgctgtggatagacagacaatggcagtacgatgccaatccctttctgcagagcgtccatagatgcatgaccagcaggctcctgcaactccctgataaacactcagtgacagcattactcaatacgtgggcgcagagcgtccaccaagcttgcctttctgcagcctag

SEQ ID NO: 123620 - DNA, 2157 bp, synthetic construct
  misc_feature 1..2157: note = Description of Artificial Sequence: Synthetic coding sequence
  source 1..2157: mol_type = other DNA
atgcgcaaagcaggagttgcccattccaagagtagcaaagacatggagagtcacgtgttcttaaaggcaaagaccagggacgaatatttgagcttagtggcacggctgatcatacattttagggatatccataacaaaaagtcccaggcttctgtgtctgaccctatgaatgccttacaaagcctgacaggagggcctgctgccggcgctgccggaataggtatgccacccaggggccctggacagtcccttggtggtatgggatcgttaggcgccatgggtcagcccatgtcgctgtccggccagcctcctccgggcactagcgggatggctccacactctatggctgtggtctccacagctactcctcaaacccaacttcagctgcagcaggtagctctgcagcagcagcagcagcaacagcagttccaacaacagcagcaggcagctctgcagcaacagcagcagcaacaacagcagcaacagtttcaggctcagcagtccgctatgcagcagcagttccaggcagtggtgcagcagcagcagcagctccagcagcagcagcagcagcagcagcacctcattaagctccatcaccagaaccagcagcagcagcagcagcaagccctacaggcacaacccccaattcaacagcctcccatgcaacagccccagccacctccatctcaggccctaccgcagcaactgcaacagatgcaccacacacaacaccaccagcctcctccccagccccagcaaccacccgtggcgcagaaccagcccagccagctgccaccccagagccaaacccagcccctggtgtctcaggcacaagccctccctggacagatgttatatacgcaaccaccactgaaattcgtgagagcccctatggtcgttcagcagccacctgtccagcctcaagtccagcaacagcagacagccgtccagactgcccaggcggcccagatggtagctccgggcgtccagatgatcacggaagcactagctcagggaggcatgcacattcgagctagattcccccccaccacagctgtctccgcaattccttcttcaagtataccattgggcaggcagcccatggcacaacaggtgcagactcctcaatctatgcctcccccccctcagccctccccccagcctggtcaaccttctagccagcctaattcaaacgtctcctccgggcctgctccatcaccctcatcctttttgcccagccccagcccacagccatcacagtcaccagtcaccgccagaacaccccagaatttcagcgttccatcccccggaccgctgaatacacctgtgaatccttcttctgtgatgagtcccgctgggtcatctcaggccgaagaacaacagtatcttgataaactaaagcagcttagcaagtacattgagcccctacgccgaatgatcaataagatagataaaaatgaggacagaaagaaggatctgagtaagatgaagagtctgttggatatcctaactgatccaagcaaaaggtgtccccttaaaacactgcaaaaatgtgaaatagctctggaaaagttgaaaaatgatatggccgtgccaacacctcccccccctcccgtcccaccaacaaaacaacagtacctgtgtcagcccttgctggacgccgtacttgccaacatccgttctcccgtgtttaatcactcgctctaccgcacgtttgtccccgccatgaccgcgatccatggcccacccatcacagctcccgtggtgtgcaccaggaagcgtagactcgaggatgacgaacgtcaaagcatcccctccgtactgcaaggcgaggttgcccgcctcgaccccaagttcctggtaaatctggacccaagtcactgcagcaacaatgggacggttcatctaatttgcaaactggatgataaggacctgccatccgtcccccccttggagttatcagtacctgccgattaccctgctcagagccctttgtggatagataggcagtggcagtacgatgctaacccatttttacagtctgtgcacaggtgcatgacaagccgccttcttcagctgcctgacaaacacagcgtgacagccctcttgaacacctgggcccagtctgtgcaccaggcatgtctgtctgccgcttag

SEQ ID NO: 123621 - DNA, 570 bp, synthetic construct
  misc_feature 1..570: note = Description of Artificial Sequence: Synthetic coding sequence
  source 1..570: mol_type = other DNA
atgcagcagcagttccaggccgtcgtgcaacagcagcaacaactacagcagcagcagcagcaacagcaacacctcattaagctgcaccatcagaaccaacagcagattcagcagcaacagcagcagcttcagcgaattgctcaacttcagctgcaacagcagcagcaacagcaacagcaacaacagcagcagcaacagcaggcgcttcaagcccaaccacctattcagcagcccccaatgcagcagccccaaccccccccaagtcaagccttaccccagcaactgcagcaaatgcatcacactcagcaccatcagccacctccacagcctcagcagccaccagtcgcacagaaccagccatcccagttgcctccccaaagccagactcaacctcttgtttcccaagcccaggctctgcctggccagatgttgtacacccaacctcccctcaaatttgttagggctcccatggtggttcagcagccacctgtacagcctcaagtgcaacagcagcagactgcggtacagaccgcccaggctgctcagatggtggcaccgggagtgcagtag

SEQ ID NO: 123622 - DNA, 1956 bp, synthetic construct
  misc_feature 1..1956: note = Description of Artificial Sequence: Synthetic coding sequence
  source 1..1956: mol_type = other DNA
atgagcggggttagagcagtgcgcataagtatcgagtccgcatgtgagaaacaagtacatgaggttggactggacggcaccgagacctatctgccaccgctcagtatgtcacagaacctggcacgactagctcagcggatcgatttttcccagggcagcgggtctgaggaagaagaagccgccggcactgagggcgacgcccaggagtggcctggcgcgggcagctcagctgaccaggacgatgaagagggcgtggtaaaatttcagccttccttgtggccatgggatagcgttcggaacaatttgcgcagcgcactgaccgagatgtgtgtgctgtatgacgtgctgagtatagtccgtgataaaaaatttatgactttagaccccgtatctcaggatgctctgccaccgaaacagaatccacagacccttcagttgatctcgaagaagaaaagtctggcgggcgcggcacagatattgctgaaaggagctgagagactgactaagagtgttacagaaaatcaggagaataaactgcagcgggacttcaattccgaactcctgcggctgcgacagcactggaaactgcggaaagtaggtgataaaattctgggggatctctcctaccggtcagcagggtccttgtttccccaccatgggaccttcgaagtgatcaagaacacagacttggatcttgataagaagatcccagaggactattgtccccttgacgtacaaatcccctctgacctcgaagggagcgcgtatatcaaagttagcattcagaagcaggctccagacattggtgacctgggaacagtaaatctgtttaaaaggcctttgcctaagagcaagccaggttccccccattggcagacaaagttggaagcagcacaaaatgttttgctatgtaaggagatcttcgcccagctcagtcgcgaggcggtccagatcaagtcacaagtcccgcatattgtagtgaaaaaccagatcatttcacaacctttcccttctcttcagctgagtatctcactgtgccatagcagcaacgataagaaatctcagaaatttgcgaccgaaaagcaatgccccgaggaccatctttatgtgttggaacataacctgcacctcctcataagagagtttcacaagcagacattatcgagcatcatgatgcctcaccctgcctccgctccctttggtcataagagaatgcggttgtccggcccacaggccttcgataaaaatgaaattaacagcctccaatcaagcgaaggccttttagagaagatcataaagcaggctaaacacatattcctccggagccgtgccgccgccactatcgactctctggcgagcaggattgaagatccacaaatccaagcccactggagtaacattaacgatgtgtacgaaagtagcgtaaaggtcttgataactagccagggctatgaacagatatgcaaatccatccaactgcagctcaatattggggtggagcagatccgcgtggttcaccgggacggcagggtgattaccctgagctatcaagagcaggagcttcaggacttcctgctgagccagatgtctcagcatcaggtgcatgccgtccaacaacttgccaaggtcatgggctggcaagtcttatcctttagtaaccatgttggactgggcccaattgagtctatagggaacgctagtgcgattactgtagcttctccctctggcgattatgctattagcgtccgaaatgggccagaatcgggaagcaaaattatggtgcagttcccacggaatcagtgcaaagacctgccaaaatcagacgtattgcaagacaacaaatggtcccatttaagagggcccttcaaggaagtgcagtggaataagatggagggtagaaattttgtctataagatggagttactcatgtcagccttgtctccatgcctcttgtag

SEQ ID NO: 123623 - DNA, 1866 bp, synthetic construct
  misc_feature 1..1866: note = Description of Artificial Sequence: Synthetic coding sequence
  source 1..1866: mol_type = other DNA
atgtccggcgtccgggcagtgagaatcagcattgagagcgcctgtgagaagcaggtccatgaggtcggactggacgggaccgagacttatctccctcccttatcaatgtcacaggaatggccgggtgccggcagctctgctgaccaggacgacgaggaaggagtagtgaaatttcagccctccctgtggccatgggattcagtaagaaataatctgcggtccgccctgacggagatgtgtgtgctttatgatgtcctctcaatcgttcgcgataaaaagttcatgactcttgacccagtgagccaggacgctttgcccccaaagcagaacccccagacccttcaactgatctccaaaaagaaatccctcgctggggcggcgcagatactcctgaaaggcgctgagaggctgacaaagtccgtaactgaaaaccaggaaaataagctccagagagacttcaatagcgaactgttaaggcttagacaacactggaaattgcgaaaggttggagataaaatcctgggcgacctgtcataccgtagcgcaggatccttgtttccacaccatggtactttcgaagttataaagaatacagatttagaccttgacaaaaaaatccccgaggactattgccccctagatgtccaaattccttctgacctcgagggatctgcttatatcaaggtcagcatccagaagcaggctccggacatcggtgatctgggaaccgtgaatctgtttaagcggccgctgccaaagagcaagccaggctcgccacactggcagacaaagcttgaagcagcacagaacgtgttgctttgtaaagagattttcgctcagcttagcagggaagcggtgcagatcaagtcccaagtacctcatatcgtggtgaagaaccagatcatctcccaaccttttccgagtctccagttgtctatatctctatgtcacagtagcaatgacaagaagtcacaaaagtttgcaaccgagaagcaatgccctgaggaccatctgtacgttcttgagcacaatctgcacctgctcatcagagagttccacaaacagactctgtctagcatcatgatgcctcacccagcatccgcacctttcgggcacaaacgcatgaggttgagcgggccacaggcatttgacaagaacgaaataaattcgctgcagagcagtgaaggcttgctagagaagatcataaaacaagcaaagcacatattcctgcggtcccgtgctgcggccactattgactcattggccagccgaatcgaagatcctcagatccaggcccattggtcgaacataaatgatgtgtacgaatcttccgttaaagtcctcatcacgagccagggctacgagcagatttgtaagtccattcagttgcagctgaatatcggcgtcgaacaaatcagggttgtgcatagagatggtagggtcattactttatcctatcaagagcaagaactgcaggactttctcttgtcccagatgtcacagcatcaagtgcacgcagtgcagcaactcgctaaagtgatggggtggcaggttctttcgttcagtaatcacgtgggactaggcccgatcgaatccatcgggaacgcttcagcgatcaccgttgcgagcccctcgggggattacgctatctcagtgaggaacggccccgagagtggttcaaaaatcatggtgcagttcccgcgcaatcagtgcaaagatcttcctaagtctgatgtgttgcaggacaacaagtggtcccatctgcgggggcctttcaaggaggtgcagtggaataagatggagggcagaaacttcgtgtataagatggaattgctgatgtcagcattgtccccctgccttctctag

SEQ ID NO: 123624 - DNA, 438 bp, synthetic construct
  misc_feature 1..438: note = Description of Artificial Sequence: Synthetic coding sequence
  source 1..438: mol_type = other DNA
atgagcggagtccgcgccgtccgcattagcattgaatccgcctgcgagaagcaagttcatgaagtggggctggatggtaccgagacctaccttcctcccttgtctatgtctcagaatctagccaggctcgcacaacgtattgacttcagccagggatccggaagcgaggaggaggaagctgcgggcaccgaaggcgacgcacaagaatggccgggagccggatcctccgccgaccaagacgatgaggagggggtggtgaagttccaaccatcactctggccttgggacagcgtacgcaacaacctccgatcagccttaaccgagatgtgtgtactgtacgacgttctgtctatcgtgagggataagaagtttatgaccctcgaccctgtttcacaagatgcactcccaccgaagcaggtctttgtcgactttaactag

SEQ ID NO: 123625 - DNA, 627 bp, synthetic construct
  misc_feature 1..627: note = Description of Artificial Sequence: Synthetic coding sequence
  source 1..627: mol_type = other DNA
atggaagctccccctgttaccatgatgccagtgaccggcggcacaatcaacatgatggagtacctgctccagggaagcgttttggaccattctcttgagagcctgatccatcgactcagaggactgtgcgataatatggaaccagagacttttctggaccatgaaatggtgtttctgctgaagggacaacaagcatcaccatttgtactgagggctagaaggagcatggatcgtgcaggggctccctggcacctacggtacctggggcagcccgaaatgggagataagaatagacacgcccttgtgcgaaattgtgtggacattgcaacatctgagaatctcaccgatttccttatggagatgggctttcggatggatcatgagttcgtcgctaaagggcatctgttcaggaagggcatcatgaagatcatggtgtacaaaatctttcgaatcctggtgcccggcaatacagattccaccgaggcgttgtcactttcctacctagtggaattgtccgtggtagcaccagcgggccaggatatggtgtcagacgatatgaaaaactttgcggagcagcttaaacccttggtgcatcttgaaaaaattgacccaaaaaggctgatgtag

SEQ ID NO: 123626 - DNA, 627 bp, synthetic construct
  misc_feature 1..627: note = Description of Artificial Sequence: Synthetic coding sequence
  source 1..627: mol_type = other DNA
atggaggctccgccagtcacaatgatgcccgtgaccgggggcacgattaacatgatggaatacctcttgcaaggaagcgtcctggaccacagtcttgaatcactgatccatagacttcgtggcctctgtgacaacatggagcccgagacatttcttgaccacgagatggtgtttctcctgaaaggccagcaagcctctccattcgtactaagagctagacgttcgatggaccgggctggcgcgccatggcacttaagatacctgggtcagcctgaaatgggcgataaaaatcgacacgcactggtccgaaactgtgtcgatattgccacaagcgagaacctcaccgattttctcatggaaatgggatttagaatggatcacgagtttgtggctaaaggccatctattcaggaaaggcataatgaagatcatggtgtacaagatcttccggatcttagtgcccgggaacacggacagcaccgaagctctgagcctgtcctacctggtggaattgtctgtcgtcgctccagctggacaggatatggtatccgacgatatgaagaactttgccgaacaattgaagcccctggtccatttggagaaaattgatccaaagagactgatgtag

SEQ ID NO: 123627 - DNA, 585 bp, synthetic construct
  misc_feature 1..585: note = Description of Artificial Sequence: Synthetic coding sequence
  source 1..585: mol_type = other DNA
atggagaacttcaccgctcttttcggcgctcaggccgatcctccacctccacctactgccctggggtttggccctgggaagccccccccacccccccccccacccgcaggaggcgggccgggtactgcccccccacccacagcagcaaccgcccctcccggcgccgataaatccggcgccggatgcggccccttctaccttatgcgtgagttaccgggatctactgaactgaccggctctactaatctgataacacattataatcttgaacaggcctacaacaagttctgtgggaagaaagtgaaagaaaaactaagtaactttctgcccgatctgccgggaatgatcgacctgccaggatcacatgataattctagcctccggtccctgatagaaaagccgcccattctgtcttcttcttttaatcctataacaggcaccatgctggccgggtttcggctgcataccggtcccctgccagagcagtgccggctgatgcatattcaacctcccaagaaaaagaacaaacacaagcataaacagagcagaacacaggaccccgttcctcccgggaagccaagctag

SEQ ID NO: 123628 - DNA, 735 bp, synthetic construct
  misc_feature 1..735: note = Description of Artificial Sequence: Synthetic coding sequence
  source 1..735: mol_type = other DNA
atggagaatttcacggccctgttcggcgcgcaggcagaccccccaccccctcctactgccttaggtttcgggcctggcaaacctccaccaccgccccccccacccgctggcggtgggccaggcacagcgcctccacctactgccgccacggccccaccgggtgcagacaagtctggagctgggtgtggccccttctacctaatgagagagctgcccggtagtacagagctaaccggttcaaccaatctgatcacacattacaacctagaacaggcttataacaagttttgtggaaagaaagtgaaagagaagcttagtaacttcttgcctgatctgcccggcatgattgatttacctggctctcacgataattcttccctaaggtctctaatagagaagccgccaattctttcatcaagtttcaaccctattactggaactatgctcgctggatttagactacacaccggaccactcccggagcagtgcaggttaatgcatatacagcccccgaaaaagaaaaacaaacacaagcacaaacagagcagaacgcaagatccagtgcctccagaaacaccctctgattcagaccataagaaaaaaaaaaagaaaaaggaggaggaccccgagaggaaaagaaaaaaaaaggaaaagaaaaaaaagaagaaccggcactccccagaccatcctgggatgggaagtagtcaggcatcatccagctctagcctgcggtag

SEQ ID NO: 123629 - DNA, 639 bp, synthetic construct
  misc_feature 1..639: note = Description of Artificial Sequence: Synthetic coding sequence
  source 1..639: mol_type = other DNA
atgggagtgacatgtgtgagccagatgcctgtggctgaaggcaagagcgtccagcagacagttgagcttctgactcggaaactggagatgttaggagccgagaaacaaggcactttttgtgtggactgtgagacctatcatacggccgcctctacccttgggtctcaaggacagaccgggaaattgatgtatgttatgcacaactctgaatacccactctcctgctttgccttgttcgagaacggtccatgcctgatagcagacactaactttgacgtccttatggtgaaactgaagggcttttttcagtccgccaaggcttcgaagattgaaacaagggggacgcgataccaatactgtgactttttagtcaaggtggggacggtcaccatggggccaagtgcccgcggcattagcgtagaagtggagtacggtccatgcgtggtggcctccgactgttggtccttgctcctggagttccttcagtcattcttagggagccacacccccggtgcccctgctgtgttcgggaatcgccacgacgctgtttacggcccagcggatacgatggtgcagtacatggagctgttcaacaagattcggaagcaacagcaggtgcctgttgctggaatcagatag

SEQ ID NO: 123630 - DNA, 423 bp, synthetic construct
  misc_feature 1..423: note = Description of Artificial Sequence: Synthetic coding sequence
  source 1..423: mol_type = other DNA
atgcccgtagccgagggcaagagcgtgcaacagaccgtcgagttactgactcgcaaactcgagatgctcggcgcagagaagcagggaacattttgcgttgactgcgaaacctatcacactgcagcctcaacactggggtcccagggccagacaggcaaactgatgtacgtgatgcataatagtgagtatccgctgtcttgctttgccttgtttgagaatggtccttgcctgatcgcagacactaacttcgatgtgctcatggttaaattaaaagggttttttcagtccgccaaagccagtaaaattgagacacgggggactcgataccaatactgtgacttcctggtcaaggtggggacggtcacgatggggccctccgcacgcgggatatccgtggaagtagagtacggcccctgtgtatag

SEQ ID NO: 123631 - DNA, 438 bp, synthetic construct
  misc_feature 1..438: note = Description of Artificial Sequence: Synthetic coding sequence
  source 1..438: mol_type = other DNA
atgggtgtgacatgcgtgtctcagatgcctgtggctgagggcaagagcgtgcaacagacggtagaactcctaacaagaaagctggaaatgttaggcgcagaaaaacaaggcaccttttgtgtcgactgtgaaacctaccacacagcagctagtaccctaggaagccagggtcaaaccgggaagctgatgtatgtaatgcataattcagaatatcccctgagctgtttcgccctttttgagaatggcccctgtctcatcgcagacaccaactttgacgtactgatggtgaagctgaaaggtttttttcagtcagcgaaggcgtccaagattgagacaaggggtactaggtaccaatattgtgacttccttgtcaaggttggcactgtaaccatggggccctcagcacggggcatttccgtggaggtacgaccctggtag

SEQ ID NO: 123632 - DNA, 372 bp, synthetic construct
  misc_feature 1..372: note = Description of Artificial Sequence: Synthetic coding sequence
  source 1..372: mol_type = other DNA
atgggcgtgacgtgtgtaagtcagatgcctgttgccgaggggaagtcagtccagcagaccgtggaactcctcactaggaagctcgagatgctgggtgcagagaagcaggggactttttgcgtcgattgtgaaacatatcataccgctgcaagcaccctgggatctcaagggcagacgggtaaactgatgtacgtgatgcataattcagagtaccccctctcctgttttgcgctgtttgaaaacgggccctgccttatagccgacaccaactttgatgtactgatggtcaagctgaaaggattctttcagtccgctaaagcatccaaaatcgagactagggggactaggtggtcaatggccccagtctggtag

SEQ ID NO: 123633 - DNA, 435 bp, synthetic construct
  misc_feature 1..435: note = Description of Artificial Sequence: Synthetic coding sequence
  source 1..435: mol_type = other DNA
atggctgatagactgacccagctgcaagatgccgtgaactccctcgctgaccagttttgtaatgctattggcgtgttgcagcagtgcggtcccccggcctcgtttaacaacatacaaactgccatcaataaagaccagccggccaacccaaccgaggaatatgcacaattgttcgcggctctgatcgcaagaacggccaaggacatagacgtgctgatcgattcgctgccttctgaagagagtacggccgcgctccaggccgcgagcctatacaagctggaagaagaaaaccacgaagccgctacctgtctggaagatgttgtgtaccgcggggacatgcttctggaaaaaatccagtccgccctggcggatatcgctcagtcccagttgaaaaccaggagcggcacacattctcagtctctcccagacagctag

SEQ ID NO: 123634 - DNA, 4098 bp, synthetic construct
  misc_feature 1..4098: note = Description of Artificial Sequence: Synthetic coding sequence
  source 1..4098: mol_type = other DNA
atggagacacagctgcaatccatctttgaggaagtggtgaagacagaggttatagaagaggcatttcccggcatgtttatggacactcctgaagacgagaagactaagctaataagctgtttgggggccttccgccaattctggggcgggctgagtcaggaatcccatgaacagtgcattcaatggattgtcaaatttattcacggccaacacagccctaagagaatcagcttcctgtacgactgtttggccatggccgtggagaccggtctgctgcctcctcgactagtatgtgagagcctcatcaactctgataccctcgaatgggagagaactcagctctgggcccttacgttcaagctagtgcggaagattatcggaggcgttgattacaaaggagttagggacctactgaaagtcatcctagagaagatcctgaccatccctaatactgtgtcctcagctgtggtgcagcagttgcttgccgctagggaggtcattgcatatatcctggagcgcaacgcctgtttattgccagcctacttcgccgtgactgagatcagaaagctctacccggaggggaaactaccacactggcttctcgggaatttggtcagtgacttcgtggacaccttcagacctactgcacgcattaactccatatgcggcaggtgttccctcctgcccgtagtgaacaacagcggagccatctgcaattcatggaagctagaccctgctaccctgaggttccctcttaagggcctcctgccatatgacaaggacctcttcgagccccaaacggcgctgctgagatacgtcctagagcagccttactcccgggacatggtgtgtaacatgctgggcctaaacaaacagaccctgaacatcgcccagcacaaacagcggtgccctgtgctggaagaccagctggtcgacctggtggtatacgccatggagcggtcagaaacagaggagaagtttgacgatggaggcactagccagctgctgtggcagcacctaagcagtcaactaatattctttgtactgttccagtttgctagttttccccatatggtgctcagccttcatcagaagctcgcgggcagaggactcattaaaggaagagatcacttaatgtgggttctgctccagttcatctccggctccatacaaaaaaacgccctggccgactttctgcccgtgatgaaattattcgatctcctgtacccagagaaagagtatatacccgttcccgacattaacaaacctcagagcacacatgcattcgctatgacgtgcatctggatacacctcaaccggaaagctcagaatgacaattctaaattacagatacccattccacactctctccgcctgcaccacgaatttctgcaacagagcttgcgcaataaaagtttacagatgaatgactacaagattgcccttctgtgtaacgcgtattctaccaactcggagtgctttaccctgcccatgggtgccctggtggagaccatttatgggaatggtatcatgaggatcccgctcccagggacaaactgcatggcatcaggaagtatcactccgctccctatgaacttgcttgattctctgactgtgcatgcgaagatgtcactcatccatagtattgcaacgagggtcattaagcttgcccatgccaagtcaagcgtggccctggccccagcacttgtcgaaacctactcacgactactggtatacatggaaatcgaaagcctcgggatcaagggattcatcagtcagctgctgcctacagtgttcaaatcccatgcctggggaattttgcataccctccttgagatgttttcctaccgaatgcatcatatccagccacactaccgcgtgcaactgctttcccacctccacactctcgccgcagtggcgcagaccaatcagaatcagctgcacctgtgtgtggagtcaacagcactgcgcctgattactgccctcggatctagcgaagtgcagccccagttcacgaggttcctgtctgacccaaagacggtgttgtcagctgaatccgaggaactgaacagagccttaatcctgactctggctcgtgcaacgcacgttacagatttttttactggatcggatagtatccagggtacgtggtgcaaagatatcctccagacaatcatgtctttcactccacataactgggcctcacacacattgtcgtgcttccccgggcccctccaggctttcttcaagcagaataatgttccacaagaaagcagatttaacctgaaaaagaatgttgaggaggaatataggaaatggaagagtatgtccaacgagaatgatattataacccatttctccatgcaaggatcaccccccctgtttctttgcctgttatggaagatgctgctggagacagaccacattaatcagatcggctaccgtgtgcttgagagaattggcgctagagctttggttgcccacgtcagaactttcgcggactttcttgtctatgagttttcaacatctgctgggggacagcagcttaacaagtgtattgagatactgaatgacatggtctggaaatataatatcgtaaccttggacagactcatactttgtttggcgatgcggtcgcatgaaggaaacgaagcccaagtgtgttatttcattattcagcttctattactaaaacctaatgatttccggaacagggtaagcgacttcgttaaggagaattctccggagcattggcttcagaacgattggcatactaagcatatgaattaccacaagaagtacccagagaaactctattttgaaggactggccgagcaggtggatccccctgtgcaaattcagtccccatatctgcccatctacttcgggaatgtgtgccttcgcttccttccagtttttgatattgtgattcacagatttctcgagttattacctgtttctaaaagcctcgagaccctgctggaccatctgggtggactgtacaagtttcatgaccgccctgtcacttatctttacaataccctccactattatgagatgcatctgcgcgaccgggcattcctcaaacgaaaattagtacacgcaattattgggtccctgaaggacaaccgccctcaaggctggtgcctcagtgacacatatttgaaatgcgctatgaacgcgcgggaggagaatccgtgggtgcccgacgatacatactactgcaggctcattggcagactggtagataccatggcaggtaaatcacccggaccatttccaaattgcgactggcggtttaacgaattcccaaaccccgcggctcacgcactccacgtgacctgcgtcgagctcatggcgttggcagtatcgggtaaggaggtcgggaacgccctgttgaacgtggtgctcaaatcccaaccattagtacccagagagaacataacagcctggatgaacgctattggactgatcataactgctctcccagaaccatactggatcgttcttcatgatcgaatcgtttcagttattagctcaccttcactgacctccgagaccgagtgggttggatacccttttcgactctttgatttcacggcctgtcaccagtcttactcggagatgagttgctcttatacgctcgccctggcccatgcagtgtggcaccactccagtataggccagttatcattgatcccaaagtttcttacggaagtgctgctgcctattgtcaagacagagtttcaattactgtacgtgtatcacctcgtcggtccattcctccagcgtttccagcaggagcgcacccgctgcatgatcgaaattggcgtcgccttctacgacatgctgctgaacgtggaccagtgcagtacccatttgaactatatggatcccatctgcgacttcctctaccacatgaaatacatgttcacaggagactctgtgaaagagcaggtagagaaaattatctgtaacctcaaacctgccctcaaactgcgcctgcgattcattactcatatttcaaagatggaacccgccgccgtgcctcctcaggctatgaacagcggttcacccgccccacagtccaaccagtag

SEQ ID NO: 123635 - DNA, 2661 bp, synthetic construct
  misc_feature 1..2661: note = Description of Artificial Sequence: Synthetic coding sequence
  source 1..2661: mol_type = other DNA
atggaaactcaactgcagtcaattttcgaagaggtggtgaaaacagaggtgatcgaagaggcttttccaggcatgttcatggacaccccagaggacgagaaaaccaagctcatttcatgcctgggcgcctttcggcagttttggggcggcctgtcgcaagagagccacgaacaatgtattcaatggatcgtgaaatttatccacggccagcactctcctaaacgcattagtttcctctatgattgcttagcaatggcagtcgagaccggtctgctgccccccaggttggtgtgtgaaagtttaatcaattccgatacgctggaatgggagcggacacagctgtgggcgcttacatttaagctcgtgcggaagatcatcggcggagttgattataaaggcgtacgggatctcctcaaggtcatcctagaaaaaattctcacgattccaaacacagtttcttccgctgttgtgcagcaacttctcgcagccagagaagtgattgcatacatcctagaaaggaacgcttgtctgttgcccgcttatttcgccgtaaccgagataaggaagctttacccagaaggcaaactaccacactggttgctgggaaacttggtgagcgattttgttgataccttcagacctacggctaggataaactcgatctgtggcagatgctccttgcttcctgtggttaacaactctggggctatctgtaactcctggaaactcgatcccgccacccttcgcttccccctcaagggtttgctcccttacgacaaggacctctttgagccccaaaccgccctgctgaggtacgtgctggagcaaccctactctcgcgatatggtatgcaatatgctcgggcttaataagcagactttaaatatagcgcaacacaagcagagatgccctgtgctagaagaccaattagttgacctcgtagtttacgccatggagcggtcagagacggaggagaaatttgacgatggtggcactagtcagctactatggcagcacctttcctctcagttgatattttttgtcctttttcagtttgccagtttccctcacatggtactcagcctccatcagaagctggcggggcgcggcttaattaaaggccgtgaccacctgatgtgggtgcttcttcagtttatctccggctccattcaaaagaacgcactcgcagattttctgcctgttatgaagctgtttgacctgctgtaccccgaaaaagagtacattcctgtgccggacattaacaagccacaaagcacccacgcatttgctatgacatgcatttggatccacctgaacaggaaggcccagaatgataactccaagctccaaataccgattccacattccttgagacttcaccatgagttcttgcaacagagcctgcgcaataaatccctgcagatgaacgactataagattgctctcctgtgtaatgcctattccaccaatagcgagtgcttcacactgcctatgggtgccttggtagaaacaatctacggaaatggcataatgcggatcccgctgcctggaactaactgtatggctagtggctctatcacgccactccctatgaacctgctagacagcctgactgtgcatgccaagatgtccctcatccattcaatcgccacccgtgttatcaagctcgctcacgctaagtcgagcgtggccctggctcctgccctcgtcgagacctactctaggctgctggtttatatggagattgaatccctgggaatcaaagggtttatctctcagctactccctacagtgtttaagtcccatgcatggggaattctgcacacacttctagagatgttttcgtataggatgcaccatatacagcctcattacagagtacaactgctgtcacatctccacaccctggccgctgttgcacaaacgaatcagaaccagctgcatctgtgtgtcgaatctactgccctcagattaatcacagcactgggaagttccgaggtgcagcctcagttcacacggttcctctccgatccaaagactgtcctgagcgccgagtccgaagagctgaatcgggccctgatcctaaccctcgccagagcaacccacgtgaccgactttttcaccggcagcgattcaatccagggtacatggtgtaaggacatactgcaaaccatcatgtcctttacaccgcataactgggcttcacacacattgtcgtgctttccagggccgttacaggctttcttcaaacagaataacgttccacaggagtctcggttcaacctaaaaaaaaatgttgaggaggagtataggaagtggaagagtatgagcaatgaaaatgacataataacacatttcagtatgcaaggcagtcctcccctttttctgtgcctcctctggaaaatgctgctcgaaacggatcatattaaccagatcggatatcgagtgctggagagaatcggtgcgcgcgccctggtcgcccacgtgcgcactttcgctgacttcctcgtctatgagttcagcacgtccgctggaggacaacaactcaataagtgcattgagatactcaatgacatggtctggaagtacaacattgtcacccttgatcgccttatcctgtgtctcgtgcgaatcaataccttcttgagcctcttttcttag

SEQ ID NO: 123636 - DNA, 4125 bp, synthetic construct
  misc_feature 1..4125: note = Description of Artificial Sequence: Synthetic coding sequence
  source 1..4125: mol_type = other DNA
atggagactcagctgcagagcattttcgaggaagtcgtgaagaccgaagtcatcgaggaagccttcccgggcatgttcatggatacccccgaggatgaaaagaccaagttgatttcttgcctcggggctttccgccagttttggggaggcctttcccaagaatcccacgagcaatgtatccagtggatagtcaagttcatccacggtcaacactctcctaagaggattagtttcctttacgattgcctggctatggccgtcgaaaccggactcctaccgccacgcctggtctgtgaatctctcatcaacagcgatactctggagtgggagagaacccaactctgggccctcactttcaaactagtgcggaaaataataggaggcgtcgattacaagggtgtgcgggaccttcttaaggtgatcctggagaaaattctaaccatcccgaatacagtatcatcagctgtggtccaacagctattagccgcccgcgaagtaatcgcgtacatcctggaacgtaacgcctgcctgcttcccgcctattttgccgttaccgagatccgaaagttgtatcccgaagggaaacttccccattggctgttgggtaacctggtgtcagacttcgtagataccttccggcctaccgcgcgcatcaattccatctgcgggcggtgctctctcctgcccgtcgtgaacaatagtggcgcaatctgcaattcctggaagctcgacccagcaacactgcgtttccccctgaaagggcttctcccgtacgacaaggaccttttcgaacctcagacagcgctactgaggtatgttttggaacagccttattcccgagatatggtgtgcaatatgctcggactgaataaacagactctcaacatcgctcaacataagcaaagatgtccagtactagaagatcagttggtagacttggtcgtgtacgccatggaaaggagtgagacagaagagaagtttgatgatggtggtacgagtcagctgctgtggcaacatctctcctcacagctgatcttcttcgtgctcttccaatttgccagctttcctcacatggtgcttagtctgcaccagaagctggccggacggggactgatcaagggcagagatcacttgatgtgggttctccttcaattcataagcggcagcatacaaaaaaatgcactcgctgacttcttgccagtgatgaagctattcgatctgctgtatcccgaaaaggaatacatcccggtgcctgacataaataaaccccaatccactcatgcattcgcaatgacctgcatttggattcacctgaatcgaaaagcccagaacgacaattcgaagcttcagattcccattccccacagtttgaggctgcaccacgagtttcttcagcaaagcctgcgcaacaagtccttgcagatgaacgattataagatagcactgctctgtaacgcgtattccacaaactccgagtgtttcactctgcctatgggagcacttgtggagacgatctacggcaatggcattatgaggatcccgctgcctggcaccaactgcatggcctctggctctatcactccactcccgatgaacctccttgatagcctgaccgtccatgcaaagatgtccctaatccactccatcgcgacgagagtgataaaattagcccacgctaagtcctcggtggccctggctcctgccctcgttgaaacttacagtaggctgcttgtgtacatggagattgaaagtctcggcatcaagggcttcatcagccagctgcttcccaccgtttttaagtcacacgcttggggcatccttcatacactgctcgaaatgttctcctaccggatgcatcacatccagcctcactacagggttcagctactctctcacctgcacaccctggccgctgttgcacaaaccaatcagaatcagctacacttgtgtgttgagtcaaccgcgctacgcctgatcactgctttgggctcttccgaggtgcagccacagttcacacgattcttgagtgaccccaagacggtgttgtcagcagagagtgaggagcttaatcgtgcgctcatcctgaccctagctagagccacgcacgttacagacttttttaccggatctgactccattcagggaacgtggtgtaaagacatactccagacgattatgtcctttaccccacacaactgggcctcccatacactgagttgttttcctggacctctacaggctttcttcaaacagaataacgtgccacaggagtcccggttcaacctgaagaaaaacgtggaggaagaatataggaagtggaaaagcatgagcaacgaaaacgacataatcacccatttttccatgcaaggcagtcctccactcttcctttgtctgctttggaaaatgctgcttgagacggaccacattaatcaaatcggataccgagtactggagaggattggcgcgcgcgccctggtcgcccacgtgcggactttcgccgactttctggtctatgagttctccacttccgcaggaggtcagcaactcaacaagtgcattgagatccttaatgacatggtgtggaagtacaatatcgtgacgctcgaccgcctcattctctgcctggccatgaggtctcacgaaggcaatgaagcccaggtgtgctattttataattcagcttctgcttttgaaaccaaatgacttcaggaaccgcgtatcagacttcgttaaagaaaattctccagagcactggctccagaatgattggcatactaagcacatgaattaccacaagaaatacccggagaaattatacttcgaaggattggctgagcaggtggatccgccagtgcagatccagtccccatacctcccgatttactttggtaacgtttgcctaagatttctgccagtgtttgacatcgtgatccatcgctttctggaactattgccagtgagcaaatctctcgagacacttctagaccatttgggtggcctttataagttccacgaccgaccggtgacctatctgtacaacacactgcattattatgaaatgcatctgagagaccgcgccttcctgaaaaggaagctggtgcacgccatcattggcagccttaaggataacagacctcaaggctggtgtctaagcgacacgtatttgaagtgtgccatgaatgccagggaggagaatccctgggtgcccgacgacacgtactactgtcggctaataggcaggttggtcgacactatggctgggaagagtcctggccccttccccaactgtgactggaggttcaacgaatttcccaaccctgcagctcatgccctgcatgtgacctgtgtggagctgatggcactcgccgtgtcaggtaaagaggtgggcaacgctcttcttaacgtggtgctgaagtcccagcctctcgtccctcgagaaaacatcacggcctggatgaacgccattggcctgatcattacagctttgccagaaccatactggattgtgctgcacgataggatcgtctccgtgatatcttccccaagcttaacgtcagaaacagagtgggtaggttaccctttccggctatttgattttacagcgtgccaccagtcatactctgagatgtcttgtagctatactctcgccctggcccatgccgtttggcaccactcaagtatcggtcagctgagtttgatccccaaatttcttaccgaggtgttactccctattgttaaaactgagtttcagttgttatacgtttaccatttggtaggaccctttctgcagcgatttcaacaggaacgaacacgttgcatgatcgagattggggtcgcgttttacgatatgctcctcaatgtagatcagtgctctacccatttgaactatatggatcccatttgtgacttcctgtaccacatgaaatatatgttcaccggggactcggtgaaggagcaggtgaagaagataatctgcaacctaaagcccgcccttaaactccgactgcggtttattacacacataagtaagatggagcccgcggccgtgcccccacaggctatgaactccgggtcaccagcgcctcagtctaatcaggttcccgtatcattacctgtgactcagtag

SEQ ID NO: 123637 - DNA, 4095 bp, synthetic construct
  misc_feature 1..4095: note = Description of Artificial Sequence: Synthetic coding sequence
  source 1..4095: mol_type = other DNA
atggaaacacaactgcaaagcatcttcgaggaagtggtaaaaacagaagtaatcgaagaggcttttcccggcatgttcatggacactccagaagacgaaaaaaccaagctgatctcttgcctgggagccttccggcaattttggggtggcctctcacaggagagtcatgagcagtgtatccagtggatcgtgaagttcatccacggacagcattccccaaaaagaatcagctttctgtatgattgtctggctatggctgttgagaccgggctgttgcctccacgcctggtatgcgaatccctaattaactccgataccttggagtgggaacgcacccagctgtgggccttaactttcaaactcgtccggaaaatcattggcggagtggattataaaggggttagggacctgttgaaggtaattctggagaagatccttactatccccaacaccgtgtcatcagcggtggtgcaacagctgctggctgcaagagaggttatagcctacattctggagagaaacgcatgtcttctccccgcctacttcgctgtcactgagatccgaaaactctaccccgaggggaagcttccacattggctgttggggaatctggtgagcgatttcgtggacacctttcgacctactgcccgaatcaatagtatctgcggcaggtgttcactgctccccgtggtgaataatagcggagcaatatgcaattcatggaaactcgatcctgcgactcttcgatttcccctgaaggggctgctgccctacgacaaagatttgttcgaaccacagacagctctgctccgttacgtgctggagcagccgtactctagggacatggtctgtaatatgctgggactgaacaagcagcacaagcaacggtgtccagttctggaagatcagctggtcgacctggttgtgtacgcaatggagaggagtgagaccgaggagaagtttgatgatggtggaacctcccagctcctatggcaacatcttagctcacaactgatattttttgttttgtttcagttcgccagttttccacatatggttttatcgcttcaccagaagctggccggcagagggctaataaaaggaagggaccatttgatgtgggtgcttctgcagtttatcagcggatctatccagaaaaacgctctggccgatttcctgcctgtaatgaaactgttcgatctcttataccctgagaaagagtatatccctgtgcccgatattaacaagccgcagagtacccacgcatttgctatgacgtgtatatggatccacctgaaccggaaggcacagaatgataactctaagctgcaaatccccatcccgcactcgttgcgattgcatcatgagttcctacagcagtcactgagaaataagagcttacagatgaacgactacaaaattgccctgctgtgcaacgcttatagcacaaacagcgagtgttttacgctgcctatgggggccctcgtagagacaatctatggcaatggtattatgaggatcccattacctggcacaaattgcatggccagtggctctattactccactccctatgaacctcctcgattctctgactgtccatgccaaaatgagcctgattcatagcatagctacaagggttataaaattggctcacgcaaaaagctccgtggccctcgcgcctgctctggtagaaacttactcccggctccttgtgtacatggagattgaatccctcgggattaaggggtttatctcacagctgcttccgaccgtgttcaagagccacgcttggggaatcttgcataccttgctagaaatgttctcttaccgtatgcaccatatccaaccccattaccgagtccagctcctctcgcacttacacactctggcagctgttgcccagacgaatcaaaatcagcttcacctctgcgtggaaagtactgccttacggctgatcacagccttaggatctagcgaggtgcagccccagttcacacgatttctaagcgacccaaaaaccgtattgtctgcagagagtgaagaactgaatagagccctgattctgacattagcacgagctactcatgtgaccgacttcttcacgggttccgactccatccagggtacctggtgcaaggacatcctccagactattatgtcattcacaccgcacaactgggcctcccacacgctgagctgtttccctggacccttgcaggcattttttaagcagaataacgtaccccaggagtcccgcttcaaccttaaaaagaatgtggaggaggaatacaggaagtggaaatccatgagtaatgagaacgacattatcacccatttttcaatgcagggcagcccaccactattcctctgtctcttatggaaaatgctccttgaaacggatcacatcaatcaaattggctaccgggttttggagcgaataggagctcgcgctctcgtcgctcacgtcaggaccttcgcagactttctggtgtatgaattttcaactagcgcaggcggacagcagctgaataaatgcatagagatcctgaatgacatggtctggaagtacaacatcgtaacactagaccgacttattttgtgcctggccatgaggagtcacgaagggaacgaggcccaggtctgctacttcatcattcagttacttctgctgaagcctaacgactttaggaaccgggtttcagacttcgttaaagaaaacagcccagaacattggttgcagaatgactggcacacaaagcatatgaactaccacaaaaagtaccctgaaaaattatacttcgaaggcctcgctgaacaggtcgacccacctgtccagattcaatcaccgtacttgcctatctattttggtaatgtttgtttgcgcttcttgcccgtctttgatattgtgatccatagatttctggagttactccccgtatcaaaaagtttggagaccctgctcgaccacctgggagggctctataaattccacgatcgacccgtgacttatttgtacaataccttgcattattacgaaatgcaccttcgagatagagcctttctgaagagaaagcttgtgcacgcaataatcgggtccctgaaagacaatagaccccagggatggtgtctgtctgacacatacctcaagtgtgcgatgaacgccagggaggagaatccatgggtccctgatgatacttattattgccggctaatcgggagactggtggatacaatggccggaaagtctcctggacccttcccgaactgcgattggaggttcaacgaattcccgaacccagctgctcatgcactgcatgtgacttgcgttgagctgatggcattggccgtttcaggaaaggaggtgggaaacgctctcctaaatgtggtcctgaagagccagcccctagtacctcgcgaaaatatcacagcttggatgaatgcaatcggattaattatcaccgcactccccgagccttattggatcgtgctccatgatagaattgtcagtgtgatcagcagtccatctttaacgagcgagacagaatgggtcggctacccttttagactcttcgattttacagcatgccatcagtcctattcggaaatgtcctgttcctacacattagctttggcacacgccgtatggcatcatagtagtatcggccagctgtctctgatccccaaatttctgaccgaagtgctgctgcctatcgtaaaaactgaattccagctgttgtacgtctatcacctggtaggacccttcctgcaacgcttccagcaggaacgaactcggtgcatgatcgagatcggcgttgcattttatgatatgcttttaaacgtagaccagtgttccacccacctaaattatatggacccaatatgtgattttctgtaccacatgaagtacatgttcacgggggattctgttaaagagcaggtagaaaagattatttgcaacctgaagcctgcactaaagctgcggctccgtttcatcacacacatctcgaaaatggagccagctgccgtgcctccacaagccatgaattccggctcccctgcaccacaaagcaaccaggtggatacactcacctag

SEQ ID NO: 123638 - DNA, 4107 bp, synthetic construct
  misc_feature 1..4107: note = Description of Artificial Sequence: Synthetic coding sequence
  source 1..4107: mol_type = other DNA
atggaaactcagctgcagagcatcttcgaggaagttgtcaaaactgaggtgatagaggaggcttttcctgggatgtttatggataccccagaggacgaaaaaaccaaactgatctcctgtctgggtgccttccggcagttttgggggggtctgtctcaggaatcccacgaacagtgcattcagtggattgttaaattcattcacggccaacacagtccgaaacgcatctcctttttatacgactgccttgctatggccgtggagacaggactcctgccgcctagacttgtgtgcgagagcttgataaacagcgacactctggagtgggaacggacacaactgtgggcgttaacatttaagctggtccggaagatcatcggcggggtggactacaagggagtgagggacttactgaaggtgatcctggaaaagattctgaccattcctaacacagtgagtagcgccgttgtgcagcagctgctggcggcccgggaagtcattgcctatattctggagcggaacgcctgcctcctgcctgcctacttcgcagtgactgagataaggaagctgtaccctgaagggaaattaccacactggcttctcgggaacttggtatccgactttgttgacacgttccgaccaacggcacggattaattctatctgtgggagatgctctctattgcctgtagtcaataactctggtgccatctgtaatagctggaaactggatcctgccactctaaggttccccctaaaaggcttgctgccgtatgataaggatttattcgagcctcaaactgcacttttacgctatgtcctggaacagccctacagtcgggatatggtgtgcaatatgctgggcctgaataagcagcataagcagaggtgccctgtcctagaggaccagctggtggaccttgttgtgtatgctatggaaagaagcgaaacggaggagaagtttgatgatggcggcacgtcccagttactgtggcagcacctgtccagccaattaattttttttgtgctgttccagtttgcctcatttccccatatggtgcttagtctccatcaaaagctggctggaagaggtctaatcaagggacgcgaccacctaatgtgggtcctgcttcaatttatctctggctcaatccagaaaaacgccctagccgatttcctcccagtcatgaaactgtttgatttgttgtatcccgagaaagaatacatccctgtacccgatatcaacaagccacaatccacccacgcctttgcgatgacctgcatctggatccacctgaatcgaaaagcacaaaatgacaactccaaactgcagatccctattccgcacagtctcagactgcaccacgaattcttgcaacagagcctgcgcaataagtctctgcagatgaacgattacaagatcgcattgttgtgcaacgcatactcaaccaattcggagtgtttcacactgcccatgggagcattggtcgagacaatatacggaaacggaattatgagaattcccttgcccggaaccaattgcatggcctctggaagtatcactcccctgccaatgaacctcctggacagtcttacagtgcacgctaagatgtccctcattcatagtatcgcaacccgggtcattaagctggcccacgcaaagtctagtgtcgctctcgctcctgcacttgtggagacttattcccgactgctcgtgtacatggagatcgagagtcttgggattaaaggcttcatctctcagctgcttcccacagtgttcaagagccatgcctggggaatactgcataccttgctggagatgttttcttaccgaatgcatcatattcaacctcattacagggtccagttgttatctcacctacatactctggctgccgtcgcccagaccaaccagaaccagctgcacctgtgtgtcgagtcaaccgcccttaggctgattactgccctcggctcatccgaggtgcagccccaatttactaggttcctttccgaccccaagactgtgctgtccgccgaatcagaagagctgaatcgagctctcatcctgactttggcccgggccacgcacgtaaccgacttcttcaccggtagcgattcaatccaggggacatggtgcaaggacatattgcagaccatcatgagtttcacaccgcataactgggcttcgcacactcttagttgtttcccaggtccacttcaagctttcttcaagcaaaataatgtgcctcaggagtccagatttaacctcaaaaaaaacgttgaagaagaatacagaaagtggaagagcatgtctaatgaaaacgatatcattacccacttctcaatgcagggcagcccacctctatttctctgccttctgtggaaaatgctgctggaaaccgaccatataaaccagattggctaccgagtcctcgaacggattggcgctcgggctctggtcgcacatgtgcgcacttttgccgacttcctcgtctatgagttttcaacgagtgccggcgggcagcaactgaataaatgcatcgagatccttaacgacatggtgtggaagtacaacatagtgacattggataggctcatcctgtgtctggctatgaggagccacgagggcaatgaggcacaggtctgttattttattatccagctcctgttgctgaaaccaaacgactttaggaatcgggtgagtgacttcgtgaaagagaactcaccagagcactggctgcagaatgactggcatacaaagcacatgaattaccacaaaaagtatcccgaaaagttgtattttgagggcctggctgagcaggtcgatcctccagtgcagatacagagcccatatctgcctatctacttcggcaacgtttgcctgcgatttctgcctgttttcgatattgtgatacacaggttcctggaattactgcccgttagcaaatccctggagacccttctcgatcatctcggaggcctgtataagtttcatgacagaccagttacctacctgtacaataccctacactattatgagatgcatttgcgggaccgggcatttttgaaaaggaagctggtgcatgcaattataggcagtttgaaagataataggccccaggggtggtgcttgtccgatacctacctgaagtgcgccatgaatgctcgtgaagagaatccttgggtcccggacgatacgtattactgccgtctgataggcaggttggtcgacaccatggccgggaaatctcccggcccgttcccaaattgtgactggcggttcaacgaatttccaaatcccgccgcccacgctttacacgttacctgcgtggagctgatggccctcgcggtaagcggcaaggaagtcggtaacgcactcctaaatgtcgtacttaaatctcagccccttgttcccagagaaaacatcactgcatggatgaatgccatcggtttgattatcaccgccctgcctgagccatattggatagttctgcatgaccgcattgtgtctgttataagtagtccctccctgacaagtgaaactgaatgggtgggctacccctttaggctgtttgattttaccgcatgtcaccagagctactctgagatgagctgctcctataccctagctctggcccacgcagtgtggcaccactctagcatagggcagctctcactgatccccaaatttctaacggaagtgctcctgcctatcgtgaaaaccgagttccagctgctgtatgtctatcacctcgtggggccttttctccagagattccagcaggagcgaactaggtgcatgattgagatcggagtggccttctacgatatgcttcttaacgtggaccagtgcagtacccacctaaattacatggacccaatttgtgattttctgtaccacatgaaatacatgttcacaggagatagtgtcaaagaacaggtggagaagataatttgcaatctgaagcccgcactgaagctgagactcagattcattactcatatctccaagatggagcccgctgcggtccccccacaggctatgaattcaggttctcctgcccctcagtccaatcaggtccccgtgtcactgcccgtgacacagtag

SEQ ID NO: 123639 - DNA, 4125 bp, synthetic construct
  misc_feature 1..4125: note = Description of Artificial Sequence: Synthetic coding sequence
  source 1..4125: mol_type = other DNA
atggagacacagttgcagtcaatctttgaagaggttgttaagactgaggtgatcgaagaagccttcccaggtatgtttatggatacccccgaagatgaaaagactaagctcattagttgcttaggggcttttaggcagttttggggcggactgtcccaggaaagccatgaacagtgcatccagtggatcgttaagtttatacacgggcagcattctccaaagcgcatctccttcctctacgactgccttgccatggcagtcgaaaccgggcttcttccaccccgactcgtgtgcgagagcttaattaatagtgacaccctagaatgggagcggacacagctctgggccctgactttcaaactggtcaggaaaattatcggaggcgttgattacaaaggcgtaagggacctgctcaaggtcatcttggaaaaaattctgaccatacccaatactgtgtcctctgctgtggtgcagcagcttcttgccgcccgggaagtgatagcttacatcctcgagcgaaatgcttgcctcctgccagcatacttcgccgttaccgagataagaaagctgtaccctgagggaaagcttccccactggttactgggtaacctggtgtccgatttcgtggatacgtttagacccaccgcaaggattaactccatctgtgggcgatgctcacttcttcccgtggtgaacaactctggggctatatgcaacagttggaaacttgacccagctacccttagattccccctgaaaggcctgctcccctacgacaaagacctgttcgaacctcaaactgccctactgaggtacgtgttggaacagccttattctcgcgacatggtctgcaacatgctgggcctgaacaaacagttgattagtgctctgcagcataagcagcgctgccctgtgctggaggaccagctggtcgatctggttgtgtacgcaatggaacgcagtgagacagaggagaagttcgatgatggcgggacaagccaactcctgtggcagcatctatcctcccagctgatttttttcgtgttattccagtttgcatccttccctcatatggtgctatcactgcaccagaagttggcgggacggggactgataaaaggtagggatcacctgatgtgggtgttgttgcagtttatcagcgggtcaatccagaagaatgcgctcgcagatttcttgccggtcatgaagctgttcgatttattgtacccagaaaaggagtacataccggtgccggacatcaataagccccaaagcacacacgcttttgcaatgacatgtatatggatccatcttaaccggaaagcccagaacgacaactctaagctgcagattccaataccacacagccttaggctgcatcacgaattcctgcagcagtctctgcgaaataagagtttgcagatgaatgactacaagatcgccctgctctgtaacgcctatagcaccaactctgagtgcttcactctgccaatgggcgccttagttgaaaccatttacggtaatgggatcatgagaatcccgcttcccggcaccaactgtatggccagcggatccattactcccctgccaatgaatctgttggactcactgacagtccacgccaagatgagtctcatccattcaatcgccaccagagtgattaagctcgcccacgctaagtctagcgtcgcactggcgcctgcccttgtagaaacttactcaaggcttctggtgtatatggagattgaatccctcggaatcaaggggttcattagccagctgctgccaaccgtattcaagagccacgcatggggaatccttcatactctcctcgaaatgttttcttatagaatgcaccacatacaaccgcactatcgcgttcagctcctgtcacatctccacacccttgcagcagtagcccagaccaatcagaatcaactccacctgtgtgttgagtctaccgcactgcggctgatcacagccttgggcagcagcgaggtgcaacctcagtttacgcggtttctgagcgaccctaagactgttctcagcgccgaaagcgaggagctcaacagggccctgattcttactttggctcgggcaacccacgtcactgacttctttacaggaagcgatagtatccagggcacatggtgcaaagatatcctgcagaccatcatgtctttcaccccccacaattgggcgagccatacactttcctgtttcccaggccccctccaggctttttttaaacagaacaacgtgccgcaggagagtcgctttaatcttaagaaaaatgtggaagaggagtaccggaagtggaagagtatgtccaacgaaaatgatatcattacccacttctctatgcagggatcaccaccattgttcctctgtctgctgtggaaaatgctcctcgagactgaccacatcaatcaaataggttacagagtgctggagcgcattggtgctagagccctcgtggctcatgtgaggaccttcgctgatttcctggtttatgagttctccacttcagccgggggacagcagctcaataaatgcatcgaaatcctgaacgacatggtgtggaagtacaatatagtgacactcgacaggctgatcctgtgtcttgccatgaggtcacatgaaggaaatgaggcccaggtctgttattttataatccagcttctgttgctgaagccaaacgatttcaggaacagggttagcgatttcgtgaaggagaactcacccgaacattggctgcagaacgattggcatactaaacatatgaattatcataaaaagtatcctgaaaagctgtacttcgagggattagccgaacaggtggaccccccagtgcagatacagagcccttatctccctatttattttggaaatgtttgcttgcgattcctacccgtctttgacatcgtgattcaccgcttcctagagctgctaccagtatccaaaagcttggagacactactggatcacctgggaggactgtacaagttccacgatcggcccgtgacgtacttatacaatactttacactactacgagatgcatctcagagatagagcgttcttaaagaggaagctggtgcacgcaatcatagggagccttaaagataaccgaccacagggatggtgtctgtcagacacctatctgaaatgtgcgatgaatgctcgcgaggaaaatccttgggtccccgacgatacttactactgccgactcatagggagattagttgatacgatggcgggtaagagtccgggtccgtttcctaactgcgactggcggtttaatgaattccctaatccagcagctcatgctttacatgtcacgtgtgtagaactgatggcactagccgtgtctggcaaagaagtgggcaatgctttgctcaatgtcgtacttaaatcccagccactagtgccacgggagaatatcaccgcatggatgaatgcaatcggcctaatcataacagctctgcctgaaccttactggatagttttgcatgatcgtatagtaagcgtgatcagctccccatcgctaacaagcgaaacagaatgggtggggtatccttttcgactgttcgattttaccgcatgtcatcagtcctactctgaaatgtcctgctcttacaccctggccctcgcacatgctgtctggcatcattcttcaatcggtcagctctcactgattcctaaattcctgaccgaagtccttctgcctatcgtcaagactgaattccagctgctctatgtatatcatctggttggcccttttctccagcgcttccaacaagaaaggacacgatgtatgatcgagatcggcgtcgctttctacgacatgcttctcaatgtggaccaatgctccactcatctgaattacatggacccaatctgtgattttctctatcatatgaaatacatgttcacaggagactcagtgaaggagcaagtggagaaaataatctgcaatcttaaacccgctctgaagcttagactgcgttttatcactcatatcagcaagatggagcccgccgccgtgccacctcaggccatgaattccggaagccctgccccccagagcaatcaggtgcctgtctcactgccagtgacgcagtag

SEQ ID NO: 123640 - DNA, 114 bp, synthetic construct
  misc_feature 1..114: note = Description of Artificial Sequence: Synthetic coding sequence
  source 1..114: mol_type = other DNA
atggaaactcagctacagtccatcttcgaggaggtcgtcaaaactgaggtaattgaggaggcttttcctggaatgtttatggatacgcctgaggatgaaaagagctcaaaatag

SEQ ID NO: 123641 - DNA, 132 bp, synthetic construct
  misc_feature 1..132: note = Description of Artificial Sequence: Synthetic coding sequence
  source 1..132: mol_type = other DNA
atggagacccaattgcagagcattttcgaagaagttgtgaagaccgaagtaattgaggaggcattccctggaatgtttatggacacccccgaggatgagaaaacaaaattattcatggaaatggagctgtag

SEQ ID NO: 123642 - DNA, 1428 bp, synthetic construct
  misc_feature 1..1428: note = Description of Artificial Sequence: Synthetic coding sequence
  source 1..1428: mol_type = other DNA
atggagactcagttgcaatctatctttgaggaagtagtaaagaccgaggtcatcgaggaggcttttcccggaatgttcatggatacccccgaggacgagaagaccaagttaatcagctgcctcggcgccttccgccaattctggggtggtttgtctcaggaatctcatgagcaatgtattcagtggatagtcaaattcattcacggccagcactctccaaagaggatttcgtttctgtatgactgcttagcaatggctgtggagaccggactgctccccccacgcctggtgtgcgagtcactgattaatagcgatacactagagtgggaacggactcagttgtgggccctgaccttcaagcttgtacgcaaaatcataggcggagtcgactacaagggggtgcgcgaccttctcaaagtgatcctggaaaagatcttgactattcccaatacagtgtcttcagctgtggtgcagcagctgcttgcagcacgcgaggttattgcgtacatcctcgagagaaacgcttgtctgttacctgcatacttcgccgtgaccgagataagaaaactgtacccagaaggcaagctgccgcattggctcctcggcaacttggtgtcggactttgtggatacatttcgccccacagccaggataaatagtatctgtggcaggtgcagcctgcttcccgtggtgaacaacagcggggcaatttgtaacagctggaagctggatcccgccacccttcgtttcccacttaaggggttgttgccatatgacaaggacttgtttgaacctcaaactgctctccttaggtatgttctcgagcagccttattctagggatatggtttgcaatatgctggggctgaacaagcagcacaaacagagatgcccggtgcttgaagaccagctggtggatctagttgtgtatgctatggagcgtagcgaaaccgaggaaaaatttgatgatggcggcacaagtcaacttctatggcaacacctttcatcacagctgatttttttcgtgctgtttcaattcgcttcattccctcacatggtactatcactccaccaaaagttggcaggcaggggactgattaaaggacgggatcacctgatgtgggttcttctgcagttcattagtgggagcattcagaaaaatgcccttgccgattttttgcctgttatgaagctgtttgatttattataccccgagaaggagtacatcccagtcccagatattaacaagccccaaagtactcatgcctttgcaatgacatgtatatggatccaccttaatcgaaaggcccaaaatgacaatagtaagctgcagataccgatccctcacagtctgagactgcaccatgaatcagcgtttgcgaactgtttccagatcacctgtatgggcgacttgactcacactccatag

SEQ ID NO: 123643 - DNA, 429 bp, synthetic construct
  misc_feature 1..429: note = Description of Artificial Sequence: Synthetic coding sequence
  source 1..429: mol_type = other DNA
atgcatcatattcagcctcactaccgcgtgcagttactgtcccacctgcatacccttgccgccgtggcccagaccaatcaaaaccagcttcacctctgcgtggagagtactgcattgcggctgattacagcattgggctcctccgaggtgcagcctcagtttacgaggttcctgagcgaccccaagacagtactctcagccgagtccgaggaactcaacagggcactcattcttaccctggcgcgcgctactcacgtgacagacttcttcaccgggtccgacagcatccagggtacatggtgcaaggacatcttgcagactatcatgtccttcactcctcataattgggcaagtcacaccctctcgtgcttccccggcccactacagacactcctgattttgggagagctggctctccgcaagacttag

SEQ ID NO: 123644 - DNA, 2661 bp, synthetic construct
  misc_feature 1..2661: note = Description of Artificial Sequence: Synthetic coding sequence
  source 1..2661: mol_type = other DNA
atggaaacacagctgcagtctatctttgaagaggtcgtgaagacggaagtgatcgaggaggctttcccaggcatgttcatggatacaccagaggacgaaaaaaccaagttaatttcatgtttaggcgcatttcggcaattctggggtggactctcgcaggaaagccacgagcagtgtatccaatggatcgtgaagtttattcatggccaacattccccaaaacggatcagtttcctttacgactgcctggctatggccgtagagactggattgcttccgcctcgccttgtgtgtgaatcactgatcaactccgacaccctcgagtgggaacggactcagctgtgggctctgactttcaagctcgtccgcaaaatcatcgggggtgtcgactacaagggagtgcgagacctgctgaaggtcattttggagaaaatcttgacaatccctaacaccgtcagcagcgcggtggtccagcaactgctggctgcaagagaagtcatcgcctacatcctcgagcgcaacgcatgcctcttaccagcgtacttcgccgttaccgagattagaaagctgtaccccgagggaaagctgccccactggttgctggggaaccttgtatcagacttcgtggacactttccggccaacagcccgaatcaactctatctgtggaaggtgctctctccttccggtggtcaacaattctggggcaatctgtaatagctggaaattagatcctgcaacgctcaggttccctctgaagggattgctgccatacgataaggacttgtttgagccccagaccgcattgctgcgctacgtgttggagcagccctatagcagagacatggtatgtaatatgctggggttgaataagcaggtccttaaaatttttaagcacaagcagcgctgtcctgtgctcgaggaccagctcgtggatctcgtggtttatgccatggagcgctctgagacagaggagaagttcgatgatggagggacttctcaactcttatggcagcatctgtcctcacagctcattttcttcgtgctctttcagtttgcttcctttccccatatggtgcttagcttacatcaaaagctggcgggtagggggttaatcaagggccgcgaccatcttatgtgggtgttgcttcagtttatcagtgggtccatccagaagaacgctcttgcagactttctgcctgtcatgaagctcttcgacctgctctacccggagaaggagtatattcccgtgccagacataaataagccccagtctacccatgcctttgcaatgacatgcatatggatccacctgaatcgtaaggctcagaatgacaacagtaagcttcagatcccaatcccccatagcctccggttgcaccacgagttcctgcagcagtctctcaggaacaaaagccttcagatgaatgattataagattgctctcctttgtaacgcttacagcaccaacagcgagtgttttactctcccgatgggagctctggtcgaaacaatatatgggaatggcatcatgagaatcccactccccggcaccaactgcatggcctccgggtctatcactcccctccctatgaatttgctggactcacttaccgtgcatgctaaaatgtccctgattcacagtattgcaactagggtaattaagttggcccacgctaaatccagtgtcgccctcgcacccgccctagtagagacctacagccggcttctggtgtacatggagatcgaatcccttggaattaaaggatttatatcccagctgctgccgactgtgttcaaaagccacgcatgggggatccttcacacactgcttgagatgttcagttaccgaatgcatcatatccagccccattaccgggtccaactgctgagtcacctgcatactctggcggcagtggctcagaccaaccagaaccaactgcatctgtgtgtggaaagcactgcccttcgcctgattacagccctgggctcatcagaggttcagcctcagttcacgcgcttcttgtcggatcctaaaaccgtactgtccgcagaatcggaagagttaaacagagccctgatcctcactttggctagagcaacccacgtaaccgatttttttaccggaagcgattcgatacaggggacctggtgcaaggacattctgcagactatcatgagctttacgcctcacaactgggcgagtcacacgctctcatgtttcccagggccgctacaagccttttttaagcaaaataacgtgccgcaggaatccagattcaaccttaaaaagaatgtcgaagaagagtatcgaaaatggaagtcaatgtcgaatgaaaacgatattatcacgcacttctccatgcaggggagcccaccactgtttctctgtcttctctggaaaatgcttctcgagaccgaccatataaaccaaatcggttaccgggtgctcgagcggataggggcgagagctctcgttgcgcatgttagaacatttgccgattttctagtctatgaattttcgacatccgctgggggccagcagctgaataagtgcatagaaattttgaatgacatggtctggaaatacaatatagttacactggatagacttatcctttgcctagtgaggattaacacttttctgtcactttttagctag

SEQ ID NO: 123645 - DNA, 3030 bp, synthetic construct
  misc_feature 1..3030: note = Description of Artificial Sequence: Synthetic coding sequence
  source 1..3030: mol_type = other DNA
atggagcgatccgagactgaggagaaatttgacgacgggggtaccagtcagctgctctggcagcatctgagcagtcaattgatctttttcgtattgtttcaatttgccagctttccccatatggtcctgagccttcatcagaagtacattccagtccccgatattaataagccacagagcacacacgctttcgctatgacttgtatctggattcatttgaaccgaaaagcccagaacgataactcaaagctgcaaattccaattccccactctctgaggcttcatcatgaatttctgcagcaaagccttaggaataaatccctgcagatgaacgactataaaatagcgttgttatgcaatgcttattccacaaattcagagtgttttacgctgcctatgggcgcactggtggagaccatatatggtaatggtattatgaggattcccttgcccggcaccaattgcatggcgtccgggtcaatcactccactcccgatgaatcttctcgacagcctaacggtgcacgccaagatgtccctcatacactctatagccacaagggtcatcaagcttgcccatgccaagagttctgtggcattagccccagctctagttgaaacctacagtcggttgctcgtgtacatggagattgagtcccttggcattaagggattcatcagtcagctcctgcccaccgtcttcaagtcgcatgcttggggaatactacataccctgctggagatgttctcttacaggatgcatcatattcagccccattaccgggtgcaactccttagccatctgcatacactggcagcagtggcccagacaaaccagaatcagctgcacctgtgcgtggagtcaactgccctcaggctcataacagctttagggagctcagaggtacagccgcaattcacccgctttctgtctgacccgaagacagtgctgtccgctgagtcagaggaactgaatcgagccctgatactcacactcgcccgggccacacatgtgaccgacttcttcactggctccgatagcatccaggggacatggtgtaaagacatccttcagactattatgtcttttacacctcataactgggcctcacatacactgagctgcttcccgggtccgttgcaagcattctttaaacagaacaacgttcctcaggaaagccggttcaacttgaaaaagaatgtcgaggaggagtatagaaaatggaagtctatgtctaacgagaacgatattattactcatttctctatgcaggggtcccctccgctgttcctgtgtcttctgtggaagatgctgctggaaaccgaccacattaaccagatcggataccgggtcctcgagaggatcggcgccagagccctcgtggcccatgtacgaacctttgcagactttctggtatacgagttctctacctcagctggcgggcagcagctaaacaaatgtattgaaattctcaatgacatggtgtggaagtataacattgtgaccctagataggctgatcttgtgcctggctatgcgctcccatgagggcaatgaagcccaagtatgctatttcataatccaactgctactgctgaaaccaaacgattttcggaaccgagtcagcgacttcgttaaagagaattctcctgagcactggctgcaaaatgactggcataccaaacacatgaattatcataagaagtatccagaaaaattgtattttgagggcctggccgagcaagtggaccccccagtccagattcagagtccgtatttgcccatttattttggtaacgtgtgcctgagatttctgcccgtgtttgacatcgtgattcatcggttcttagaactgcttccagtgtcaaagagcctcgaaacgcttttagatcacctaggcggtctctataagttccatgatcggcccgtgacttatctatacaacacacttcattactacgaaatgcatctccgcgaccgcgcattcctgaagagaaaactggtacatgcaattattggaagcctgaaggataaccgacctcagggttggtgtctctcagacacctacctgaaatgcgccatgaatgcgcgagaagagaacccctgggtgcccgacgatacctactactgtcgtctgataggacgattagtggacactatggccggtaagagccccggtcctttcccaaattgcgattggagattcaatgagtttcctaatcctgctgcccacgccctgcacgttacttgtgtggagctgatggccctagctgttagcgggaaagaggtcgggaacgccctcctgaacgttgtgctgaagtctcagccactggtgccccgggagaacataactgcttggatgaacgctattggcctcatcattaccgcactcccagaaccatattggatcgtgctgcacgaccgtattgtgtctgtaataagctccccttccttgaccagcgagacagagtgggtcggatatccgtttagattatttgactttaccgcctgtcaccaatcatactctgagatgagttgttcctacacgctggccctggcacatgccgtgtggcaccacagctcgatcggacaactgagcctcattccaaagtttttaactgaggtgctcttaccaatcgtcaagacagaatttcagctgctttacgtgtatcatctggtggggccttttctccaacgattccaacaagagaggactagatgtatgattgagataggagttgcattctacgacatgttactgaacgtggaccagtgttctacccatctcaattacatggacccgatctgtgactttctgtaccacatgaaatacatgtttacaggggactctgtcaaagagcaagttgaaaagatcatatgcaacctcaaacctgccctgaaacttagactgcgcttcattactcacatttccaagatggagccagctgccgtgccaccccaggcaatgaactccggatcgcctgccccacaaagtaatcaggtgcccgtctcactgccagtaacacaatag

SEQ ID NO: 123646 - DNA, 2970 bp, synthetic construct
  misc_feature 1..2970: note = Description of Artificial Sequence: Synthetic coding sequence
  source 1..2970: mol_type = other DNA
atgaaagtggtgaatctgaagcaagctatcctccaggcgtggaaggagaggtggtctgattatcagtgggctatcaacatgaagaaattctttcctaagggcgccacatgggacatccttaatctcgccgacgccctactagaacaggcaatgattgggcctagccccaatcccctcatccttagttacctcaaatacgctatttcaagtcagatggtgtcctactcctccgttcttacagccatttccaagttcgacgatttttctagagacctgtgcgttcaagctcttctggacattatggacatgttttgtgatagactgtcctgtcacggaaaggccgaagagtgtattgggctgtgcagggccctgttgtcagcattgcactggcttctgcgctgtactgccgcgagcgccgagagactcagggagggcttggaggctgggacaccagccgctggagaaaagcagctcgcgatgtgtttgcaaaggctcgagaagaccctgagctcaacaaaaaatagagccttactgcacatcgctaaattggaggaagctagcagctggacagcaatagagcacagcttactcaagctcggtgagatactggccaatctgtccaatccgcaattacgaagccaggccgagcagtgcggcacgctgatacgtagcatccccaccatgctatcagtgcacgctgaacagatgcataagacaggatttccaaccgttcacgctgtgattctgttggaaggcaccatgaatctcaccggagagacccaaagtctggtggagcaactgacgatggtaaagaggatgcagcatatccccacaccgctcttcgtgctggaaatttggaaggcatgcttcgttggacttattgaaagcccagaaggcacagaggagcttaagtggacagccttcacatttcttaaaattccgcaggtgttggtgaagctcaaaaaatattctcatggggacaaggactttacagaggacgttaactgtgcattcgaattcctactcaagctgaccccattactggacaaggccgaccagcgttgcaactgtgactgcactaatttcttgctccaggagtgcggaaagcagggacttttgagtgaggccagcgtcaacaatctgatggccaaacgcaaggccgatcgcgagcacgcccctcagcagaaatctggagaaaacgcaaacatacagcccaatatccagctgattctgagagcggagcctaccgttaccaatatcctcaaaactatggacgccgaccatagcaaatctccagaaggactcctcggggtcttagggcacatgcttagcggaaagagtttggatctactgcttgccgcagccgcagctaccggaaaactgaagagttttgctcggaaattcattaacctgaatgaatttactacctatggcagcgaggagtccaccaagccagcttccgtgagggcactgctgttcgacatcagtttcctgatgctgtgtcatgtggctcagacctatggttcagaagtaatcctctccgaaagccggacaggagccgaagtgccattcttcgagacatggatgcaaacatgcatgccggaagaaggcaaaatcctgaatcctgatcacccatgctttaggccggactctacaaaggtggaatccctggtcgccctcctgaacaatagctctgagatgaaattagtccagatgaagtggcacgaggcatgccttagcatttccgccgccattctggagatcctgaacgcttgggagaacggagtgcttgcattcgaatctatccagaagatcaccgacaacattaaggggaaagtgtgctcactcgccgtttgtgccgtggcctggctggtagctcacgtgagaatgctggggcttgatgagagggagaaaagcctccagatgatacgacagctcgcaggtccactgtttagtgagaatacgctccaattttacaatgagcgcgtagtgattatgaattcaattttagaaaggatgtgcgctgacgttcttcagcagacggctactcagatcaagttcccgtctacaggcgtcgacactatgccatactggaatcttctcccacctaagagacccatcaaagaagtcctgacggatatctttgctaaggtgcttgaaaagggttgggtcgatagccgctccatacacatcttcgacaccttgctgcacatgggaggggtgtattggttttgcaataaccttatcaaggagttactgaaggaaactcgcaaggaacatacattacgcgcggtggaacttctctacagcatattttgcctggacatgcagcaggtaacactggtgctcctaggacatatcctgcccggactgctgacggattcttcgaagtggcacagtctgatggacccccccggtacggctctggccaaactcgccgtttggtgcgctcttagctcgtattcctctcacaagggccaggcaagcactagacagaaaaaacgacaccgcgaggatattgaggattacatcagtctctttccgctcgacgacgtgcaacccagtaaactaatgcggctgctgtccagcaatgaggacgatgcgaacatactgagctcaccgactgatcggtcgatgtcttcctctttgtccgcttcccagctccacaccgttaatatgcgggatcccctgaaccgtgtgttggctaatctcttcctcctcatctcatctattctggggtcacggaccgctgggcctcatacccagttcgtacagtggtttatggaggaatgcgtggactgtctcgaacaaggcgggcgagggtccgttctgcagtttatgcccttcaccaccgtgtcagagttggtcaaggtcagtgctatgtcatctccaaaggtagtcctggcaattacagatctgagtctcccccttgggcgccaagttgcagccaaagcgatagctgccctctag

SEQ ID NO: 123647 - DNA, 2970 bp, synthetic construct
  misc_feature 1..2970: note = Description of Artificial Sequence: Synthetic coding sequence
  source 1..2970: mol_type = other DNA
atgaaggtggttaacctgaagcaagccattttgcaggcctggaaggagcgctggagcgactatcagtgggccatcaatatgaagaagttcttcccaaagggcgctacatgggacatcctcaatctggccgacgcacttctggagcaggcaatgatcggcccttctccaaaccctctgatcctctcctatcttaaatatgctatctctagccagatggtctcctattcatctgtcttgaccgccatttctaagttcgatgacttcagtagagacctctgcgtgcaggcgctcctagatattatggacatgttttgtgatcgtctatcctgtcacggcaaggctgaggagtgtattgggctgtgccgcgctttgctgagtgctctccattggcttcttcgctgcaccgctgcctcagcagagcggttgagagagggcctggaggcaggaacacctgccgcaggagaaaaacagctcgccatgtgtttgcagaggctggagaaaacccttagcagtacaaaaaatagggcacttctccatatcgcaaaactcgaggaagcttcctcttggaccgccatcgagcacagcttacttaagctcggtgagattctcgccaatctctccaacccacagctccggtctcaggctgaacagtgtgggactctcataaggtctattcccaccatgctgagcgtccatgctgagcagatgcataagacgggttttcccaccgttcacgcggttattcttctcgaagggactatgaacctcacaggagagacccagtctcttgtggagcaattgacaatggttaaaaggatgcaacacatcccaacccccctctttgttctagaaatttggaaggcttgcttcgtcggacttattgagagcccagaaggaactgaagaactgaaatggacagcctttactttcttgaagattccccaggtgttagtcaagctaaagaaatattcacatggcgacaaggacttcacagaagacgtcaactgtgcattcgaatttctcctcaaattgacccccctcctcgataaggccgatcaacgctgcaactgtgactgtactaactttctcctccaggagtgcggcaaacaaggactcctcagcgaggctagcgttaacaatctcatggccaagagaaaagcagacagggaacatgccccacagcaaaagtccggcgagaacgctaacatccagccgaacatccagctgatcctgagagctgaaccaaccgtgaccaacattttgaagactatggatgccgaccatagcaaaagtcccgaggggctgctgggagtattgggtcacatgctgtctggcaaatcactggatctgctactggcagcggctgctgcgacagggaaactgaagtcatttgcgaggaagttcatcaatctgaatgagtttacgacttatggttccgaggaaagcactaaacccgcatccgtgcgcgccctcctctttgatatctccttcctcatgctgtgccacgtcgctcagacgtatggatccgaagtcattctcagcgaatctcgcactggcgctgaagtgccttttttcgagacctggatgcagacttgtatgccagaggagggcaaaatactcaaccctgatcacccatgtttcagacctgactctaccaaagtcgagtctctagtggctctgctcaataactcaagtgagatgaagctggtgcagatgaagtggcacgaagcttgcttgagcatcagcgcagcaatcttggaaatcctgaatgcctgggaaaatggtgtgcttgctttcgaaagcattcagaagatcaccgacaatatcaagggaaaggtctgttcgctggccgtctgcgctgtggcatggctggtcgcacatgtgaggatgctcggcctggacgagcgggaaaagtcactacaaatgatcaggcaactggctgggccactcttttctgaaaacacccttcagttttacaacgagcgcgtggtgattatgaacagcatcctcgagcggatgtgcgccgacgttctccagcagacggctacccaaattaagttcccaagcacaggggtcgacactatgccctactggaacttgctacctcccaaacggcccatcaaagaggtgctcaccgacatttttgctaaagtactcgaaaaggggtgggtcgattcgcgctctattcacattttcgacaccttgctccacatgggtggagtttattggttctgcaacaacctgatcaaggagctgcttaaggagacacggaaagagcacaccctccgcgccgtggaactgctctatagcatcttttgcttggatatgcagcaggtgacgctggtgttgctcggccatatcctaccggggctcctcactgatagcagcaaatggcactctttaatggatcccccagggacagcattggcaaagcttgccgtatggtgcgctcttagtagctactcttcacacaagggacaggcctcaactagacaaaaaaagcggcaccgggaggatatcgaagactacattagcctctttccccttgatgacgtccaaccaagcaaactgatgcgcctcctaagttctaacgaagatgacgccaatatcctgtcctcccccactgatcggtctatgagcagctctttaagtgctagtcagctgcatactgtgaacatgcgggaccctttaaatagggtgttggcaaacttgttcttactgattagcagcatactgggctcccgaacagccggaccacacacccagttcgtgcagtggtttatggaggaatgcgttgactgtctagagcaaggaggtaggggctcggtgcttcagtttatgccctttaccacggtgtcggagctggttaaggtcagcgccatgtccagcccaaaggtggtgcttgccattaccgacttgtctctgccgctggggcggcaggttgctgctaaggccatcgccgccctctag

SEQ ID NO: 123648 - DNA, 2931 bp, synthetic construct
  misc_feature 1..2931: note = Description of Artificial Sequence: Synthetic coding sequence
  source 1..2931: mol_type = other DNA
atgaaggtggtgaatcttaaacaggccatcctgcaggcctggaaagaaagatggagtgactaccaatgggccattaatatgaagaagttctttccgaagggggcaacatgggatatcttgaatttggccgatgcgctcctggagcaagccatgatcgggcctagtcctaatcctttgattttatcttatcttaaatacgctattagtagtcagtttgatgactttagcagggatctctgcgtgcaggccctgctcgatattatggatatgttttgcgaccgcctgtcctgccatgggaaagcggaagagtgtattggactttgccgggctctcttgagcgcccttcattggctccttcgatgcactgccgcatctgctgaaagacttcgcgaaggtctcgaggcaggtactccagcggctggagaaaaacagttggcaatgtgtcttcagcgcctggagaagaccctctcatccacaaaaaacagggctctactccatatcgccaagttggaggaagcatcatcttggacagccattgagcactcactgcttaagcttggtgagattctggccaatctgtctaacccacagcttaggtcccaggccgaacagtgcggaaccctgatcagatcgattcccacaatgctgtcagtccacgccgagcagatgcacaagacaggctttcctacagtacacgctgtgatactgttggagggcactatgaacctgacaggagaaacgcaaagccttgtagaacagttgacgatggtaaagagaatgcagcatattccgacacccctgttcgtgctcgaaatctggaaggcctgtttcgtcgggctcatcgagtcccctgagggtacagaagagcttaaatggaccgcgtttacatttttgaagatcccacaggtgcttgttaagctcaagaaatacagccacggggataaggactttaccgaggatgtcaattgcgcgtttgaatttctcttgaagctaaccccgctgctggataaggccgatcagagatgtaattgcgactgcacaaactttctccttcaggaatgcggtaaacaggggcttctatcagaggcatccgtaaataatttaatggctaagaggaaggcggatagggaacacgctcctcagcagaagtccggggaaaatgccaatatccaaccgaacattcagctgatccttcgggccgaaccaactgtaacaaacattcttaagaccatggatgccgaccactcaaaaagtcctgaagggcttctcggagttctcgggcacatgctgagcgggaaatctttagatcttctgctcgccgctgccgccgcaaccggcaaactgaagtccttcgccaggaaattcatcaacctgaacgagtttaccacatacggttccgaggagagcacaaaacccgccagcgtcagggccttgctgtttgacatttcctttctgatgctgtgccatgtggctcagacctacggctcagaggttatcttaagtgagagccggacaggggccgaagtgccattcttcgaaacatggatgcaaacatgcatgccagaagaaggcaaaatcctgaacccagaccatccctgtttccgccccgattccactaaggtcgagtcacttgttgcattgctcaacaactcgtctgagatgaagttggtccagatgaagtggcatgaggcatgcctgagcatcagtgctgcgatcctggagattcttaatgcttgggaaaatggtgtgctggcttttgagtcaattcagaaaattaccgacaacatcaagggaaaagtgtgttcgcttgccgtgtgcgcggtggcgtggctggtagcacacgtcagaatgctgggcctggatgaacgagaaaagagcctgcaaatgattagacagctggcaggaccactatttagtgagaacacacttcagttctataacgagcgcgtcgtcatcatgaactctatattggagcgcatgtgtgcagacgttcttcagcagacggcaacccaaatcaagtttccatcaacgggggtagatacgatgccctactggaatctgctcccccctaagagaccgatcaaagaggttctgaccgacatctttgcaaaggtattagagaagggctgggttgacagccggagtatccacatttttgatacccttctgcatatgggcggagtgtactggttctgcaataacctgataaaggagttgcttaaggagacccggaaagaacacaccctgagggctgttgaattgttgtactccatcttttgtctagacatgcaacaagtgacactcgtgcttcttggacatatcctccccgggctactgacagatagttccaagtggcattcactcatggaccccccgggaactgccctggcgaaactggccgtgtggtgcgctctttctagttattcttcccacaaggggcaggccagcacccggcagaaaaagaggcatagagaggatatcgaagattacatctctctgttccccctagacgacgtgcagccctctaaactaatgcgcctgttatcctcgaacgaggacgacgctaatattctctcatctccgaccgatcgctctatgagctcttctctgtcggcctctcagctgcatacagtaaatatgcgagacccgctgaaccgagtgttggcaaacctgttcctgctcatcagctccatcctcggttctcgcaccgccggcccacatacacagttcgtccaatggtttatggaagagtgcgtcgactgcctggagcagggcggaaggggctcggttctgcaatttatgccatttactactgtgagtgagctggtaaaggtttcagccatgtccagtcctaaggtggtgctggccattaccgacctttcactgccccttgggcgacaggtggccgcgaaggctattgcagcgctttag

SEQ ID NO: 123649 - DNA, 2970 bp, synthetic construct
  misc_feature 1..2970: note = Description of Artificial Sequence: Synthetic coding sequence
  source 1..2970: mol_type = other DNA
atgaaggtcgtgaacctcaaacaggctatcctgcaggcttggaaagaacgttggagtgattatcaatgggccattaatatgaagaaattctttccaaagggggccacttgggatatcctgaacctggccgatgctcttctggagcaggctatgatcggaccgtcaccaaaccctctcatcctctcttacctgaagtacgcaatcagcagccagatggtgtcatattcttcagtcctgaccgccatcagcaagttcgatgatttttccagggatctttgtgtccaggctttgctagatatcatggacatgttctgtgatcgactcagctgccacggcaaagccgaagagtgcatagggctctgtagggctctgctctctgccttgcattggctacttagatgtaccgctgcaagcgcggaacggcttcgggagggcctggaagccggcacccccgctgctggggagaaacagctcgcgatgtgtttgcaaaggttggaaaagacattgagtagcaccaaaaatcgagcgctacttcatatcgctaaactggaagaggcctctagctggacagccatcgaacatagcctgctcaagctgggcgagattcttgcaaatctgtcaaacccccagctccgtagccaggccgaacagtgcggaacactgataagatccattcctactatgcttagcgtgcatgcggagcagatgcataaaactggctttcccacagtacatgccgtgatcctgctggaagggacgatgaaccttacaggggagacgcaatcccttgtggaacagctgaccatggtcaagcgaatgcagcatatacctactccactgtttgtccttgagatatggaaagcgtgctttgtaggtctgattgagtcccctgagggcactgaggagctgaagtggaccgcattcactttcctgaaaataccacaagtattggttaagctgaagaagtacagccatggcgataaggactttacagaggacgtgaattgtgcgttcgagtttcttctgaaactgaccccactcctggacaaagcggaccaacgatgcaattgcgattgtactaatttcctcctgcaggaatgcggcaagcaaggcctactgagtgaagcttccgtcaataacctgatggccaagcggaaagcggacagagagcatgctccccagcagaagagcggggaaaacgcgaacatccagcccaatatccaactcatcctgagagctgagccaacggttactaacattctgaaaaccatggacgccgatcattcaaaatcgcccgaaggcttgctgggagtgttaggacacatgctgagcggtaagagcttggatttgctgctcgctgcagcagccgctaccggaaaactgaagtcatttgcgcgcaagtttatcaacctcaacgaatttacaacctacggctctgaggagtctactaagccagcaagcgtccgagcgttgttattcgatatctcttttctgatgctgtgccacgttgcgcagacctatggtagcgaggtaattctgagcgaaagcagaaccggggccgaggttccatttttcgaaacttggatgcagacatgtatgcctgaggaaggaaagattctgaatccggatcacccctgctttagacctgacagcacaaaagtggagagcctggtcgccttactgaataattcaagtgagatgaagttggtgcaaatgaaatggcatgaagcttgccttagcatcagtgccgctatactggaaattctgaacgcttgggagaatggagtcctggcctttgaatcaatccagaagatcacggataacatcaaagggaaagtctgtagccttgctgtgtgcgccgttgcttggctcgtggctcatgtcagaatgttgggcttagatgagcgggaaaagtccctacaaatgatacggcagctagccggaccactgttctccgagaatacactgcagttctacaatgagagggtcgtgatcatgaacagtatactcgagcgtatgtgcgcggatgtcctgcaacagaccgcaacgcaaatcaaattccccagcactggggtggatacaatgccatactggaacttactgccccccaagcgccctattaaagaggttctgacagacatcttcgcaaaggtcctcgagaaaggctgggtcgacagtcgatcaatccatatctttgacactttacttcacatgggaggagtgtattggttctgtaacaatctcataaaagagctgctgaaggagacgcgcaaagagcacacacttcgcgcggttgagctcctttactcaatattctgcctggacatgcaacaggtaacacttgtcctgctcgggcatatactgccaggactgcttacagactccagcaaatggcacagcctcatggatcccccgggcaccgcactagccaagttagctgtctggtgcgctctgagctcatattcgtcacataagggccaggcgtcaaccagacagaagaagaggcacagggaagatattgaggactatataagtctgtttcctctggacgatgttcaaccctctaagctgatgagactgctgtcctctaatgaagatgatgcaaacatcctgtcctccccaaccgaccgctcaatgtcctctagtctgtcagcttcccagctacatactgtaaatatgcgtgatcctctcaatagggtgttggccaacctctttttgctcatcagtagcatcctgggtagtcgcacagccggaccacatacacagtttgtgcaatggtttatggaggagtgcgttgactgcctcgaacagggcggccgcggttccgttttgcagttcatgccctttactaccgtgtccgaactggttaaggtgagtgccatgtctagccctaaagtcgtcctagccatcactgacctctctctacccctgggacgacaggtggctgctaaagccattgctgctctgtag

SEQ ID NO: 123650 - DNA, 864 bp, synthetic construct
  misc_feature 1..864: note = Description of Artificial Sequence: Synthetic coding sequence
  source 1..864: mol_type = other DNA
taaaacctcataaaagagcttctcaaggagacaagaaaggagcacacactccgcgctgtcgagttactatatagcatattttgtctggacatgcagcaggtaactttggtgcttctgggccacatcttgcccggactcttaaccgattcttctaagtggcactccctcatggacccgcctggcactgcgctggctaaattagcggtttggtgcgctcttagcagttactcttcccacaaaggtcaggctagcacccgccagaagaagaggcaccgcgaagatattgaggactacatatcactgttcccactggacgatgttcagccgagcaaactgatgcgactcctcagctccaacgaagatgacgctaatatcctgtcatcacctaggtccagtctcggctctccttgtactagttatctccgatgggtaaaagtcggactaggccaccccagaggtgcccctctgctacattcggcggggtgctttcctgctctgcacttgctgagacccactgcggacagaagcatgagtagtagtctcagtgcaagccagttacacaccgtcaacatgcgtgatccactgaatcgcgttctggctaatcttttcttgctaatttcttcaatccttgggagtcgaaccgcagggccccatactcagtttgtccagtggtttatggaggagtgcgtggattgtctggagcagggcggtaggggctccgtgctgcagtttatgccattcaccaccgtctctgagctcgtgaaggtgtcagctatgagctcgcccaaggtcgtgctcgccatcacagatctcagcttaccgctcggtagacaggtggcggcaaaggcaatagccgcgctgtag

SEQ ID NO: 123651 - DNA, 906 bp, synthetic construct
  misc_feature 1..906: note = Description of Artificial Sequence: Synthetic coding sequence
  source 1..906: mol_type = other DNA
atgaaggtggtaaacctcaagcaggccattctgcaggcctggaaggagagatggagtgactatcagtgggcaattaacatgaaaaaattctttccaaagggcgccacctgggatatcttaaacctggccgacgcccttttggagcaggctatgatcggaccctcgccgaatccgctgattctgtcttatctgaagtacgcaatctcctcccagatggtgtcatattcatcagttctaactgccatctccaaatttgatgatttctcccgggacctctgtgtgcaggctctgctcgatattatggacatgttttgtgaccgtttgtcatgtcacgggaaggcagaggagtgtataggcctgtgtcgggcactcctgagcgccctgcactggctgctgcggtgtacagctgcctccgctgagcggctccgagagggcctggaggcaggaacacctgccgcaggagaaaagcaactggccatgtgcttgcaaaggctcgagaaaacactgtcttccaccaagaatcgagccctgctgcatatagcaaagctcgaggaggcttcccttcacacctcacagggcctcggtcaggggggaacccgcgccaaccagcccaccgcatcgtggacagccatcgaacactccctcctgaaactgggtgagattctggcaaatctctcaaaccctcagctgaggagtcaagcagaacagtgcgggaccctgatacgcagcatcccgacaatgctatctgtgcacgctgaacagatgcataagaccggcttccctactgtacacgctgtgattttactggaaggcaccatgaacctgactggggagactcaatctttggttgagcagctcacgatggtgaagcgaatgcaacacatccccactccgctgtttgtgtag

SEQ ID NO: 123652 - DNA, 2700 bp, synthetic construct
  misc_feature 1..2700: note = Description of Artificial Sequence: Synthetic coding sequence
  source 1..2700: mol_type = other DNA
atgccattggtgcctcgctggtgccctactcttctgtcttctcaaccgtcagtatcctgccacggcaaggctgaagagtgtataggtttgtgccgtgctctgttatctgccctccactggctcctgcgttgtacagccgccagtgccgaaaggttgcgggagggcttagaggccgggacaccagccgcaggcgagaaacagctggccatgtgcctgcagcgactcgaaaagacactatcctctacaaaaaacagagccttgctgcatatcgctaagctcgaagaagcctcctcctggacagcaatcgaacactcattgctgaaattgggggagatcctcgctaatctctctaacccgcaactgagaagtcaagccgaacagtgcggcaccttgattagaagtattcccaccatgctgtccgttcatgccgagcaaatgcacaaaacaggctttcccactgtacacgcagttatccttctcgaagggaccatgaacctcacaggcgagacccagtcattggtcgaacagctgacaatggtcaaacggatgcagcacatccccactcctttgtttgtgctggagatctggaaggcctgtttcgttggcctgattgaatcccctgagggtaccgaggaactgaagtggaccgccttcacatttttgaaaattccccaagtgctcgtcaagctgaagaaatactctcacggtgacaaggacttcactgaggacgttaattgcgcgtttgaattccttctaaaactcacccctctcctcgataaggctgatcagagatgcaactgtgattgcaccaacttcctgctgcaggagtgcggcaaacagggcctgctgtctgaggcctctgttaataatctcatggccaagagaaaagccgacagggaacacgctcctcagcagaagagtggggagaatgcaaacatacaaccaaacatccagctgatcctgagagcagagcctacggtgactaatattttaaagaccatggacgctgatcacagtaagtcccccgaagggttgttaggcgtcctcggccatatgctgagtgggaagtccttggacctgctgctggccgccgcggcagcaacgggaaagctaaagagctttgctagaaagttcattaacttgaacgagtttacgacctacgggtctgaggagagcaccaagcctgccagcgttagagcactcctgtttgatatctcttttcttatgctttgccacgtggctcagacatacggatccgaggttattctctccgaaagcaggaccggcgcagaggttcccttttttgaaacctggatgcaaacatgcatgccggaagaggggaaaattttgaaccccgatcacccttgcttcaggcctgactccaccaaggtcgagagccttgtggccctacttaacaattcctctgaaatgaaattggttcagatgaaatggcatgaggcctgcctgtccatttccgctgcgattcttgaaatcctcaacgcttgggagaatggagtcctggccttcgaatcaattcagaaaatcaccgataatatcaagggtaaggtttgcagtctggccgtgtgtgcagtcgcctggctggtcgcgcacgtacggatgttaggacttgacgaacgggagaaaagtctacagatgatcaggcagcttgctgggcccctattctccgaaaacactttgcagttttataatgagcgggtggtcatcatgaatagtattctagaacggatgtgcgccgacgtgctgcagcagaccgccacccaaataaagttcccaagcacaggcgtggataccatgccgtattggaatctactgccacctaagcggcccataaaggaggttcttacagacatttttgccaaggttctcgagaagggttgggtagattcccgttccatacatatttttgatactctgctacatatggggggagtatactggttctgcaataaccttatcaaagaactgctgaaagagacccgtaaggagcacacactgagagcagtggagctactgtatagtattttctgtttagacatgcagcaggtaactttagttctcctcggccatatcctgcccgggttgcttaccgattcctctaaatggcactcgctcatggacccccccgggactgcattagcaaagctggccgtgtggtgcgctctctcctcatacagttcccacaaggggcaagccagtactcggcagaagaagcggcatcgcgaggatattgaggactacattagcctgtttccattggatgatgtacagcccagtaagctgatgaggcttctgtcatctaacgaggacgacgctaatattctcagctctcccaccgatcggtcaatgagctcgagcttgtctgcatctcagctgcacaccgttaacatgcgcgaccctctgaatcgtgttctggctaacctcttcttgcttattagcagcattctcggtagtcgtacggcggggccgcacacgcagttcgtgcaatggttcatggaggagtgtgtggattgcctcgagcaaggggggcgtggttccgtgcttcaattcatgccgttcactactgtgtcagagctggtcaaggtgtcagcaatgtcctctcctaaagtcgtgctggcgattacggacctgagcctgcccctggggaggcaggtggccgcgaaagccatcgcagcattatag

SEQ ID NO: 123653 - DNA, 756 bp, synthetic construct
  misc_feature 1..756: note = Description of Artificial Sequence: Synthetic coding sequence
  source 1..756: mol_type = other DNA
atgaagaagttcttcccaaaaggcgccacgtgggacattctgaacctggcggacgctttattggaacaggccatgattggtccgagccctaacccactcattctatcctatttgaagtacgccattagtagtcagatggtgtcttatagttcggtccttactgccatcatggagattctgaatgcgtgggaaaacggagtcctcgcgttcgaatccattcagaaaattaccgataatattaaaggaaaagtctgttccctggccgtttgcgcagtggcctggttagtagcccacgtgagaatgctgggtctagacgagcgtgagaagtccctgcagatgatacggcaactggctggaccattattctctgagaatactcttcagttttacaacgaacgggtagttattatgaactctatcttggaacgaatgtgcgccgacgtgctgcagcaaaccgccactcagatcaagttcccttccactggggtggataccatgccttattggaatctgctacctcccaaacgccccatcaaggaggttttaaccgacatttttgccaaggttttggagaaaggttgggtggactctcgaagcatccacatcttcgatactttattgcacatgggaggagtttactggttttgcaataatctcattaaggagctgctgaaagagactcggaaggaacacacgttgagagctgttgagctgttgtattctatcttttgcctcgatatgcagcaagtcacctag

SEQ ID NO: 123654 - DNA, 2466 bp, synthetic construct
  misc_feature 1..2466: note = Description of Artificial Sequence: Synthetic coding sequence
  source 1..2466: mol_type = other DNA
atgatcggaccctcacccaaccctttgattttgagctatttgaagtatgctatctcatctcagatggtgtcatactcttctgtgctcacggctatcagcaaatttgatgatttctcacgcgacttatgcgtgcaggcattgttggacataatggatatgttctgcgatcgactttcgtgccatggaaaggcggaagagtgcatcggactctgtcgagccctgcttagcgctttgcactggcttctgagatgcactgccgcctcggcagaaaggcttcgagagggactggaggcaggaacccctgcagccggtgaaaagcagctggcgatgtgcctccagcgcttggagaaaaccctgagcagtacaaaaaatcgtgctctgttacacatcgctaaattggaagaggcaagcagctggaccgctatcgaacacagccttcttaagctcggagagatcctcgctaatctgtcaaacccccaacttcgctcccaggctgagcagtgtggaaccctcatccgttcaatcccaacaatgttatccgtgcatgcagagcagatgcataagactggattccctactgttcacgcagtcatacttctggagggaactatgaatcttaccggagagacccaatccctggtcgagcagttgactatggtgaagcgcatgcagcatatccctacgccactctttgtgctggaaatatggaaagcctgttttgtggggctgatcgaatcccccgaaggaactgaagagctcaagtggacagcctttacattcctcaagatccctcaagtgctggttaaactcaagaaatattcgcatggcgacaaagatttcacggaagacgtaaactgtgcctttgaatttttactgaagttgactccactactggataaggctgatcagcggtgcaattgcgactgtactaactttttgctacaggaatgtggaaagcaaggccttttaagcgaggcctcagtaaacaacctgatggctaagaggaaggcagatcgggagcatgcaccccagcagaagagcggtgaaaacgcgaacatccagccaaacattcaactcatcctgcgcgctgagcccactgttaccaacattcttaagactatggacgctgaccattcaaagagccccgaaggccttctcggggtgctggggcacatgctcagtggcaaatccctggacctgctacttgccgctgccgccgctaccgggaaactgaagtcgttcgctcgcaagtttataaacctaaacgaatttactacctatggcagcgaggagtcaacaaaacccgccagcgtgcgcgccctactatttgatatttcgtttctgatgctgtgccacgtcgctcagacgtatggctctgaagtaatactttctgagtcacgcaccggcgcggaggtcccctttttcgagacctggatgcagacgtgcatgcctgaggagggcaagattttaaaccccgaccacccttgttttcgacctgattccactaaggttgaatcactcgtcgccttattaaataacagttcagaaatgaagctggtgcagatgaaatggcatgaggcttgtctttccatctctgctgccattctcgaaattctcaacgcttgggagaacggcgtgctagcctttgaaagcattcagaaaatcacggataacataaaaggtaaagtgtgttctctcgcagtctgcgcagtggcctggttggtggcgcatgtcagaatgcttggtctggacgagagagaaaaaagtctacaaatgatccgacagcttgcagggccactcttcagcgaaaatactctgcagttctataacgaacgcgtcgtcataatgaactccatcctagaaaggatgtgtgccgacgtgctgcagcaaactgcaacacagatcaaatttccctccactggagtggatacaatgccgtattggaaccttctccctccaaagcgccctatcaaagaggttttgaccgacatctttgcaaaagttttagaaaaaggctgggttgattctcggagtatccacatctttgatactttactgcacatggggggcgtgtactggttctgtaacaaccttattaaggaactgttaaaggagacacgcaaggaacatactctcagagcggttgaactcctctactccatcttttgccttgatatgcaacaggttacactggtcttgctggggcacattctgccagggctgcttacggattcgtcaaaatggcatagtctcatggaccccccagggaccgccctggctaaattggccgtttggtgcgctctgagctcctacagtagtcacaagggacaggcctcgactagacaaaagaagcgccaccgcgaggatattgaagactacatctcccctaaagtcgtcctggccataacagacctaagcctccctcttgggcgtcaggtcgccgccaaggcgatcgctgctctgtag

SEQ ID NO: 123655 - DNA, 1026 bp, synthetic construct
  misc_feature 1..1026: note = Description of Artificial Sequence: Synthetic coding sequence
  source 1..1026: mol_type = other DNA
atgaagaagttctttccaaagggggccacctgggatatcctgaacctggccgatgctcttctcgaacaggccatgatcggcccgtcgcccaatcccctgatactatcttaccttaagtacgccatctctagtcaaatggtgagttattccagcgtcttaaccgctatttctaaatttgacgactttagccgagacttatgcgtgcaggcacttctggacataatggatatgttctgtgacagactgagttgtcacgggaaagctgaagaatgtattggactgtgcagagcgctcctgtctgctttgcattggctcttgcggtgtaccgcagccagtgcggagcgcttgagggaagggctggaagccggaacgccggctgccggggaaaagcaattagccatgtgcctgcagcgcttggaaaagacactctccagcacgaagaatagagctctgctccacattgccaagctggaagaagcaagtagttggaccgcgatagaacactcactgctgaagttaggggagattcttgccaacctgtccaatccccaactccggtcccaggccgagcaatgcgggactttaatcagaagtattccaaccatgctgtcggtgcacgcagaacagatgcataagaccggcttcccaacagtgcatgccgtgattctcctggaaggaactatgaatctcaccggagaaacccagtcgttggtcgaacagcagacggcaacccaaattaagtttccctcaaccggtgtcgacactatgccttactggaacctgcttcctcccaaaaggcctattaaagaagtcctgacagacatttttgccaaggtgctggaaaagggatgggtcgactccaggtcaatacatatattcgataccttattacacatgggcggcgtctattggttctgtaataacctcatcaaagaactcctcaaagagactagaaaagagcataccctcagggccgttgagctgctctactccatattctgtctggatatgcagcaggttacctag

SEQ ID NO: 123656 - DNA, 2796 bp, synthetic construct
  misc_feature 1..2796: note = Description of Artificial Sequence: Synthetic coding sequence
  source 1..2796: mol_type = other DNA
atgaaagtggtaaatctgaagcaggcgattctccaggcttggaaagagagatggagtgattatcagtgggcaatcaatatgaaaaaattctttcccaagggtgccacctgggatattcttaatctcgcagatgccttgctggagcaggccatgattgggccgagccctaaccccttgatcctgagctatctgaaatatgccatctcgtcccagatggtatcctattcctctgtgctgacagcaattatgtgtctacaaaggttagaaaagaccctttcctcaaccaaaaatcgggccctgttgcacattgcaaaacttgaagaagcatcattgcataccagtcagggattaggacagggggggacgcgcgcgaaccagcctactgcatcgtggaccgcgatcgaacattcactcctcaagctaggagagatcctcgcaaacttgagtaacccccaactccgctcacaggcagagcaatgcggaaccctaattcgctcaatcccaacaatgctgtccgtccacgccgaacagatgcacaaaacaggatttcctactgtacacgcggtcattctgctcgagggtactatgaacctgaccggagagacccagtctctcgtcgagcagctaaccatggtaaagagaatgcagcacatccccaccccgcttttcgtcctcgaaatttggaaggcatgctttgtcggcctgatagagagtcccgagggcacggaggagcttaagtggaccgccttcacatttctgaagattcctcaggttctcgtcaagctcaagaagtattcccatggcgataaggacttcactgaagatgtcaattgtgcattcgaattcctgctgaaactgacgcctctgctggacaaggctgatcagcgctgtaactgcgactgtacgaattttttactgcaagaatgtgggaagcaggggctcttatccgaagcgagtgtgaataacctgatggctaagaggaaggcagaccgggaacacgccccacagcagaagtcaggcgagaatgcaaacatccagcctaatatccagctgattctgcgagcggagccaaccgttaccaatatactaaaaacgatggatgccgatcacagtaagtcacccgaaggtctcctcggcgtcctgggccacatgctgagcgggaaaagcttggacctgctactagcggccgccgcggcaaccgggaaattgaaatccttcgctaggaagtttataaacctcaatgagttcactacatatggctctgaggaaagtacgaagccggcttctgtgcgagccctgctctttgatatcagcttcctgatgctgtgtcacgtggctcagacttacggctcggaagtgatcttaagcgaatcacgaaccggagcagaggtgcctttcttcgaaacatggatgcaaacttgtatgcctgaagagggcaaaatactcaaccctgaccacccttgttttcggccggatagcacgaaagtggaaagccttgtggccctactgaacaactcttctgagatgaagttagtacagatgaagtggcatgaggcctgtttatctattagcgccgctatactggagatacttaacgcctgggagaatggggtactggccttcgagtccattcaaaagattaccgataacattaaaggaaaggtctgctcactggccgtatgcgcagtggcgtggttagtcgcacatgttaggatgctgggcctcgatgagagagagaaaagtctacaaatgattaggcagttggccgggcctctctttagcgaaaacactctgcagttttacaacgagagggtcgtgatcatgaactccatactcgagagaatgtgtgccgacgtgctgcaacagacggccactcaaatcaaatttccttccacgggggtggatactatgccttattggaatctcttacccccgaaacggcctattaaggaggtgctgactgatattttcgcaaaagtactagaaaagggatgggtggatagccgatccattcatatattcgacacgttacttcacatgggaggcgtgtattggttctgtaacaacctaatcaaggaattactgaaggagacaagaaaagagcacactctgcgcgctgttgagctgctttattctattttctgtctggacatgcagcaagtcacgcttgtactgttgggacacatattgcccggattgcttactgactcgtccaaatggcatagcctaatggaccctcctgggacagctctcgcaaaactggctgtatggtgtgccttgagcagttactcttctcacaagggacaagcaagcacacgccaaaaaaagcgtcaccgggaggacatcgaggactacatttctttgtttccgttagacgacgtccagcccagtaagcttatgcgtctgctcagtagcaatgaggacgatgccaacatcctgagcagcccaacagatcggtccatgtcctcttccctctccgcctcacaactccacaccgtgaacatgcgagacccgttgaacagggtgttggccaatctcttcttactaatatccagtattctaggctctagaaccgccgggccccatacgcaatttgtacagtggtttatggaagaatgtgtggattgtctcgaacagggggggagagggtctgtgctccagtttatgccattcactactgttagcgaattggttaaagttagcgctatgagttcccccaaagtcgtccttgccatcactgacctgtccctgcctctgggaaggcaagtggctgccaaggccatcgcggccctctag

SEQ ID NO: 123657 - DNA, 444 bp, synthetic construct
  misc_feature 1..444: note = Description of Artificial Sequence: Synthetic coding sequence
  source 1..444: mol_type = other DNA
atgaaaaagttctttccaaaaggagcgacatgggatatactgaacctcgcggatgcattactcgagcaggcaatgattgggccaagtcctaatccattgatcctgtcttacctgaaatacgcaataagctcacagatggtgtcttactccagtgtgctaaccgccatctctaagttcgacgactttagccgcgacttgtgtgtccaggcattgctggatattatggacatgttttgcgatcggttatcatgtcatggaaaagctgaagagtgtatcgggctgtgtagggcactcctcagcgcacttcacttcatgccctttaccaccgtttccgagctggtgaaggtgagcgctatgtcaagtcccaaggtcgtgcttgccatcacagatctgtccctaccccttgggcgtcaggtagccgctaaagccatagcagcgctctag

SEQ ID NO: 123658 - DNA, 921 bp, synthetic construct
  misc_feature 1..921: note = Description of Artificial Sequence: Synthetic coding sequence
  source 1..921: mol_type = other DNA
atgaagaagttctttccgaagggtgctacatgggatatactaaacttggcagacgctctgcttgagcaggcgatgataggaccctcccccaacccgctgatcctgtcctacttaaaatatgctataagtagccagatggttagttattcgagtgtgctgactgcaatctctaaattcgacgatttctccagggatttgtgcgtgcaggccttgcttgatatcatggatatgttctgcgatcgcctttcttgccacgggaaggctgaagaatgcatcggactgtgccgtgccctgctgtcagccctgcactggctccttagatgtactgccgccagtgccgagcgcctgcgcgaaggccttgaagccggaacacctgcggccggagagaagcagctggccatgtgtctgcagaggctggagaagacacttagtagcaccaagaaccgagcattactgcacattgctaagctcgaagaagcttcttcttggactgcgatcgagcactcgcttttgaagctgggcgagatcctggctaacctgtccaacccgcagctgcgctctcaggctgagcagtgcgggacgctgatacgctcaattcccaccatgctgtctgtgcacgcggagcagatgcataagacaggctttccgactgtccacgccgtgatattgctcgagggaacgatgaatctgactggagaaacacagtctctggtcgagcagctgactatggtgaagcgaatgcagcatatccccactcctcttttcggccgtggctctgtgctgcagtttatgccctttacgacagtcagtgaacttgtaaaggtctcagccatgagctctccaaaagtagtactcgccattactgacctgtccctgccactcggcagacaggtagccgcaaaggccattgccgccctgtag

SEQ ID NO: 123659 - DNA, 2244 bp, synthetic construct
  misc_feature 1..2244: note = Description of Artificial Sequence: Synthetic coding sequence
  source 1..2244: mol_type = other DNA
atggtgccaggatcggaaggtcctgctagagctggcagcgtcgttgccgacgtggtgttcgtgattgagggcacagccaacctcgggccatatttcgagggcctcaggaagcactatctattacctgctatagagtacttcaatgggggcccgcccgcagagaccgattttggcggggattatggtgggacgcaatacagcttggttgtgttcaatactgttgattgcgcaccagagagctatgtgcaatgccatgccccgacttcatccgcatacgaattcgtgacttggttggatggaattaaattcatgggcggcggcggggagtcttgcagtctgatcgctgaaggtttaagtactgctttacagctcttcgacgacttcaaaaagatgcgcgaacagataggccagactcaccgcgtctgtcttctgatatgcaactcacctccgtacctgctacccgccgtggagtctaccacctattctggatgcactacggaaaacttggtgcagcaaatcggtgagcgaggtatccacttctccattgtgtcaccgcggaaactccccgccttaaggctcctcttcgaaaaggccgcacctccggcactgcttgaacctttgcagccccccaccgatgtgagtcaagatcctagacacatggtccttgtgagagggctggtcctgcctgtgggaggaggttcagcgcccggccctctgcagtctaaacaaccagtccccctgcctccggctgctcctagcggcgcaacactcagtgctgccccacagcaacccttgcctcccgtgccccctcaataccaggtgccaggcaatctctccgccgcccaagtggcggcacaaaacgcagtcgaggccgctaaaaatcagaaggcaggcctcgggccccgattttcccctatcacacctttacaacaagctgcccctggcgttggaccacctttctctcaagctcctgccccacagctaccacccggcccgccaggcgctcctaagcctccccctgcttcgcaacccagccttgttagtacggtggcccctggcagcggcctggctcctaccgcccagcccggagctccgtccatggccggcaccgtggctcccggaggggtatctgggccatccccggcacagttgggagcgcccgcccttggaggtcaacagagtgtatcaaacaaactgctagcatggagcggcgtgcttgagtggcaggagaagccgaagccagcttctgttgatgccaatacaaagctgacacgttctttgccctgccaggtgtacgttaaccacggtgagaatctgaaaaccgaacagtggccccagaagctgataatgcagctgattccccagcaactgctgaccacacttggcccactgtttcggaactcaagaatggtccagtttcatttcaccaacaaagacctggagtctcttaaaggattatatagaatcatggggaatgggttcgctggatgcgttcactttccacatacagctccctgcgaggtgcgagtgctcatgcttctgtacagcagcaaaaaaaaaatcttcatgggcctgattccatatgatcagagtggctttgttaatgggatcagacaagttatcaccaatcacaagcaggtgcagcagcagaaactggagcaacaacagagaggaatggggggtcagcaagccccaccgggactgggaccaatattggaggaccaggccagaccaagtcaaaatttactccaactgaggcccccccagccacagcctcagggcactgtaggcgcctcaggcgcaacaggccagcctcagcctcaagggactgcccagccgcctccaggggcccctcaggggccccctggggctgccagtgggccacctccccctggacccatactgcggcctcagaaccccggtgccaaccctcaactgaggtcccttctattgaatccccccccgccacagactggtgtaccaccaccgcaagccagtctgcaccaccttcagcctccaggagccccagcactacttccccctccccaccagggcctgggccagccacagctggggcctcccttgctgcaccctccaccagcccagagctggcccgcccaactcccaccaagggctcctctgccaggtcaaatgctcctgtcaggaggtcccaggggccctgtcccccagcccggtctgcagccatccgtgatggaagatgatattctcatggacctgatatag

SEQ ID NO: 123660 - DNA, 2268 bp, synthetic construct
  misc_feature 1..2268: note = Description of Artificial Sequence: Synthetic coding sequence
  source 1..2268: mol_type = other DNA
atggtccctggctccgagggccctgcgagggcgggttctgttgtggccgatgtagtgtttgtgattgaaggaaccgcaaacctaggcccttattttgaaggactgagaaaacattatcttcttcccgcaatagagtactttaacgggggcccccccgccgagactgacttcgggggggattatggcggcacccaatacagcttagtggtgttcaacacagtcgattgtgctcccgagagttatgttcagtgtcacgcccccacttcttccgcatacgagttcgtcacatggctcgacggcatcaaattcatggggggagggggcgaatcctgcagcttgatcgccgaggggcttagcacagcactgcagcttttcgacgattttaagaaaatgcgagaacagataggccagactcatagagtctgcctgctcatatgcaactcacccccatatttgttgcccgcggtcgaatctaccacttactcaggctgcaccacagagaatttagtccagcagataggcgaaagaggcatccacttctccatcgtttctcctaggaagctgcctgccttacgcctgcttttcgaaaaagcagcccctcctgctttacttgagccactgcagccccccaccgacgtgtcacaggaccccaggcacatggtgctggtgcggggcctcgtgctgcccgtcggcggcgggagcgccccaggccctctgcagagtaagcaacctgtacccttaccaccagccgccccaagtggtgcaacactatcagcggctccccagcagccactgcccccagtcccccctcagtatcaggtgcccggcaacctgagcgccgcacaagttgcagcccagaatgccgtagaagccgccaaaaaccaaaaagccggtctaggtcctaggttcagtccaatcactccccttcagcaagccgcccccggcgtgggcccgccctttagccaagccccagccccccagctacctcccggtccacccggagcccctaaaccaccaccagcctcgcaaccctccctcgtgagtaccgtggcccccgggtcagggctcgcgccaactgcccagcccggcgcaccatctatggcaggaacagttgctcccggcggagtgagtggccccagtcccgcccagctgggtgctccagccctcggcggccagcaatccgtgagcaataagttgctcgcttggtcaggagtccttgagtggcaggagaagccaaaacctgccagcgttgacgccaatacaaagctgacccgctcgctcccctgccaggtgtacgtgaatcacggggaaaatctaaaaactgagcaatggccccagaagttgataatgcaactgattcctcagcagctgttgaccaccctcggaccactgtttaggaattctcggatggtccagttccatttcactaacaaggacctggaaagcctgaaaggcctgtatagaattatgggaaacggcttcgccggctgcgtccacttcccacacacagccccctgtgaagttcgggtgctcatgctgctgtacagcagcaagaaaaaaattttcatgggcctcataccttatgatcagtccggtttcgtgaacggtattcgacaggtcatcacaaatcacaaacaggtccagcagcaaaaactcgaacagcaacaacgggggatgggaggacagcaggccccccccggactgggacccatcctggaggaccaggccaggccatctcagaatctcctgcagctcagacctccccaaccccagccacagggaacggtgggcgcctcgggcgctaccggccagcctcaaccacagggcacagcgcagccccccccgggagccccccagggcccccccggcgcggcatctggcccgccccccccagggcctatcctgaggcctcagaatcccggtgcaaatccacagctcagatccctcttgctcaatcctcctccccctcagactggagtgcctcctccacaggctagtctccatcatcacctgccaagccctggtcctcacaacttcccactcgggcttcactgtcaagtgagaggccctggggggggtcagcgatctggcctttctgttccggcggcccccggcctggagcatcaggacagagtgctcctgggcagtaaagacattgggtccaagaacgaaggctcccccatccgggcatgttcaccagcctcctggagaacgacttctagctggatttcctctgagtcaccaactcccaacaaggtcccgttttag

SEQ ID NO: 123661 - DNA, 2349 bp, synthetic construct
  misc_feature 1..2349: note = Description of Artificial Sequence: Synthetic coding sequence
  source 1..2349: mol_type = other DNA
atggtaccaggaagcgagggccctgccagagcaggttcagtcgtcgccgatgtggttttcgtgatcgaaggcacagccaacttaggaccatacttcgaggggctgcggaagcattaccttctccctgcaatcgagtatttcaacggcggccctcccgctgagactgatttcggtggagattatggcggcacgcagtacagcctagtggttttcaacacagttgactgtgctcctgagagctatgttcaatgccacgcaccaacttcctctgcatacgagtttgtgacctggctcgacggcataaaattcatggggggcggaggcgagtcttgcagcctgattgcagaggggctcagcacggcacttcagttgttcgatgacttcaagaaaatgagagagcagatcggccagactcacagggtctgtctgctaatttgtaattcccccccttaccttctacctgcggttgagtctacaacctactccggatgcaccacagagaacctcgtccagcagatcggggagagaggtatccattttagcatcgtgagccctcggaaattgccagccctgcggctcctgttcgagaaagcggccccacctgccctgcttgagccactccagcccccaaccgatgtatcccaggatccaaggcatatggtgctggtgcggggtctcgtcttgccagtcggcgggggctccgcccctgggcccttgcagagcaagcagcccgtccctctgccacctgcagcaccttcaggcgcgaccctcagtgctgctccccaacaacctctgcctcccgtgccacctcagtaccaggtgccagggaatctgtctgccgcacaggtggccgctcaaaacgctgtcgaagcagccaaaaatcagaaggccggactaggacccaggtttagcccaatcacccccttgcagcaggccgccccaggagtgggaccacctttcagtcaagcacctgcacctcagcttcctccagggcctccaggagctcctaagccgcctcctgcatcccaacccagccttgtctccacagtagcaccaggctctggcctcgccccgactgcgcagccaggggcccctagcatggcaggcactgtcgcaccagggggggtcagcggaccttctccagcccagctgggcgcacctgctctgggaggacaacagtccgtgagcaacaagttgctggcttggagcggcgtgttggagtggcaggaaaaacctaaacccgccagcgtcgacgcaaataccaaactcacccgtagtttaccttgtcaagtctacgttaaccacggcgaaaatcttaaaaccgaacagtggccacagaagctgatcatgcagttaattcctcaacaactgctgactacccttggacctctctttcggaactcacggatggtgcaatttcactttaccaacaaggaccttgagtcactcaagggtctgtacaggattatgggaaatggattcgccggttgcgtacacttccctcacactgccccttgtgaagttagggtgttgatgcttttatacagcagtaaaaagaaaatatttatggggttgatcccttacgatcagtccggattcgtcaatggcatccgccaagtgatcacaaaccacaaacaggttcagcagcagaagctggagcagcagcagcggggaatgggagggcagcaagcgccccccgggctgggccccattctcgaagaccaggcaagaccgagccaaaaccttctgcagctgagacctccccaaccccaaccccagggcaccgtgggcgcttctggcgcgactggccaaccacaaccgcaaggcacagcacagcctcctccgggcgctcctcagggtcctcccggggcggccagcggtcctcctccccctggaccaatcttgaggcctcagaatccgggggctaatcctcagttgagatccctgctactcaatcccccccccccgcaaacaggcgtccccccaccccaggctagcctgcaccatctgcaacctccaggagccccggcactgctgccccctcctcaccagggacttggccagcctcaattggggccacccctcctccatccaccacccgctcagagctggccagctcagttgcctccccgggctccgctcccagcagcgaaacggaaacgagaaggagagggaagagttttcagggagaagtgggagcgggcctatttctttgtagaagttaaatcaatgccgatgtgcttgatctgcaagcagattgtgagtgtgcttaaagaatacaacctgaagcgccactacgaatccaagcattcaaagtcttacgatcagtatacagaacaaacgcgatag

SEQ ID NO: 123662 - DNA, 1449 bp, synthetic construct
  misc_feature 1..1449: note = Description of Artificial Sequence: Synthetic coding sequence
  source 1..1449: mol_type = other DNA
atggtgcctggatctgaagggcctgcgcgtgcagggtccgtcgtagcagatgtagtgttcgtgatagaaggtactgctaaccttgggccatactttgaggggctcaggaaacactacctgttaccggccatagaatattttaatggcggccctccagcccctttctctcaggcccccgcccctcagttacctcccggaccacccggagctcccaaacccccacctgccagtcagccatccctggtctctactgtcgcacccggatctgggctcgccccgacagcccagccaggagctccttcaatggctgggacagtggcccctgggggggtgtccgggcccagtcccgctcagctgggcgcacctgccctggggggccaacaatccgttagcaataagctgttggcatggtcaggggtccttgaatggcaagaaaagccaaaacccgcatccgtggacgcaaacaccaagctaacccgcagcctgccgtgtcaggtttacgtcaaccatggggagaatctgaagaccgagcaatggccccagaaactcattatgcagttgatcccacaacagctgctaacaacactggggcctctttttcggaactctcgtatggtgcaattccatttcacaaacaaagatctggagtctctcaagggcctgtatagaatcatgggtaatggattcgctggatgcgtgcattttccacacacagccccatgtgaggttcgggtcttaatgctgctgtacagctctaagaaaaagatctttatgggcctgattccatatgaccagtctggctttgttaatggcatcagacaggtaatcactaatcacaagcaggtgcagcagcaaaaacttgagcagcagcagcgggggatgggtggtcagcaggctccgccaggtctgggcccgattctcgaggaccaggcacggccgtcccagaatctcttgcagctccgaccgcctcaacctcagccacaaggtacggtgggcgcaagcggagccaccggccagcctcagccccaaggcaccgcacagcctcctcccggggcccctcaaggaccccccggggcagcaagcggccccccccctccgggacctattctgcggccacaaaatccaggggctaatccccagctgcgcagccttcttctgaaccctcctccacctcagacaggcgtccctccgccacaagcatcactgcaccatctccagcccccgggcgccccagccttactcccaccaccccatcaggggcttggccagccccagctggggccgcctcttttgcatcctccacccgctcaatcatggccagcgcagttgccaccacgggcgcccctgcccggtcagatgttgttatcaggcgggccacgtggccccgttccacagcctgggttgcagccatctgtcatggaagacgatatattgatggacctgatctag

SEQ ID NO: 123663 - DNA, 2385 bp, synthetic construct
  misc_feature 1..2385: note = Description of Artificial Sequence: Synthetic coding sequence
  source 1..2385: mol_type = other DNA
atggtgcccggctcagagggtcctgcgcgggctggatctgtggttgccgacgtggttttcgtaatcgagggtaccgccaacctcggcccttacttcgaaggcctacgaaaacattatttactccctgccatcgagtacttcaacggtggcccgcctgcagaaaccgacttcggcggggactacggcggaacccagtattctctcgtggttttcaatacagttgactgcgcgccggaaagctatgtgcaatgtcacgccccaaccagttctgcatacgaatttgtcacttggctggacggaattaagttcatggggggaggtggtgagtcctgtagccttattgcagaaggccttagcacagccctgcagcttttcgacgattttaaaaaaatgcgggaacagataggccagacccacagggtttgtcttctgatctgtaacagtccaccttacctcctgccagctgtggagtcaacgacatattccgggtgcactaccgagaatcttgtccagcaaatcggcgagaggggcattcatttttccatagtgtcaccccgtaaactgcctgcactgagactgttgttcgagaaggctgccccccccgctctgctggagcctttgcaacccccaacggatgtttctcaagaccctagacacatggtactggtgcggggccttgtgctcccagtgggggggggatcagcccccggtcccctgcaatcaaagcaaccagtccctctgcctcccgccgcccctagcggggctacactgtccgccgcccctcagcagccactcccccccgtgcccccacaatatcaggttcctggaaatctctccgcagctcaagtggccgctcagaatgcagtggaggcggcgaagaaccagaaagcgggcctcggaccgcggttcagtccaatcactccactgcagcaggctgctccaggagtcggccccccattctcccaggccccggcgccccagctccccccaggacccccaggcgccccgaagccccctccagcttcacaacctagcctggtctctactgtcgctcccggttcaggactggcgccaactgcccaaccaggtgcgccatccatggccggcaccgtcgccccaggcggggtcagcggcccatcacctgcacaactaggcgcacctgctcttggcgggcagcagagcgtatctaataagctgctggcttggagcggcgtcctggagtggcaggaaaaaccaaaacccgcctccgtggatgccaacaccaaactgacacggtctctcccttgtcaggtttatgttaaccacggtgagaatttgaaaaccgaacagtggccacagaagctcattatgcagctgattcctcagcaattgttaactaccctcgggcctttgttccggaactctcgaatggttcaatttcacttcactaataaagacctggagagtctgaagggtttgtatcggattatgggcaacggattcgccggttgcgttcacttcccccacaccgccccatgtgaggtgagagtcctgatgctgctgtacagtagtaagaagaaaatatttatgggattgattccctatgatcagagtggatttgtaaatggcatacggcaagtaattacaaatcataaacaggttcagcagcagaagctggagcagcagcagcggggcatgggcggccagcaagcgcctcccggcctgggacctatcttggaggaccaagctcgacctagccagaacctgctccagctgcgtcccccacaacctcagccccaggggaccgtgggggcttcaggggcaaccggccagccccagccacaggggaccgcacagcctcctccaggggccccccagggcccccccggggctgctagtggacccccaccccctggtcccattctgaggccacagaatccaggcgcaaaccctcaattgaggagcctgctgctcaatcctccacctcctcagacgggggttccaccaccacaggcctccctccaccatctgcagccccccggtgctcctgcactgctgcccccaccccaccagggactcggccagccacagcttgggccccctctactgcatccgccccctgacggggcgcgccggtctgacgcggcagagcgagggagcccaggaccaggtcgcagccctcagtcccctccactgccccttgggtttcctgtgcgccagcgggtcaccgcattccatgtgagcattaccagtgggaagaccaaagagcgtaggagggggccgtgcgtgagcagaaagatgggggcaagtctgtttctctgtggctccgaagaacatgcttacgtgttcaacatgcagacaaacagagtctgtgtagagcgaatacaacccgagacccccctttag

SEQ ID NO: 123664 - DNA, 2175 bp, synthetic construct
  misc_feature 1..2175: note = Description of Artificial Sequence: Synthetic coding sequence
  source 1..2175: mol_type = other DNA
atggttcccggttccgaagggcccgctcgagctggctcagtagtggctgatgtcgtgtttgtcatcgagggtacagccaatcttggaccatattttgaggggttgaggaaacattatctgttaccagccattgaatattttaatggcggcccccccgctgagacagacttcgggggagattacggcggcacacagtacagcctggtggtcttcaacactgtagattgcgccccggagagctacgtccagtgccacgccccaacttcatcagcttacgaattcgtgacatggctggatgggattaagttcatgggagggggcggagagagctgtagcttaatcgcggaagggctctctacggccctgcagctgtttgacgattttaagaaaatgagagaacagattgggcagacccatagagtctgtctcctgatctgcaactcccctccgtatctgctgcccgctgtggagtcaacgacctactctggttgtactacagagaatctcgtgcagcagattggcgaacggggcatccatttctccattgtctctccccgaaaattacctgccttacgcctcctgttcgaaaaggccgctcctccggcactgttggagccactccagcccccgacggacgtaagtcaggatccccggcacatggttctcgtcagagggctggtgctccccgtgggcggaggtagcgcaccaggacctcttcagagcaagcagcccgtaccattaccacccgctgccccctcaggcgctacgttatccgccgctccacagcagcctctcccccccgtcccgccacaataccaagtaccaggcaatctcagcgccgcccaggtcgccgcacagaatgctgtcgaagctgccaagaaccaaaaagcaggcctcgggccacggttctccccaatcacgcccttgcaacaggccgccccaggagtcgggcctcctttctcgcaggcacctgcgcctcagctgcctccagggcccccgggtgctccaaagccgccccccgccagtcagccttctttggtgagcaccgtggcccccggtagcggcttggctccaacagcgcagcccggagcccctagtatggccgggacggtagctcccggtggtgtcagcggtcctagtcccgcacagcttggcgccccggccctgggaggccagcaatctgtatccaacaaactcttggcctggtccggagttctggaatggcaagagaaaccaaaacctgctagtgtcgatgccaataccaagttaactagatccctcccctgccaagtgtatgtaaatcacggtgaaaacttaaagactgagcagtggcctcagaagctaattatgcagctgatcccacagcagctcctgaccacactcggccctctttttagaaatagtcggatggtccagttccactttaccaacaaggacttggagagtctgaaaggcctctaccgaataatgggaaacgggtttgctggatgcgtgcatttccctcatacagctccatgcgaggtgcgggtccttatgctcctgtactcatccaagaaaaaaattttcatggggctgattccatacgatcagtcaggattcgtaaatggaattagacaggtaatcacaaatcacaagcaggtacaacagcagaagctggaacagcagcagagaggaatgggaggtcagcaagctcctcctgggctcggacctatcttagaggaccaggccagacccagccagaatcttttacaactccgacctccccagcctcagcctcccccaggcgcgcctcagggcccacccggcgccgccagcggaccgccccctccagggccaattctgcggcctcagaaccccggtgccaaccctcaactgcgcagcctgctactgaatccacctccgccacagaccggcgttccgcctccccaggcgtcactgcatcatcttcagccaccaggggccccggccctgcttcctcccccccaccagggtttagggcaaccccagctgggccctcccctgctacacccccctccagcacaatcctggcctgctcagctgccacctcgcgccccgttgcctggaaagggcactagagggagggccgaagtatggactgagtgtccaagcagttcatgggccagggcaccacgtccatccgccccaggcaaatag

SEQ ID NO: 123665 - DNA, 753 bp, synthetic construct
  misc_feature 1..753: note = Description of Artificial Sequence: Synthetic coding sequence
  source 1..753: mol_type = other DNA
atgcttctgtactcttctaagaaaaagatcttcatgggactgataccctacgatcagagcggctttgttaacggaatccgccaggtcatcacgaatcacaaacaagtgcagcagcagaagttagaacagcagcagcgcggcatggggggccagcaagccccccctggcctggggcccatcctggaagaccaggccaggccatcacagaacctcttgcagctgcggccccctcagcctcagccccaggggacggtcggtgcctccggggccaccggacagccacagccccagggcacggcgcaaccgcctcctggtgcgccccaggggcccccaggagctgccagtgggcccccccctcccggaccaattttcggaccacggacactaggccctaccttatcttgtgaagcaagttcttccactcatcaccgacgccggctgggttgcccccaccccagacccccctccaccacatcttcacaccaggggcttctgagatgttgcctccgcaggcagggactcggtcagcctcagctgggtcctcactcatgcatacatcacctgccttcacctggacctcacaattttccactcggacttcattgccaggtgcggggccctggcggaggtcagcgctctggactgtccgtccccgcagctcccgggctagagcatcaggacagggttctactgggaagcaaggacatcgggagcaagaacgaaggctccccgatggccttcgccgagttgtag

SEQ ID NO: 123666 - DNA, 1605 bp, synthetic construct
  misc_feature 1..1605: note = Description of Artificial Sequence: Synthetic coding sequence
  source 1..1605: mol_type = other DNA
atggtccccgggtcagagggaccagcacgagctggttccgttgtcgctgatgtcgtgtttgttattgaaggaacggccaacctgggtccctatttcgaggggcttagaaagcactacctcttgcctgctattgaatatttcaacggagggccccctgccgaaacagactttggtggtgacgttccaggaaatctttcagcagcacaggttgctgctcaaaacgctgtcgaggctgcgaaaaatcaaaaggctggactgggtccacgattcagccctatcacccccctccagcaagcagcccccggcgtcggccccccattctctcaggcccccgccccacagttgcctccaggtcctcctggggccccaaagccacccccagctagccagccatctcttgtttcaacagttgctcctggcagtggtctggcaccaaccgcccagcctggagctccctcgatggccgggacagtcgcccccggcggagtgtcaggaccgtcccccgcacagcttggtgctcccgccttggggggacagcagtctgtgtcaaacaagttactggcttggagcggagtgttggagtggcaggagaagcccaaacctgcttcggtggacgccaatactaagctgaccagatcactaccctgccaggtttacgtgaatcacggagagaatctgaaaacagagcaatggccacagaagctcattatgcagctcatcccccagcagttgcttactacgcttggccctctgttccgcaactctaggatggtgcagttccattttaccaacaaggatctagaatctctcaaaggtctttacagaattatgggaaacgggttcgctggatgcgttcactttcctcacacagctccgtgcgaggtccgagtgctcatgctgctttatagcagtaaaaaaaagatcttcatggggttgattccttatgaccagagcggtttcgtgaacggcattaggcaggtgatcacaaaccataaacaggtgcaacaacagaagctggagcaacagcaacgcgggatggggggtcagcaagccccaccgggtctggggcctatccttgaggaccaggcacgcccaagccagaaccttctgcagttacgaccaccacagcctcagcctcagggaaccgttggcgcaagtggtgccacagggcagccacagccccaaggcacggcgcagcccccacctggagccccccaaggaccacccggtgcagcttccgggccgccaccgcctgggcctattttaaggcctcagaaccctggcgccaacccccagctccggtcactgctgctgaatcctccacctccgcagactggggtgcccccaccgcaggcttcgctccatcacttgcagccaccgggcgcaccagccctgctccctcccccccatcaagggctgggacagcctcagctagggcctcccctgctgcaccctccccctgcccaatcctggcccgctcagcttccgccgagagcaccattgcccggacagatgctgctgagtggagggccccgcggcccggtccctcagcctggcttgcagccctctgtaatggaggacgacattctgatggacctaatttag

SEQ ID NO: 123667 - DNA, 1194 bp, synthetic construct
  misc_feature 1..1194: note = Description of Artificial Sequence: Synthetic coding sequence
  source 1..1194: mol_type = other DNA
atggtgcccggctccgaaggccccgctcgcgctggctcagtcgtggcagacgtggtattcgtgatagaaggcaccgcaaatctcggcccttacttcgagggcctgagaaagcattatctgctaccagccatcgaatattttaatggaggcccccctgccgaaaccgatttcggcggcgattatggtgggactcagtatagcctcgttgtgttcaatacagtggactgtgcccccgagtcatacgtccagtgccatgcccctaccagtagtgcgtatgagttcgtcacgtggctggacggaataaagtttatggggggtgggggggaatcatgttccctgattgccgaaggcctttctacagctctgcagctttttgacgattttaaaaagatgcgtgaacaaatcggacagacacacagagtgtgcctcctgatctgcaacagccccccatacctgctccccgcggtcgaaagcacaacctactctggttgtacaacagagaacttggtccagcagattggtgagcggggaatccacttcagcatcgtaagtccacggaagctgccagctctgagacttctcttcgagaaagctgctccgcccgctttgttggaacccctgcaaccccccactgatgtgtcacaagatccgaggcatatggtcctcgtgagagggttagtgctgcccgtgggaggtggttcggcaccagggcccctccagtccaaacagccagtccctcttcccccggcggccccatctggagccacactgagcgctgctccccagcagccgttgccgcctgtgccaccccaatatcaggtgccaggcaacttgagcgctgcacaggtagccgcccagaacgcggttgaagctgccaaaaaccagaaggcgggtcttggcccacggttcagccccatcacccctctacagcaagcagcacccggggtgggacctccgttcagtcaggcgcctgccccagctttgctccccccccctcaccagggattgggccaaccccaactcgggcctcccctgcttcaccctcctccagcccagagctggccagctcagcttcccccccgagctcctttgcccgggcagatgctgctctctggcggccccagagggcccgttccacaacctggactccaaccgtcggtgatggaagatgacatcctaatggacctcatatag

SEQ ID NO: 123668 - DNA, 780 bp, synthetic construct
  misc_feature 1..780: note = Description of Artificial Sequence: Synthetic coding sequence
  source 1..780: mol_type = other DNA
atggtccccggctctgagggacccgcacgcgcaggcagtgttgtggccgatgtagtcttcgtgattgagggtacagccaacttgggcccctacttcgaaggcctgcgtaagcactatttgttgcccgcaatagaatacttcaatggtggtccaccagctgaaaccgacttcggcggagactacggtggtactcagtactcactcgtcgtctttaacacggtcgattgcgcgcccgagtcctacgtacagtgccatgctcctacttcttcagcctatgaattcgtgacctggctcgatgggatcaagtttatgggcggcggaggagagagttgttctctgattgctgaggggctttcaactgcgctgcaactctttgacgattttaaaaagatgcgtgaacagattggacaaacccatcgcgtgtgcctgctcatctgcaactctccaccctatctcctccccgccgtcgaatccacgacatattccggctgtaccacagagaatttggtgcagcagataggcgagcgcgggatccacttctccattgtgagcccccggaagttgcccgcgctccgtctgcttttcgagaaggcagctccaggcctcgccggcgcagccgccgcaagcgatcgatgcgagccaggcccggaagcccacggcgccggcagcggcacgagagccgcctgttggggatggctgtctccgaggcctccccccgtgaaagcagcatcacctcccgctagcaggcgaaccctgcgatgtcaggtgcgttgttgctag

SEQ ID NO: 123669 - DNA, 1803 bp, synthetic construct
  misc_feature 1..1803: note = Description of Artificial Sequence: Synthetic coding sequence
  source 1..1803: mol_type = other DNA
atgaccgcagctcctgcctctccccaacagataagagatagactgctgcaagccattgacccccagtcgaacattcgcaacatggtggcagtgctggaggtgatctcctcactggagaagtatcccattactaaagaggcactggaggagacgcgacttggaaaactgatcaacgacgtgagaaaaaagacaaagaacgaggaacttgcaaaaagagctaaaaaactgcttcgctcgtggcagaaactgatcgaacctgcccatcagcacgaggccgccctgcggggactagcaggtgccaccgggagtgctaacggtggtgctcataactgccgacccgaagtgggggccgctggaccaccgagatctatccatgatctgaaatctcgcaatgacctgcaacgcctgcccggccagaggcttgaccgcctcggatctagaaaacgcagaggcgaccagcgagatctgggacaccctggcccgcctcccaaagtatccaaagctagccatgatcctctagtcccaaactcatcccctcttcctactaacggcattagtggctctcccgagtccttcgccagctcattggacgggtcgggccacgccgggccagaaggaagcaggctcgaacgggacgaaaacgataagcacagcggaaaaatccctgtcaatgctgtgcgtccccataccagcagcccaggcctggggaagccaccagggccctgcctccagccaaaagccagcgtcttgcagcagctagacagggtagatgagacacccgggcccccacatcctaagggtcccccaaggtgctcgttcagccctcgtaactccaggcacgagggctcttttgcccgtcaacagagtctctatgctcccaaaggcagcgtcccctcaccctcacctagaccccaggcactcgatgctacccaggtaccgagtcccctgcctctggcccaaccaagcacgccacccgttcggcgcctagaactactgcctagtgccgaaagcccagtttgttggcttgagcagcctgagtcacatcagcgcctcgccggtcccgggtgcaaggcaggcttgagccctgcagaaccgctgctgagtcgagcaggattttcccctgactcttctaaggccgacagtgacgccgccagctcaggtgggagtgacagcaaaaaaaagaagaggtatcggccgagagattataccgtaaatctggacggacaggtggctgaggcaggcgtaaagcccgtgcggcttaaagagagaaagcttacctttgatcccatgaccagacagattaaaccccttacgcaaaaagaacctgtcagggcagactcaccagtacatatggagcagcaatcgcgcaccgaattggacaaacaggaagccaaagcatctctgcaatctccctttgagcagacaaattggaaagagctctcccgcaacgagattattcagtcttatctgtcccgccaatccagtctcctttctagttccggtgcccagactcctggggcacatcatttcatgtccgagtacctcaaacaggaagaaagtacgcgtcagggagctcgccagctgcacgtgcttgtgccacagtcccccccgacagatctaccagggctgacccgggaagtaacccaggacgacttagaccggattcaggccagtcaatggcccggcgtgaatgggtgtcaggatacccaaggaaactggtacgactggacccaatgcatctctctagacccacacggcgacgacggtaggctcaatatcctgccgtatgtgtgcctcgattag

SEQ ID NO: 123670 - DNA, 282 bp, synthetic construct
  misc_feature 1..282: note = Description of Artificial Sequence: Synthetic coding sequence
  source 1..282: mol_type = other DNA
atgacagccgctcccgcttctccccagcagatcagagaccggctgctccaggctatcgatccacagtctaacattagaaatatggtagcagtgctcgaagtgatctcctcgctggagaaatatcctataactaaagaggcactggaagaaactcgcctcggtaagctcattaacgatgtgaggaagaaaactaaaaatgaggaactggccaaaagagctaagaagttgctgcccgggtggcagtgggcgtgcagaccccgcggtcagccacctggggcctag

SEQ ID NO: 123671 - DNA, 936 bp, synthetic construct
  misc_feature 1..936: note = Description of Artificial Sequence: Synthetic coding sequence
  source 1..936: mol_type = other DNA
atggcagatgttattaatgtctcagtgaatttggaagcattcagccaagccataagcgcgattcaggcactgagatccagcgtgtcacgcgtcttcgattgtcttaaagatggcatgcggaacaaagagacattggaaggacgcgagaaagcctttattgcccattttcaggataacctgcactcggtcaatcgggaccttaatgagctggaacgactgagcaacctcgtcgggaaaccatctgaaaaccaccctttacacaattcaggccttctctctctggatcctgtgcaggataaaacgcccctgtatagccagctgctgcaggcttacaagtggagcaataagttacaatatcacgcaggtctggcttccggcctccttaaccagcagagcctgaaacgctcggcaaaccaaatgggggtcagtgccaagaggagacctaaggcccagcccactacattagtgctgcctcctcagtacgtggacgatgtgatcagcaggatcgaccggatgtttccagagatgagcatccacctcagccgcccaaacgggacctccgcaatgctgctggtcacattaggcaaggtcctcaaggtcatcgttgtgatgaggtccctcttcatcgatcgcacaatcgtgaagggctacaatgaaaatgtctacacagaggacggtaagttggacatatggtccaagtccaactatcaggtgtttcaaaaggtcacagatcatgctaccaccgccctgctccactaccaactcccgcagatgcctgacgtcgtggtcagatccttcatgacttggctgaggagctatattaaactgttccaggctccttgccaaagatgcggtaagttccttcaggatggcttgccccccacatggcgggacttcaggacactggaggcgtttcatgacacatgcaggcagtag

SEQ ID NO: 123672 - DNA, 714 bp, synthetic construct
  misc_feature 1..714: note = Description of Artificial Sequence: Synthetic coding sequence
  source 1..714: mol_type = other DNA
atgcgcaacaaagagacacttgagggccgcgagaaggcctttatcgctcactttcaagacaacctgcatagcgtaaatagagacctgaacgagcttgaacggctgagcaacttagtagggaaaccatcggagaatcaccctctgcataatagtgggcttcttagtctggacccagtccaggataagacccctctgtactcgcagctgctgcaggcctataagtggtcgaataagctccagtatcacgccggcctggcttctggcttgctcaatcagcagagtcttaaacggtcggccaaccaaatgggtgtaagcgctaagcgccgcccaaaggctcagcccactacgctagtgttgccaccgcagtacgtggacgacgtgatttccaggatcgataggatgttccctgagatgagtatccatttgagtagaccaaatggcacatcagccatgctgctgctggacatatggtcaaagagtaactaccaggtctttcagaaggtgacagatcacgcgactaccgcactgctgcattatcagctacctcagatgcccgacgtggtggttcgcagcttcatgacctggcttaggtcatatatcaaactgttccaggccccctgtcagaggtgcggaaagttcttgcaagatggtctcccccctacctggagggatttccggacattagaagcgttccacgacacctgcaggcaatag

SEQ ID NO: 123673 - DNA, 828 bp, synthetic construct
  misc_feature 1..828: note = Description of Artificial Sequence: Synthetic coding sequence
  source 1..828: mol_type = other DNA
atggccgatgtaattaacgtcagcgtaaacctggaagcttttagtcaagccatttcggcaattcaagccctgcggagttctgtcagtcgagtttttgattgcctgaaagatggaatgcgaaacaaggagacccttgaaggcagggaaaaggccttcatcgctcactttcaagacaacctccactctgtcaatcgggatttaaatgaactggagcggctgagcaacctagtgggtaaaccatcagaaaaccatcccctccataacagtgggttgctgtctcttgacccagtccaggacaagacccctctctactcccagctgttgcaggcctacaaatggtccaacaagctgcagtatcacgccgggctggcctctggtctgctcaatcagcagtccctaaaacgctctgccaatcagatgggggtatcagctaaacggcgccctaaggcccaaccgaccacactggtgctcccaccccagtacgtggacgacgtgattagccggatcgacagaatgttcccagaaatgtcaatccacttatccaggccgaacggcacctccgccatgctgctgcttgacatctggagcaaatcaaactatcaggttttccagaaggtgacagaccatgcaaccaccgcactattgcactatcagctgcctcagatgcccgatgtggtggtccgctcctttatgacctggttgcggtcttacattaaactcttccaagctccgtgccaacggtgcggcaaatttcttcaggatggtctgccaccgacttggagggacttcaggacactagaggctttccacgacacatgtcgtcagtag

SEQ ID NO: 123674 - DNA, 666 bp, synthetic construct
  misc_feature 1..666: note = Description of Artificial Sequence: Synthetic coding sequence
  source 1..666: mol_type = other DNA
atgctcaagtctaatggcgaaaggcggtcgaggaacgctctccctgctgtgtacgcaagaaaaatggctgcctcccagcagcaggccagcgcggcctctagtgccgcaggcgtttccggcccgtcatctgccggcggacccgggcctcaacagcagccccaaccacccgcacaactcgttggcccagctcagtccggcctactccaacagcagcagcaggatttcgatcccgtccaacgttacaagatgctcattccacagttaaaagaatctctgcagaccttgatgaaggttgcggcccagaatctcattcagaacaccaatatagacaacgggcagaagagttccgatggacccattcagcgcttcgacaaatgcctcgaagagttctacgccctatgtgaccagcttgagctttgccttcggctggcgcacgagtgcctttcgcagagctgtgattctgcaaagcacagtcctactctggtcccaacagcaaccaagcccgacgctgtgcagccagacagtttaccatacccccaatacttagctgtaattaaggcccagattagctgtgcaaaggacatacacactgcgcttctggattgtgctaacaaggtgactggaaagacccctgctccgcccgctgggcccgggggtaccctctag

SEQ ID NO: 123675 - DNA, 420 bp, synthetic construct
  misc_feature 1..420: note = Description of Artificial Sequence: Synthetic coding sequence
  source 1..420: mol_type = other DNA
atgctgatccctcaacttaaggaaagtcttcagaccctcatgaaggttgccgcgcaaaatctgatccagaatactaacatcgataacggacagaaatcttctgacgggcctattcaacgcttcgacaaatgtctggaggaattttatgccctttgtgatcagttagaactctgtctgcggttggcgcatgaatgtctctcccagagttgcgacagcgctaaacactctcccaccctggtcccaaccgccacgaagcctgacgcagtccagcccgactcattaccctacccacaatacctggccgtgatcaaggcgcagatttcctgcgcgaaagatatccatactgcccttctggactgtgctaacaaagtgaccgggaaaacgccagctcctcctgctggccccgggggaaccctgtag

SEQ ID NO: 123676 - DNA, 537 bp, synthetic construct
  misc_feature 1..537: note = Description of Artificial Sequence: Synthetic coding sequence
  source 1..537: mol_type = other DNA
atgagtacgcctcccttagcagccagcggcatggcacccggacctttcgcagggccccaggctcagcaggccgcaagggaggtgaatactgcatccctgtgtagaatcggacaggagaccgtgcaggatatcgtctatcgtaccatggagatcttccaattgttgcggaatatgcagcttcctaacggggttacctaccataccggcacctatcaggatagactgacgaagttacaggacaatttgcgccagctgagtgtgctattccgcaaactccgtctggtttacgacaagtgcaacgagaattgcggaggtatggatcccatccctgtagaacagctaatcccatatgtggaggaggatggaagcaaaaatgacgatagggcgggtcctcctagattcgctagtgaggagaggcgggaaatcgcagaggtgaacaagaagctgaagcagaaaaaccagcaactaaagcagatcatggaccagctgagaaacctaatctgggacattaatgccatgcttgccatgcggaattag

SEQ ID NO: 123677 - DNA, 813 bp, synthetic construct
  misc_feature 1..813: note = Description of Artificial Sequence: Synthetic coding sequence
  source 1..813: mol_type = other DNA
atggccgcttcctcttctggggagaaagaaaaggagagacttggcggggggctcggcgttgccggcgggaattcaactcgcgaacgcttgttaagtgcactggaagatctagaggtcctgagtagggaactgatcgagatgctcgcaatctccagaaaccagaagctcctccaggctggagaggagaaccaagtacttgaattgctgatccatcgggacggcgagttccaagaactgatgaagctcgcgctcaaccagggaaaaatacatcatgaaatgcaggtcctagagaaggaagtggagaagcgagactcagacatccaacagctgcagaagcagttgaaggaagctgagcagattctcgccactgccgtgtatcaggccaaggagaaactgaagagcatagaaaaagcacgaaagggagccatctcatcagaggaaatcataaaatacgcccatcgcatttcggcgagtaatgccgtgtgtgctccactgacgtgggtgccgggcgatcctcgcagaccgtacccaacagaccttgagatgaggagtggactgctgggtcagatgaacaatccttcgacaaacggcgtaaatggccatctccccggcgatgctctggctgctgggcgactgcccgacgtgctagcgccacagtatccctggcagtcaaatgacatgtccatgaatatgctgccccccaaccatagcagcgacttcctactcgagccacctgggcacaacaaagagaatgaagacgatgtggagattatgagtacagatagctcctcctcgtcatctgaatccgactag

SEQ ID NO: 123678 - DNA, 675 bp, synthetic construct
  misc_feature 1..675: note = Description of Artificial Sequence: Synthetic coding sequence
  source 1..675: mol_type = other DNA
atgctcgcaattagccgaaatcagaaattgctccaggctggagaggagaatcaggtcctggaactactaatccatcgagacggagaattccaggagctcatgaagttagccttaaaccagggcaagatccaccacgagatgcaggtgctggagaaggaagtcgagaagagggacagtgatattcagcaattgcagaagcagttgaaggaggccgagcagattttagccacagcagtctatcaagcgaaggagaaactgaaatccatcgagaaagccagaaagggagccatctcatctgaagagatcatcaaatacgctcatcgcataagcgcaagtaatgccgtgtgcgcccctctgacctgggtccccggggaccccaggcgtccctacccgacagacttggaaatgaggtcgggcctgctggggcaaatgaataatccgtccacaaatggagtcaatggccacctcccaggcgatgcactggcagccggccggttaccggatgtgctggctccccagtacccatggcagagcaacgatatgtcgatgaacatgctgccacctaatcacagctccgactttttgctggaacctccaggacataacaaggagaacgaggatgacgtcgaaatcatgtcgacggactcatctagttcttcttctgagagcgactag

SEQ ID NO: 123679 - DNA, 747 bp, synthetic construct
  misc_feature 1..747: note = Description of Artificial Sequence: Synthetic coding sequence
  source 1..747: mol_type = other DNA
atgaaactgctatggtggtgcgactggttgcccgagaggtcccacgtcttcacgcaacgggagctcatcgagatgttggccattagcagaaatcaaaaactactgcaggccggtgaagagaatcaggtgctagagctgctcattcatcgcgacggtgagttccaagagctcatgaagctcgcactcaaccagggtaagatccaccacgaaatgcaggtgctggagaaggaggtggagaaacgtgattctgacattcagcaattgcagaagcagctgaaggaggccgagcagatcctggctaccgccgtatatcaggctaaggagaaacttaagtcgatagagaaggctcgaaagggtgctatttcttccgaggagattattaagtacgcccaccgtatttccgccagcaacgctgtttgcgctcctttgacctgggtgcccggtgacccacgacggccctacccaaccgatcttgaaatgagatcaggcctgcttgggcagatgaacaatccttcgacaaacggggtgaatggacatctacctggagatgcactggctgcgggccgcctcccagatgtcctggctccacaatatccctggcagtctaacgacatgagtatgaacatgctaccccccaatcactcctccgattttctactagagccacccggccacaataaggagaatgaggatgacgtggaaattatgagcaccgactcaagttcctcgtccagtgagagcgattag

SEQ ID NO: 123680 - DNA, 717 bp, synthetic construct
  misc_feature 1..717: note = Description of Artificial Sequence: Synthetic coding sequence
  source 1..717: mol_type = other DNA
atgaagttgctgtggtggtgtgattggctgccagaacgctcacatgttttcacccagcgggaattgatcgagatgttggccatctcccgtaatcagaaactgttgcaggctggtgaggagaatcaggtcctggaactgctgatacatagggatggggagttccaagagcttatgaaactggcactgaaccaaggaaagattcatcatgagatgcaggttttagaaaaagaggtcgaaaaacgtgacagcgacatccagcagctgcagaagcaactgaaggaagcggaacagatcctggccactgccgtgtaccaggcaaaggagaagcttaaaagtatcgagaaagcgaggaagggcgccatatctagcgaagaaatcattaaatacgcccacaggatctcagcgtctaatgccgtgtgcgcgcccttgacttgggtgcccggagatcctcgtaggccgtacccgacagatttggagatgcggtctggattactgggccagatgaataatccatccacaaacggcgtcaacggtcatctgccaggtgatgcattggccgctgggagattaccggatgtgctcgcaccgcagtacccttggcagagtaatgacatgtctatgaatatgttaccacccaaccactcgtctgactttttgttggagcccccagggcataataaagaaaacgaagacgacgtagagatcatgagcacatag

SEQ ID NO: 123681 - DNA, 702 bp, synthetic construct
  misc_feature 1..702: note = Description of Artificial Sequence: Synthetic coding sequence
  source 1..702: mol_type = other DNA
atgggtgaaccacagcaagttagcgcgctcccacctcctccaatgcagtatataaaagaatacacagacgagaatattcaggaaggcttggcccccaagccaccaccccctattaaggatagctatatgatgttcggcaaccaattccagtgcgacgacctcataataagaccattggagtctcaaggcatcgagaggctacacccaatgcaattcgatcacaagaaagagcttaggaagctgaatatgtctatactgataaactttcttgatctattagatatcctaatcaggtccccaggctctattaaaagggaggagaaactggaggatctgaagctcctttttgttcacgttcaccatctgattaacgagtataggccccaccaagcccgagagacactccgagtcatgatggaggtccagaagagacagcgactagagactgccgaaagattccagaagcatctggaacgggttatcgaaatgattcagaactgccttgcatcgctgccagacgacctcccccactccgaagccggcatgcgtgtgaagacggagccgatggatgcagacgactcgaataactgcacaggtcagaacgagcatcagagggaaaactccggacaccggcgggatcagattatcgagaaagacgcagcactctgtgtcctgatagacgaaatgaatgagcgaccttag

SEQ ID NO: 123682 - DNA, 702 bp, synthetic construct
  misc_feature 1..702: note = Description of Artificial Sequence: Synthetic coding sequence
  source 1..702: mol_type = other DNA
atgggagaaccccagcaggtatctgccctcccacccccgccaatgcaatacattaaagagtatacagatgagaacatacaggagggtctggctcccaagcccccgcctccgatcaaagattcatacatgatgttcggtaaccagttccagtgcgatgatttgatcatcaggccacttgagtcacaggggatcgagcggctgcaccccatgcagtttgatcacaagaaagagctgcggaagttaaatatgagcattctgatcaacttcctggacctattggacattttaatccgctcaccaggaagtattaaacgcgaagagaaactggaggatctgaagctccttttcgtacatgtgcatcacctcatcaacgagtatcgaccccaccaggccagagagaccctgcgcgtaatgatggaagtgcagaagaggcaaaggttggagaccgctgaacgtttccagaagcatctagagagagtgattgaaatgatccaaaactgtctggctagcctgcctgacgacctaccacattctgaggccgggatgagggttaagactgaacctatggacgccgatgactcgaataactgtacaggacaaaacgaacatcagagagaaaatagcgggcatcgcagagatcagataatcgaaaaggatgcagcactctgcgtcctcattgatgagatgaacgaacgtccctag

SEQ ID NO: 123683 - DNA, 588 bp, synthetic construct
  misc_feature 1..588: note = Description of Artificial Sequence: Synthetic coding sequence
  source 1..588: mol_type = other DNA
atgggggagccacagcaggtgtctgcgttgccacctcctccaatgcagtacattaaggagtacacagacgagaatatccaggaagggctggcacctaaacctccaccacccattaaggatagctatatgatgttcgggaatcaattccagtgcgacgatctgattattcgccctctggaatcccagggcatcgaaagactgcatcccatgcagttcgatcacaagaaggaactccgaaaactaaacatgtccatactgatcaatttcctggacttactggatatcctgatccgtagtccaggtagcattaaaagagaggagaaacttgaggatctcaaacttctctttgtgcacgtgcatcatctgattaacgagtaccgccctcatcaagctagggagaccctccgggtgatgatggaggtccagaagagacaaaggttagaaactgccgagcggtttcagaaacacctggagagagtcatcgagatgattcaaaactgtctcgcgagtcttcccgatgatctgcctcactcagaagcgggcatgcgagtcaagactgagcccatggatgctgatgatagcaactag

SEQ ID NO: 123684 - DNA, 441 bp, synthetic construct
  misc_feature 1..441: note = Description of Artificial Sequence: Synthetic coding sequence
  source 1..441: mol_type = other DNA
atggcgagtgccggggttgccgcaggccggcaggcagaagacgttctaccaccaacaagtgatcaaccgttgcctgatacaaagcccctcccacctcctcagcctccccccgtcccggctccccaaccccaacagtcacctgctcctagacctcagagcccagctagagcccgggaggaggagaactactcatttctgccattggtccacaacataattaagtgtatggacaaagactcccccgaggtacaccaggatttgaatgccttaaagtcgaaattccaggaaatgagaaagctgatctctaccatgccgggcatccatttatcaccagaacagcaacagcagcaactacaaagtcttcgagaacaggttagaactaagaacgaattactgcagaagtacaagtccctgtgcatgttcgaaatacccaaagaatag

SEQ ID NO: 123685 - DNA, 894 bp, synthetic construct
  misc_feature 1..894: note = Description of Artificial Sequence: Synthetic coding sequence
  source 1..894: mol_type = other DNA
atgagcaatagggtagtgtgtagagaggctagccacgccggctcgtggtatactgctagtgggccacaacttaacgctcagttggaaggatggctgagccaggtacagtcgacaaaacggcccgcgagagccattatcgcaccccacgcagggtatacgtactgtggtagttgtgctgctcacgcatataaacaagtcgacccttcaatcacgcggaggatttttatcctgggtccgtcacatcacgtacctctgagcagatgtgcactgtctagcgttgatatttataggacgcctctgtacgatctgcgaatcgaccagaagatctacggcgagctgtggaagaccggaatgtttgagaggatgagcctgcaaacagacgaggacgaacacagcattgaaatgcacctaccttacaccgctaaggccatggagagccacaaagacgaattcacgataatccccgtacttgtcggggcgctaagtgagtccaaggaacaggagttcggaaagctgttcagtaagtacttagcagacccttctaatctcttcgttgtgtcctctgacttctgccactggggccagagattccgctatagttattacgacgagagtcaaggggagatctatagaagcattgaacacctggacaagatgggaatgtccatcattgaacagttggacccagtgagtttctccaactacctgaaaaagtatcataataccatttgtggacggcatccgatcggggtgcttcttaacgccatcaccgagctgcagaagaacggcatgaacatgagtttctcttttctgaactacgctcagtcgtcccagtgccgtaattggcaggatagtagcgtgtcatatgccgccggcgcgttaaccgttcactag

SEQ ID NO: 123686 - DNA, 903 bp, synthetic construct
  misc_feature 1..903: note = Description of Artificial Sequence: Synthetic coding sequence
  source 1..903: mol_type = other DNA
atgcccctctggcgagctgataaatgccaggatgtccagtcagcctcgtggaggccaaggcgcgccgacgggccacagcttaacgcccagctagaaggctggctgagccaggttcaatcaaccaagcggccggctcgggccatcatcgcaccccatgccgggtacacctactgcggcagctgtgccgcacacgcatacaaacaggtcgacccaagtataactagacgcattttcatcctgggaccatcacaccatgttcccctgtcaagatgtgccctttcctcagtggatatctaccgaacaccactgtatgatctccggatcgatcagaagatctacggcgagctttggaagacgggtatgtttgaaagaatgtcacttcagaccgatgaggacgagcatagcatcgagatgcacctcccctatacagccaaagcaatggaatcccataaagatgaatttacgatcattcctgttctggtgggcgcgctgagtgagtctaaggaacaggaattcgggaagctgttctcgaaatacctggctgaccccagcaacctcttcgtggtgtcttccgatttttgtcactggggtcaaaggtttcggtattcctactacgatgaaagccaaggcgaaatataccgatcgattgagcacctggataagatgggtatgtctatcattgaacaactggatcccgtatccttctccaactacctaaaaaagtatcacaatactatctgtggccgccatcccattggggtcctccttaacgctatcactgaactgcaaaagaacggaatgaatatgtcattctctttcttaaactatgcgcagagcagccaatgtcgcaactggcaggattcttctgtgagctatgctgccggggccctgactgtgcactag

SEQ ID NO: 123687 - DNA, 894 bp, synthetic construct
  misc_feature 1..894: note = Description of Artificial Sequence: Synthetic coding sequence
  source 1..894: mol_type = other DNA
atgtctaaccgagtcgtctgtagagaggcgtctcacgctgggagttggtacaccgcgagcggcccacagctgaacgcacagcttgaggggtggctgagtcaggtgcagtccacgaaacgccccgcgcgcgcgatcatcgccccacacgctggctacacttattgcgggtcatgtgcggcacatgcatacaaacaggtagatccgagcatcacaagacggattttcatcctcggcccttctcaccatgtcccactgtcacggtgtgccctctcctcagtcgacatctacaggaccccgctgtacgatctgcggattgatcagaagatatacggggagctgtggaagaccggcatgttcgagcgaatgtctcttcagaccgacgaggacgagcacagcatcgagatgcatctgccatacacagccaaagcaatggaatcccacaaggacgagtttaccattatccccgtgctggttggcgcactctcggaaagtaaggaacaggaattcggcaaactgttctccaaatatctcgcagatccttcaaacctgttcgtcgtgtcatccgatttttgccactggggccagagatttcgctatagctattacgacgagagccagggagaaatctaccggagcattgagcatctggataagatgggtatgagcatcattgagcagctcgaccccgtgtccttctcgaactacctcaagaaataccacaatactatctgtggccggcatcctatcggagtgttgctaaatgccattaccgagctccagaagaacggaatgaacatgtcgttttctttcttgaactatgcacagtcgtcccaatgtaggaactggcaggatagctccgtgagctatgccgcaggggcacttaccgtccactag

SEQ ID NO: 123688 - DNA, 825 bp, synthetic construct
  misc_feature 1..825: note = Description of Artificial Sequence: Synthetic coding sequence
  source 1..825: mol_type = other DNA
atgtccaatcgcgtggtgtgtcgggaagctagccatgcaggctcctggtataccgccagcgggccccagctcaacgcgcaattggaaggctggctgtcacaagtgcagtctaccaagagaccagcacgtgcaattatcgcccctagacgaattttcattctcggccctagccatcatgtaccgcttagtagatgcgcgctctcctccgtcgatatttaccgcacccctctttacgatctccgaatcgatcagaagatctatggcgagctgtggaaaactggcatgtttgagaggatgtcactgcagaccgacgaagatgagcactccattgagatgcatctgccttatacagcgaaggccatggagagtcataaggacgagtttaccattatccctgttctcgttggagccttgtcagagagcaaggaacaggaatttggcaagctgtttagcaaatacttggctgaccccagcaatttatttgtggtgagttccgatttttgccactggggccagcgattccgttacagttattatgacgaaagccagggcgagatctaccggagtattgagcaccttgacaagatggggatgtctattatcgaacagctcgaccccgtgtcctttagtaactatctgaagaaataccataatacaatttgcggacggcacccaattggagtgctcttgaatgcgataacagagctgcaaaagaatggaatgaacatgagctttagcttccttaattacgcacagtcctcccagtgtaggaattggcaggactcatccgtcagctatgcagctggtgctctgacagttcactag

SEQ ID NO: 123689 - DNA, 63 bp, synthetic construct
  misc_feature 1..63: note = Description of Artificial Sequence: Synthetic coding sequence
  source 1..63: mol_type = other DNA
atgtccaatcgggtagtgtgcagggaagcaagccacgccgggagctggtacactgcgtcttag

SEQ ID NO: 123690 - DNA, 5478 bp, synthetic construct
  misc_feature 1..5478: note = Description of Artificial Sequence: Synthetic coding sequence
  source 1..5478: mol_type = other DNA
atggaagacacccaggccatcgattgggacgtggaggaagaggaagagacggagcagtcaagcgagtcactgagatgcaatgtcgagcccgttggacggttgcacatcttttcaggagcacatggaccagagaaggactttcctttacatcttggcaagaatgttgtcggccgtatgcccgattgctcggtcgcgctgccgttcccaagcatttcgaagcaacatgccgaaatagagattctggcttgggacaaggctcctatcttgagggactgtggatctctgaatggtactcaaattctccgccccccgaaagtcctgagccccggtgtatcccaccgcctgcgagatcaggaactgatattatttgccgacctcttgtgccagtaccatagactggacgtcagcttaccttttgtctctaggggccccctgactgtagaagagacgccaagagttcagggtgaaacacagccacagcgtctgttgctggcggaagacagcgaggaggaagtggatttcctgagcgagcggcgaatggtgaaaaagtcacggactacaagttcttcagttatagtcccagagtctgatgaagaggggcatagtcctgtactaggtggactcggacccccttttgccttcaatttaaacagtgacaccgacgtcgaagagggtcagcagcctgcaactgaagaggcgagctcggcggcaaggagaggggccactgtagaggctaaacagtcagaggcggaagtggtgactgagattcagttggagaaggaccaacccttggttaaggagagagacaacgataccaaggttaagcgaggagctggcaacggtgtggtgcctgcaggcgtcatcttggaacggtctcagcccccaggtgaggactctgacactgatgtcgacgacgacagtcgccctcccgggcgacccgctgaggtccaccttgaacgggcccagccattcgggttcatcgattcagatactgatgcagaagaagagcggatacccgctacccctgttgttattcctatgaaaaagcgcaagattttccatggagtgggcacgagaggccccggcgcacctgggctggcacacctacaggagtcacaggcagggtcagacacggatgtagaggagggtaaggctcctcaggcagtgcccctggagaagagccaagcatctatggtgattaacagcgacactgatgacgaagaggaggtctcagccgcattgacactggctcacctcaaagagagtcagccagctatctggaatagagatgccgaggaggatatgccccagcgcgtggtcctgctccagcgctcccagaccacgaccgagcgtgattcggataccgacgtcgaggaagaggagctacctgttgaaaatcgcgaggccgttctgaaagaccacaccaaaataagggcgcttgttcgggcacactcagaaaaggaccagccccccttcggagacagcgacgactccgttgaggccgataaatcatcacccggaatccacctggagcggagccaggcctccactacggtagatatcaacacccaggtggaaaaagaggtccctcctggcagcgcaatcatccacattaaaaaacatcaggtcagcgttgaaggcacaaaccagacagacgtgaaggctgtcggtggccccgctaaactcctagttgtgagtttagaagaggcttggcccctccatggtgactgcgaaacagatgccgaagagggcacatctctcacagcttcagtcgtggctgatgtgaggaagagtcagttgcccgcagagggggatgctggagcagaatgggccgcagccgtcttgaaacaggagcgggctcatgaggtaggcgcccagggaggtcctcctgtcgcgcaggttgagcaagacctccccatcagcagggagaatcttactgacttagtcgtggacactgacactttaggcgagtctacccaaccacagagggagggcgctcaggttccaaccgggcgggaaagagagcaacatgtgggaggtaccaaggattctgaggataactacggggactctgaggatctcgatctccaggctacccagtgtttcttagagaatcaaggcttggaggctgtgcagagtatggaagacgagcccacacaagcattcatgctgaccccgccgcaggaactcgggcctagtcactgcagcttccagacaactggcttactaaactgtaagatgccgcctgctgaaaaggcttcacgcatcagagctgccgaaaaagtttccaggggtgatcaggaatctcctgacgcctgtcttccacctaccgtgccagaggcccccgcgcctcctcagaaacctttaaattcccaatctcagaaacatttggccccaccaccgcttctgagtcctctgctgccctcaatcaaacctacggttcgcaagactagacaggacggcagtcaggaagcaccagaagccccattgtctagtgaactggagccctttcatcccaagcccaaaatcaggactcgcaaatccagtaggatgacaccctttccagccacttccgccgcccccgaacctcatccttctacaagcaccgcgcagcctgtgactcctaagcctacctcacaggctaccaggtcgaggacgaaccggagcagcgttaaaacacccgagccagtggtgcccaccgcgcctgaattgcagcccagcacctctacagatcagcccgtcacttcggaacccaccagtcaagtcacccgcggtcggaagtcccggagctctgttaagaccccagagacagtggtcccaaccgctcttgagctacagccgtctacgtcaacagatcgccccgtcacatctgagcccacctcacaggccacacgaggacggaagaataggagtagcgtgaagacacccgagcccgttgtccccaccgcgcctgagctccagcccagcacatccacagaccaacccgtgactagcgagccgacgtatcaggccaccagagggcgcaagaaccgtagttccgtgaagacaccagagcccgtggttcccactgcacctgaactgcgcccctcgacttccactgataggcccgttaccccaaagcccacgagccggacaaccagaagtcgaacaaatatgtcttcagtcaagaccccggagactgtggtcccaactgcccccgaactccagattagcacatctaccgaccagccagttaccccaaagccaacaagtcggaccactagaagcaggaccaacatgtctagcgttaagaatccagagtccaccgtgccgattgcccccgaactgcccccatctacctctacggagcagcccgtgacacctgaacctactagccgcgctactcggggcagaaagaatcgatcaagcggcaaaacgcctgaaaccctggtgcctacagcccccaagctggagcctagtacatctactgaccagccggtcaccccagaacctacctcccaagccacgcgtgggagaaccaataggtcctccgtcaagacacctgaaactgtggtgcctaccgctcccgagctccagccatctacctctactgaccagcctgtaactccagagcctaccagtcaggccactaggggcaggactgatcgatcttcagtcaagacacctgaaacggtagtgcctacagcccccgagttgcaggcgtccgccagcacagatcagcctgtgacctcagagcctacaagtcgcactacccgcggccggaagaatcgttcctctgtcaaaactcccgagactgtcgtacccgccgcccccgaattacagccctctaccagcactgaccagccagtgacgcctgaaccaacttcacgtgccactcggggtcggaccaacaggagctctgttaaaacaccagagtccattgtgcctattgcccctgaactgcagcctagtaccagtcgcaaccagctggtgacccccgaaccaaccagtcgcgccaccagatgtcgcacaaaccgaagctctgtcaagacccctgagcccgtcgtgcctactgcccctgagcctcacccgacaacaagcacagatcagcccgtgacccctaaactgacttcaagggccactcgccgaaagacgaataggtcttccgtgaagactccaaagcctgtggaaccagctgcaagtgacctcgaaccatttactcccacggaccagtctgttactcctgaggccattgcccagggtggtcagtctaagactcttcgaagcagcacggtcagggctatgcctgtgccaaccacaccagagttccagagccctgtgactacggatcagcccatctcaccagaaccgattacgcagccctcctgtattaagaggcaaagggctgccgggaatcccggttcactggctgcgccaatagaccataagccgtgtagcgcacccctggagcccaaatcacaggcatcgcgtaaccagagatggggcgctgtcagggcagccgaaagtttgaccgccattccagagcctgcgagcccacagctgctagaaacgcccatccatgcttctcagatccagaaagttgaaccagcaggccggagccgctttactccggaactccagccaaaggcctcccagagcaggaagcggagtcttgcaaccatggactctcctccccatcaaaagcagccgcagaggggagaagtatcacaaaaaaccgtcattatcaaggaagaagaggaggacacggcagagaaacccgggaaggaggaagacgtggttaccccaaagccagggaagcggaaaagggaccaggctgaggaagagccaaaccgaattcctagtagaagcctccgccggacaaaactgaatcaggaatccactgcccctaaggtgcttttcaccggagtagtggacgctaggggggagagagcagtattggcccttggtggttcactggccggcagtgcagccgaagcctctcacttggtcaccgataggatcaggcgaactgtcaagttcctttgcgctcttggccggggcattccaatcctatcccttgattggctccatcagtctcgaaaggccggcttttttctccctcctgacgagtacgtggtgaccgacccagaacaggagaaaaattttggtttctccctgcaggatgccctgagccgggcccgtgagcgccgtctgctggagggatatgagatatatgtgacacccggagtccagcccccgcctccacagatgggcgagattatcagttgctgcggcggaacttacctgccttctatgccaagatcttataagccacagagagtggtgattacctgtcctcaagactttcctcattgttccatcccattgcgggtggggcttcctctcttgagccctgaattccttctgactggcgtgctcaaacaggaggccaagcccgaggcctttgtcctgtcccctcttgagatgagctctacgtag

SEQ ID NO: 123691 - DNA, 6270 bp, synthetic construct
  misc_feature 1..6270: note = Description of Artificial Sequence: Synthetic coding sequence
  source 1..6270: mol_type = other DNA
atggaggatacacaggcaatcgactgggacgttgaagaggaagaagagacggagcagtcttcggaaagtctcaggtgtaacgtcgaaccagtgggccgtttgcatattttttctggtgctcacggacctgagaaggacttccccctgcatctcggcaagaacgtggtcgggcgcatgcctgattgttcagttgcgcttccttttcccagcattagtaagcagcacgccgagatcgagatcttggcttgggataaggctcccattctccgggattgcgggtccctgaatggaacccagattttgagaccccctaaggtcctgtcacctggggtgagccatcggttgcgtgatcaggaactgatcttattcgctgatctcctgtgccagtaccacaggctggacgtatcccttcccttcgtgtcccgtggacctcttacagtggaagagactccccgcgtacaaggcgaaacccagcctcagcggcttctgttggctgaggattccgaggaggaagttgatttcctgagtgagcggaggatggtaaagaaatcaaggaccaccagttcttccgtgatagtgccagagtccgacgaagaaggtcattccccagtcctgggaggtctgggtccgccttttgcattcaacctgaacagcgatacagatgtcgaggagggacagcagcccgccactgaagaggccagctccgctgccagacgtggagctacggtagaagccaagcaatcagaagctgaagttgtcacagagatacagctcgaaaaagaccagcccctggtgaaggagagagataatgacacgaaggtcaagcgcggggcaggaaacggcgttgtgccagctggagtgatacttgagcgaagccagcctcccggagaggacagtgatactgacgtcgacgatgatagccgcccccccgggcggccagctgaggtgcatttggaacgcgctcagccctttggattcatcgattctgatacagacgctgaagaagagagaatccccgctactccagttgtgatccccatgaagaagcggaagatctttcacggcgtaggaacacggggccccggcgcccctggattggcgcatctgcaggagtcccaagccggcagcgatacagacgtggaagagggcaaagctcctcaggcagtacctctagaaaaatcccaggcctccatggtgatcaattcagatacagacgatgaagaggaggttagtgcagctctgaccctggcccatctgaaagaaagccaacctgccatttggaacagagacgctgaggaggatatgccgcaacgtgtcgtgctgctgcaaagaagtcagactaccacggagcgggatagcgataccgacgtagaggaggaagagctgccagtggagaacagagaagcagtgctcaaggaccacacaaagatcagggccttagttcgcgcccactcagagaaagatcagccaccctttggtgattcagatgattccgtggaagccgacaagtcttcgcctggcattcatttggaaaggagtcaagcaagtaccaccgtagatatcaatactcaggttgaaaaggaagtcccccccggcagtgcaatcattcacatcaagaaacatcaggtgtcagtggagggtactaaccagaccgatgtgaaagccgtgggagggcccgcaaaactcctggtggtctccttagaggaggcctggccacttcacggcgactgtgagaccgacgcagaggagggcacctccctcacagccagcgtggtcgcagatgtgcggaaatcacagctgcccgccgaaggggacgcaggagccgaatgggccgcggcagtgctgaagcaggaaagagcccacgaggtgggagcacagggcggtccacctgtggcacaggttgaacaggacctgccaatctctagagaaaacctgaccgacctggtcgtggatacagacactctgggtgagagcacccagccccagcgggaaggagcacaggtccctacaggcagagagcgagaacaacacgtgggcggaacaaaggactctgaggacaactatggcgactctgaagatctggacttgcaggctactcagtgctttctggagaaccagggattagaggcggtgcagtcaatggaggatgagcccactcaggcatttatgcttacacccccgcaggagttgggccccagccactgcagttttcagaccacaggaaccttggacgagccttgggaggtacttgccactcagcctttttgtcttcgtgaaagtgaagattctgagacccagcctttcgacactcatttagaggcttacgggccctgtctctccccaccaagagctattccaggcgatcaacaccctgaatctcccgttcacacggagcctatgggcatccagggaagaggccggcaaacggtcgacaaggtgatgggaattcccaaagaaaccgcagagagggtcggaccagagaggggtccgttggagcgagagacagagaagctgctcccggagagacagactgacgtgactggggaggaagagcttacaaagggaaagcaagatagagaacagaagcaactcctggcacgggacacacagcgccaggagtctgacaagaacggtgagagcgcatcacccgagagggatagggagagtttgaaggtggaaatcgagacatcagaagagatacaggagaaacaggtccagaagcagacgctgcccagcaaggccttcgaaagagaggttgagaggcccgtggctaatcgggagtgtgatccggcagaacttgaagaaaaagtccctaaagtcatcctcgagcgtgacactcagaggggtgaacctgaaggaggttctcaggatcagaaaggacaggcatcgtctccaacgccagaacccggagtgggggccggagacttaccggggcctaccagcgcgcccgtaccaagtgggagccaaagcggtggcaggggatctcccgtgtcaccaaggcggcatcagaagggactgctcaattgcaagatgcctccagctgaaaaagcctcacgcattcgggcagcagagaaagtgtcacgtggcgatcaggagagccctgacgcctgtctgcccccgacagtccctgaggcccccgcaccacctcagaagccactcaatagccagagtcagaagcatctggcccctcctcctctgctgagccctctgcttccatcaattaagccaactgtgcgcaagacccggcaggatgggtcccaggaagccccagaagccccgctgagctcagagctggagccattccacccaaagcccaagataagaacccgcaagtcgtctaggatgacaccgttcccggccacttcagcagctccagagccccacccatccaccagcactgcccagccagtcacacctaaacccacctcccaggccacacgctcccgcacaaatcgaagttcagtgaagacacctgagcccgtggtccctactgcccctgagttacaaccaagcacctctactgatcagcctgtgacctccgagccgacctcacaagtcacccgcggtaggaagtccagatctagtgtgaagacgcccgaaactgtggttccaacggccctggagttgcaaccttctactagtacagatagacctgtgacaagtgagcctacaagccaggcaacgagaggtaggaagaacaggtcttctgtcaaaacaccagaacccgtggtgcccaccgctcccgagcttcagcccagtacttcgaccgaccaacctgtcacatcagaacctacctatcaggccacaagaggacggaaaaatcgatcctccgtcaagactccggaacccgtggtgcctaccgcccctgaactgcggccttcaacaagcaccgaccgcccagttacaccgaaacctacctcccggactacgcgaagtagaacaaacatgtccagcgtgaagactcctgagaccgtggtgccaacagctcccgagctgcagatttctacaagtaccgaccagcctgtgacgccaaagccgaccagcaggaccacacggagccggacaaatatgtcgagcgttaaaaatcctgaatcaacggtgcccattgctcctgaactgccaccaagtacaagcaccgagcaacccgtcacaccagagccaacaagccgcgcgaccagggggcggaagaataggtcatcgggcaagactccagagactctcgtgcccacagccccaaagctcgagccaagtacaagcacagaccagccggtgacccccgagcctacatcccaggcaacacgaggccgaactaatcgctcgtccgtgaaaacgccagaaacagtggttccaaccgcccccgagcttcaacctagcacctcaacagatcaacctgtgacaccagagcctacgtcccaggccactcgagggcgcaccgaccgaagcagcgtgaagacgccggaaactgttgtccccacagccccagagctgcaggccagtgccagtaccgaccagccagtaacctcagagcccactagcagaactacgcgagggcgtaaaaaccggagtagcgtcaagactcctgagaccgtcgttcccgctgcccccgagctgcaaccctccacgtccactgatcaacccgttacgcccgagcctacatcccgcgcaactcgtgggcgcacaaataggtcaagcgttaagacaccggagtcgatagtgccgatagcccctgagctgcaaccttccacatcgagaaatcaactagtaaccccagaacccacctcaagggccacacggtgccgtaccaaccgctccagcgtgaaaactcctgaacccgtagtgcccactgctcccgaacctcatccaaccacatcaacggatcagcccgtgaccccaaagttaacctctcgggccacccggcgtaagacaaacagatcttccgtgaagacacctaaacctgtcgagcctgccgcctctgacctggagccgtttactcctaccgaccaatcagttactccagaggccatcgctcaggggggccagtctaagacacttaggtccagtaccgtgcgcgccatgccagtccccactacaccagaatttcagagcccggttaccaccgatcagcctatatcacccgagccgataacccagcccagctgtataaaacgccagcgcgccgcaggtaaccccggtagtctggccgcacccattgaccacaagccgtgctcggccccactggaacctaagtctcaggcttccaggaatcagaggtggggcgctgtgagagcagctgagagtctgacagctatccccgaacctgcctcaccacagctgctcgagaccccaatacacgccagccaaattcagaaggtcgaaccagctgggcgctccaggttcacgccggaactgcagcctaaggccagccagtcaagaaagcgctctctggcgaccatggactctcctcctcatcagaagcagccccagcgaggtgaagtgagtcagaaaaccgtcatcattaaagaggaggaggaggacaccgccgagaagcccggaaaggaagaggacgttgtcacccctaaacccggaaaacgaaagagggaccaggctgaagaagagccaaacaggatcccttcgcgaagcttgcggcgcaccaagctgaaccaggagtcaacggctccaaaagtcctgttcactggcgtggttgacgctaggggagaacgcgcagtcctggctttggggggtagcctggccggttccgctgctgaggcctcccacctggttactgatcgcatccggcgaaccgtgaagtttctctgtgcgttaggtcggggtataccgatcttaagcctggactggctgcaccaaagtcgtaaagccggtttcttcctaccgcccgatgagtacgtggtgactgatccagagcaggagaagaatttcggcttttccctgcaagatgctttgtcgcgagccagagagcgtcgcctgctggagggctacgagatttacgtcacacccggggtgcaacctccgcctcctcagatgggcgagattatctcctgttgtggaggcacatatctcccctccatgccaagatcatataagccccagcgagtggtgatcacatgtcctcaggatttcccacattgctctatccctctcagggtgggtttacctctgttgagtcctgagttccttttgacaggggtcttgaagcaggaggcaaaacctgaggccttcgtgctgtcccctctcgaaatgtcttctacctag

SEQ ID NO: 123692 - DNA, 489 bp, synthetic construct
  misc_feature 1..489: note = Description of Artificial Sequence: Synthetic coding sequence
  source 1..489: mol_type = other DNA
atggaagacacccaggctatcgattgggacgtggaagaagaggaggagacagagcaatcttctgaaagcctgcgttgtaatgtcgagcccgtgggacggttacacatcttttccggggcgcacggaccagagaaggattttcccttgcacttaggcaagaatgtggtgggaaggatgccagactgctctgtggcattaccattcccctcaatctcaaaacagcacgcagaaatcgaaattctcgcttgggataaggcaccgatactgagggattgcgggagtctgaacggtacgcagatcctgcgaccacctaaggttcttagcccgggagttagtcaccggttaagggaccaggagttgattctgttcgctgacctgctgtgccagtatcaccggcttgatgtatccctgccctttgtctctcgaggcccgcttacagtggaggagactccacgggtccagggcgagactcaaccccagcgactctag

SEQ ID NO: 123693 - DNA, 342 bp, synthetic construct
  misc_feature 1..342: note = Description of Artificial Sequence: Synthetic coding sequence
  source 1..342: mol_type = other DNA
atggaagatacccaggcgattgattgggacgtggaggaggaagaggaaacagaacagtcctctgagtcccttcgatgcaacgtggagccggtggggaggctgcacatattctctggagcgcacggtcctgagaaagacttcccactacatttggggaagaatgtggtggggaggatgcccgattgcagcgtagcccttccattcccttccatctcaaaacaacacgccgaaatcgaaatcctggcctgggacaaggccccgattttgagggactgcgggtctctgaacggcactcagatcctgagaccgcccaaagttctgagtccaggggtgtctcactag

SEQ ID NO: 123694 - DNA, 384 bp, synthetic construct
  misc_feature 1..384: note = Description of Artificial Sequence: Synthetic coding sequence
  source 1..384: mol_type = other DNA
atggaggacactcaggctatcgactgggatgtcgaagaggaagaggagacagagcaatcctccgagtcccttcgctgtaatgtggagccggtgggccggcttcacatcttttctggggcccatggaccggaaaaggacttccccctccatctcggaaagaacgttgtcgggagaatgccagactgcagcgtagctctcccattccccagtatttctaaacagcacgctgagatcgaaatccttgcctgggacaaggctcccatattaagagattgcggtagtctcaatggaacccaaatcctcaggcctcctaaagtcttaagccctggagtgtcccaccgccttagggatcaggagctgatcctgtttgcagatctactgtag

SEQ ID NO: 123695 - DNA, 489 bp, synthetic construct
  misc_feature 1..489: note = Description of Artificial Sequence: Synthetic coding sequence
  source 1..489: mol_type = other DNA
atggaggacactcaggcgatcgactgggatgtcgaggaagaggaggaaacagagcagtcaagcgaatcactacgttgcaatgtggagccagtgggcaggctgcatatcttcagcggcgctcacggtcccgaaaaggattttccactacatttgggaaaaaatgtcgtcggccggatgcctgattgctccgtagctttgcccttcccaagcataagtaaacaacacgccgagatcgaaatactggcctgggacaaggcgccaatactgcgggactgtgggagcctcaacggcacacagatcttaaggcctcccaaagtacttagcccgggggtttcccacagactccgcgaccaggagctgatcttgtttgccgacctactgtgccagtaccacaggctcgatgtgtcccttcctttcgtcagcagagggcccctgactgtggaggaaacacctcgagttcaaggcgagactcagcctcagagactgtag

SEQ ID NO: 123696 - DNA, 921 bp, synthetic construct
  misc_feature 1..921: note = Description of Artificial Sequence: Synthetic coding sequence
  source 1..921: mol_type = other DNA
tagcatgtgggggggaccaaggacagcgaggacaattacggagatagcgaggatctagatctgcaggctacacagtgttttctcgaaaatcaaggcctcgaggcggtgcagtctatggaagacgagcctacccaggcttttatgcttaccccgcctcaagagctaggaccctcccattgttccttccagaccacagggcttttgaattgcaagatgccgccagctgagaaagctagccgaattcgggccgccgaaaaagtgtcgaggggagaccaggagagtcctgatgcgtgtctgccccctaccgtgccagaggccccagccccccctcagaaacccttgaattcccagtctcagaaacatttagcaccaccccctttgctgtctccccttcttcctagcatcaaacctaccgtcagaaagaccaggcaggacggtagtcaggaggcccctgaagccccgctgagttcagagctcgaacctttccaccccaaaccaaaaatacgtactcggaaatccagccgtatgaccccattccccgccacgtcagctgcccctgaacctcaccccagtacatccacagcacagcccgtgaccccgaaacccacatcccaagccacaaggtccagaacaaatagaagttctgtgaaaaccccagaacccgtagtgccaaccgcaccggagttgcagcccagcacaagcaccgaccaacctgtgacctccgagcccacctcccaggttacacggggccgcaagagcagatcctcagtgaagacccccgagactgtagtgcccacggccctggagctgcagccgtctacctcaacagatcgcccagtgacttccgagcctaccagccaggccacaagaggtaggaaaaaccgttcatcggtaaagacgcccgaaccggtggtaccctag

SEQ ID NO: 123697 - DNA, 384 bp, synthetic construct
  misc_feature 1..384: note = Description of Artificial Sequence: Synthetic coding sequence
  source 1..384: mol_type = other DNA
atggaagacacccaagccatcgactgggacgtagaagaggaggaggagactgagcagagctctgagtccctgagatgtaatgttgagcccgtgggccggcttcatattttcagtggtgctcacgggcctgaaaaagatttcccactgcaccttggtaaaaatgtcgtgggccgaatgcctgattgttctgtagccctgccgttcccaagcatttcgaagcagcacgctgaaatagaaatacttgcctgggacaaagccccaatcctgcgagactgcggctccctgaatgggacccagattcttcgccctcccaaggtcttaagcccaggtgtttctcataggcttagggaccaagaactcattctgtttgcagacctattatag

SEQ ID NO: 123698 - DNA, 921 bp, synthetic construct
  misc_feature 1..921: note = Description of Artificial Sequence: Synthetic coding sequence
  source 1..921: mol_type = other DNA
tgacacgtcggtgggactaaagatagtgaagacaactatggagacagcgaggaccttgacctccaggctacccaatgctttctagaaaatcagggcctagaggctgtgcagtcaatggaagatgaaccaacccaggcctttatgctcactccaccccaagagctgggtcccagccactgttccttccagacaactggactcctcaactgtaaaatgcctcctgccgagaaggcctctcggatccgcgcagcagaaaaggtctctcgcggcgaccaagagtctccagatgcttgtttacccccaaccgtcccagaagcccctgcccccccccagaaaccgctgaacagtcaatctcagaagcacttggctccacctccattactttcccctctgttgcctagcatcaaacctaccgtgaggaaaaccagacaggatggttcccaggaggctcccgaggcacctttgtcttctgagctggaaccgttccaccccaaacctaaaattcgaaccagaaagagcagccgtatgaccccctttcccgcaacttctgccgcccccgaacctcatccatctacttccacggcccagcccgtcacccccaaacccacgtctcaagcaacccgctctcgcaccaaccgcagctccgtgaaaacgcccgagcctgtggtgcctactgctcctgagttacaaccttctacctcaaccgaccaaccagtaacatcagagcctacgagccaggtgaccagaggaagaaaatctagatcaagcgtgaaaactcctgagactgtggtccccactgctctggaactgcaaccctccacatctacagatcggccagtaacctcagagccaacttcacaagccaccagaggccgcaaaaatcgctcatcggtcaagactcctgagccagtggttccctag

SEQ ID NO: 123699 - DNA, 921 bp, synthetic construct
  misc_feature 1..921: note = Description of Artificial Sequence: Synthetic coding sequence
  source 1..921: mol_type = other DNA
taacatgtagggggcaccaaggactccgaggacaactatggagattctgaggatttagatctgcaggccacccagtgttttctggagaaccagggcctagaagcagtccagtcaatggaggacgagccaacacaggcgtttatgctcactccaccccaggagctgggaccttcacattgtagcttccaaactacgggactgctcaactgtaagatgccccctgcggaaaaggcatcccgaatcagagctgcagaaaaagtgagtaggggcgatcaggagagcccagacgcctgtcttcctcctacagttccagaagccccagcccctccccaaaagccactcaattctcagtcgcaaaaacacctggcgccaccaccactgctttccccattgctgccatccatcaaaccaactgtgcggaagaccagacaggacggttcacaggaagccccagaggcaccactcagcagtgagctggaaccatttcatcctaaaccgaaaattcggacacggaaatcaagcagaatgacaccgttcccggcaacctctgccgcccccgaacctcatccaagcacatccaccgcccaacctgtaacacccaagccgacctctcaggcaacacgctctcgcacaaaccgatcaagtgttaaaacccctgagcccgtggtacccactgctccagagctgcagccctccacatcgacagatcaacccgtgactagtgaacctacctcacaagtgactcgaggtcggaagagccggtcctccgtgaaaacccctgaaacagtcgttccaactgccctggaacttcagccaagcactagcacagaccgacctgtcactagcgagcccacgtcacaggctactagaggcaggaaaaaccgatcgtccgtcaaaacaccagagccagttgtgccatag

SEQ ID NO: 123700 - DNA, 6270 bp, synthetic construct
  misc_feature 1..6270: note = Description of Artificial Sequence: Synthetic coding sequence
  source 1..6270: mol_type = other DNA
atggaggacacacaggcaattgattgggacgtggaagaagaagaagagaccgagcagtcctccgagtcacttcggtgtaacgtagaaccggttggtaggcttcacatattctctggcgcccacggtccggaaaaagattttccattgcacttgggtaagaacgtcgtgggaagaatgccagactgctcagtggctctgccttttccgagcatatcaaagcagcatgccgaaattgagatactggcgtgggacaaggcccccatcttaagagactgcggctccctgaacggcactcagatcctgcggcctccgaaggtgctgagtcctggagtgtctcatcgccttcgggaccaggaactgatactattcgccgacctcctgtgccagtaccataggttggacgtgagtctgccttttgtttcccggggtcccctgactgttgaggagactcctcgcgtgcaaggcgaaacccagccccaacgcttattacttgcggaggatagtgaagaggaagtggatttcctgtctgaaaggagaatggtgaaaaagtctcgaactacctcttcatctgtgatcgtacccgaaagtgacgaagagggtcactctcctgttcttggtgggttggggcccccctttgcatttaatctgaactcagatactgacgtggaagagggacaacagcccgccaccgaagaagcttccagtgccgctagacggggagcaactgtcgaggcaaagcaaagtgaagccgaagttgtcacggaaattcaactggagaaagatcagcctctggtgaaggaacgggataatgacacgaaagtgaagcgtggggcaggcaatggcgtggtgcctgctggcgttatacttgagcggagccagcctccgggagaggactccgacacagacgtcgacgatgacagcagaccgccaggacggccagcagaggtacacctcgagagggcgcagccatttgggttcatagattctgacactgatgcggaggaagagcggatccccgcaacaccagtggtgatccccatgaagaagcggaagatattccacggagtggggactaggggccccggtgctcctggcttggcacacttgcaggagagccaggccggcagtgatacggatgtggaggaaggaaaagcaccccaggccgtgcctcttgagaagtcccaggctagcatggtgattaactctgataccgacgacgaggaggaagtctccgccgctctaacccttgctcacctgaaagaatctcaacctgccatctggaatcgcgacgctgaagaggatatgccacagcgcgtggtgctccttcagagaagtcagacgactacagagagggacagtgataccgatgtagaggaagaagagctccccgtagagaatagagaagccgtcctgaaggatcacaccaagatccgagccctggttagggctcatagcgagaaagatcagcctccctttggtgattctgacgacagcgtcgaagcagacaagagcagccccggcatccatttggaacgctctcaggcttcaaccaccgtggacatcaacacccaggtcgaaaaagaggttccgcctgggagtgcaatcattcatattaagaagcatcaggtatcagtcgaagggacaaaccagacggatgtgaaagctgtgggcggccctgctaaactattggtggtaagcctggaagaagcctggccgctccacggcgactgtgaaactgatgcggaggagggcacctcgctcactgcatctgtggtcgcagatgtgaggaagagccagttgccggcggagggagatgccggagccgagtgggcagcagccgtcttgaagcaggaacgcgcccatgaagtaggggcccagggagggcctccggtcgctcaagtggaacaagacctgccaatttcccgagagaatttgactgatctggtggtggataccgacacactgggagaatccacacaaccccagagagagggcgctcaagtgcccactggcagggaacgggagcaacacgttggcggaaccaaagactcggaggacaattacggggattccgaggacctggacctccaggctacccagtgttttctggagaatcagggtctggaagccgtccaatccatggaagatgagcctacacaagcgtttatgctcactccccctcaggagctgggccccagccactgtagtttccagacaaccgggacattggatgaaccatgggaggtgcttgccactcagccattttgcctgagggagagcgaagactccgaaacccagccctttgacacccacctggaggcatatggcccctgtctatccccacctcgtgccattccgggtgatcagcacccagagagtcccgtacatactgagcccatgggaatccagggcagaggccgtcagacagtggataaggtgatgggcattccgaaggagactgccgaacgtgtaggtcccgaacgaggcccgctcgaacgcgagactgagaaactgctgcctgagcgtcagacagacgtaacgggtgaggaagagctgactaaggggaaacaggaccgagagcagaagcagttactggcgcgggacactcaaaggcaggaatccgacaaaaatggagagagcgcatcccccgaacgggatagagagagcttgaaggtagagatcgagacatcggaggagatccaggaaaaacaggtgcaaaagcagactctcccaagcaaagctttcgaacgcgaagtcgagaggcccgtggccaacagggaatgtgatcctgctgagctggaggaaaaagtgcctaaagtgatcctcgaacgggacacccaaagaggtgagcccgagggaggctctcaggatcagaaagggcaggcgtcctcccctacccccgaaccaggggtcggagccggcgacttgccaggtccaacgtccgcccctgtgccttcaggatcgcagagtggtggcagaggctctcccgtgagcccaagaagacatcagaaaggcctactgaattgcaaaatgcccccggccgagaaggcgtcccggatcagagcagccgagaaggtgagccgcggagatcaggagtcacccgatgcctgcctgccacccacagtcccagaggcccctgctcccccacagaagcccctcaacagccagagccagaaacatttagcacccccccctctgctcagtccattgcttccgagcatcaagccaaccgttaggaagacccgacaggacggcagtcaggaggcgccggaggccccactctctagcgagctcgagccctttcatcccaagccaaaaataaggacacggaagagctctcggatgacaccctttcccgcgacttccgcggccccagaaccacacccaagcaccagcactgcacagcccgtgacccccaagccaacttcccaggcaactaggagccggactaaccggtctagcgtgaagacccccgaacccgtggtccctactgcacctgaattgcagccgagtacatcaaccgaccagcctgtgaccagcgagcctacctctcaggtaaccagaggaaggaaatctcgcagttcagtcaagactcctgagaccgtagtgcccaccgcccttgaactgcaaccttcaacctcaacagatagaccagtcacaagtgaacccacaagtcaggcgaccaggggtaggaaaaaccgttcatcagtgaaaacacctgagccggtggtccctacagcacccgaactccagccgagcaccagtaccgatcagcccgtgacaagcgagccgacctatcaggctacgaggggccgcaagaatcgatcgagtgtaaaaacgccagaacccgtggttcccactgcccccgagcttagaccatctacaagcaccgaccggcctgtgacacccaaaccaacttcaaggacaacacggtcacggaccaatatgtccagcgtgaagacacctgaaacagttgtgcctacggctccagagctgcagattagcacatcgacagatcagcctgtcacccccaaacccacctctcgcacgacacgatcaagaaccaacatgagttccgtaaaaaatccggagagtacagttccaattgcccctgaacttcctccctcgacaagcactgaacagcctgtgacacctgaacccacttcacgcgcaacccggggccggaaaaaccggtctagtgggaagacacccgagaccctggtccccactgctcctaagctggaaccgtcaactagcaccgaccaacccgtgacgccagagccaactagtcaggcaacaagaggacggaccaacagatcgagcgttaagacccctgagacagtagttcctaccgcacctgagctgcagccttccacttctaccgatcagcccgttacgcccgagccaacctcacaggctacccgggggagaacagatagatctagcgtgaagacgcccgaaaccgtcgtgccaacagccccggagttgcaagcttcggctagtacagatcagcctgtgacgtccgaaccaacttccaggaccactcgggggagaaagaaccggtcgtcagttaaaacaccagagaccgtagttccagctgcccccgagttacagcccagtacatccaccgatcaaccagtgacccctgagcccacaagtagggccacccggggacgaaccaataggagtagcgtgaagacccctgaatcgattgtgcccattgccccagagctgcagccctctaccagcagaaatcaacttgtgacccctgagcccactagccgcgcaaccagatgcaggaccaaccggagtagtgtcaaaaccccagaacccgtcgtgccgaccgctcccgagccccatcctaccacctctaccgaccagccggtgacccctaaactcacaagcagggccacccgccgcaaaaccaataggagttcagttaaaacccctaagcccgtggaaccagcagcaagtgatctcgaacctttcacacctactgaccagagcgtgacccctgaagctattgcgcaggggggccaaagcaaaaccctcaggtcttccacagtccgtgccatgcctgtgccgactacccctgaatttcagagtcctgttactacagatcaacccatcagcccggaacctatcactcagcccagctgcatcaagcggcaacgcgcagctggaaaccctggcagcctggcagcgcctatcgatcacaagccttgcagtgcaccactggagccgaaatcacaagcgagtaggaaccagcgctggggggctgttcgtgcggcagagtccctcacagctatcccggaaccagcttctccccagctgctcgaaacacctattcacgcctcacagattcaaaaggtcgaacccgccggcaggtcacggttcaccccggaacttcagccaaaggccagccagtccaggaagagatctctggcaacgatggacagcccccctcatcagaagcagcctcagcggggagaagttagccaaaaaaccgtcattatcaaggaggaggaagaagacacggcagaaaaaccagggaaggaggaagacgtggtaacccctaagcctgggaaacggaagcgagatcaggcggaggaagaaccaaaccggataccctccagatccttgcggcggactaagcttaaccaggaatcaactgcccctaaggtgctgtttactggagttgtcgacgcaagaggggaaagggcagtcctcgccctcggcggcagcctcgcagggagtgctgccgaggcatcacacttagtcacagataggatcagacgtaccgtgaaattcctctgtgctctggggcgtggaatccccatactatccctggattggctgcatcagagtaggaaggccggatttttcctgcctcccgatgagtacgtggtgactgacccagagcaagaaaagaacttcggcttcagcttacaggacgctctcagcagagctagggaacggcgtctgttggagggatacgagatttatgtgaccccaggcgttcagccgcctcccccccagatgggcgaaatcatcagctgctgcggtgggacctacctgccaagcatgccaagatcctataagccccagcgcgtcgttatcacgtgtccccaggattttccccattgcagcatcccccttagagtagggctgccacttttgtccccagaatttttgttaaccggggtgttgaagcaagaagcgaaacccgaagcctttgtgctaagtcccctcgaaatgtccagtacctag

SEQ ID NO: 123701 - DNA, 6270 bp, synthetic construct
  misc_feature 1..6270: note = Description of Artificial Sequence: Synthetic coding sequence
  source 1..6270: mol_type = other DNA
atggaggatacacaggccatagactgggacgtagaggaagaggaggagacggaacagtctagcgaaagcctccggtgcaatgtcgagccagttggccggctgcacatttttagtggagcacatgggccggagaaagactttcctcttcacctgggaaagaatgttgttgggaggatgccagattgtagtgtggcgctgcctttcccctcgatctctaagcaacacgctgagatagagatcctcgcctgggacaaagcccccattttaagggattgtggctctctcaatggcacgcaaatcctcaggccccctaaagtgctgagcccgggtgtgagtcatcgtttgcgtgatcaggagctgattctttttgccgatcttctctgtcaataccatcgcctcgacgtgagtttaccattcgtttcaagaggccccttgaccgtggaagagactccaagggttcagggggagacacagcctcagcggctcctgcttgccgaggactctgaagaagaagtggacttcttatccgaacgacggatggtcaagaagtcccggactacttctagtagcgtcatcgtgcccgagtccgatgaggaggggcattcccccgtccttggtgggctcggtccgcctttcgctttcaacctcaactcagatacagatgttgaggaagggcagcagccagctacagaggaggcgtcttccgcggcgcgcagaggcgccactgtcgaggccaaacagtccgaagctgaagtagtgacagagattcaactggagaaggaccaaccactggttaaggagagagacaatgacacaaaggttaagcgaggggcaggtaatggcgtcgtcccagccggggtgattctcgaacggagtcagcctccaggcgaggactctgacactgatgtggatgacgatagccggcctccaggacgacctgcagaagtgcacctggagcgggcacagccattcggctttatagattctgacaccgacgcagaggaggagagaatccccgctacacctgtggtgatacctatgaagaaacgcaagatatttcacggtgttggcaccaggggccctggcgctcctggcctcgcccacttgcaagaaagtcaggctgggtccgacaccgacgtggaagaaggcaaggcgcctcaggcagtgcctctggagaagtctcaagcatctatggtaatcaatagcgatactgacgacgaggaggaagtctctgccgccctcactctcgcccaccttaaagaatctcagccagcaatatggaaccgagacgctgaagaggatatgcctcaacgggtcgtgcttctgcagcgctctcaaaccaccactgaacgcgacagcgacacagacgtggaagaagaagagctgcccgttgaaaatagagaggccgtgcttaaagaccacacaaagatacgcgctcttgttagagcacactccgaaaaggatcaacctccattcggggactctgatgactccgtcgaggctgacaaatccagtcctggcatacatttagagcggtcccaagcctctacaacagtagacataaacacccaggtggagaaggaggtccccccaggaagtgccattatccatattaagaaacaccaagtgagcgtggaaggcactaaccagacagatgtaaaggctgttggggggcccgccaagttacttgtagtgtcccttgaggaggcatggcccctccatggggattgcgaaaccgatgcagaggagggcactagcctgacagctagcgtagtcgcagacgtccgcaagagccagttgccagcggagggtgatgccggagccgaatgggcggcagctgtactcaagcaagagcgagcccatgaggttggcgctcaggggggcccccccgtggcccaggtggaacaggatctaccaataagccgagagaacctgaccgatttggttgttgatacagacactctgggcgaatctacccagccgcagcgggagggcgctcaggtgcccaccggtagggaacgagagcaacacgttgggggcacaaaagactccgaggataactacggggattccgaggatttagatctgcaggcaacgcagtgctttctggaaaaccagggtctcgaagcggtgcaatctatggaggatgagcctactcaagccttcatgctgactccaccccaagaactaggtccatcacactgctcctttcaaacaaccggtacacttgacgaaccttgggaagtactggcaactcagcctttctgcctccgggagtccgaggatagcgagacccagccattcgacacacacctggaagcctacggaccctgcctgtcaccccccagagcaatcccaggcgaccagcatcccgaaagtcctgtgcatacagagccaatgggaatacaggggagaggacgtcagacggtcgacaaagtcatgggcatccccaaagagaccgccgaacgggtgggccccgagcggggcccactggagcgtgaaactgagaaactcctgccggagcggcagaccgacgtcaccggtgaggaggaactcacaaaagggaaacaggatagggaacagaaacaactgctcgctagggacacccagaggcaggagtcggataagaacggcgagagtgccagccccgaacgagaccgagaatccttaaaggtggaaattgagacaagtgaagaaattcaggagaaacaagtgcagaagcagacactgccgtccaaagccttcgagagggaagttgagaggcccgtggccaatcgcgagtgtgatccggcagagctggaggaaaaagtccccaaggtaatcctcgagcgtgacacccaacggggcgagccagaggggggttcccaagaccagaagggtcaagcctcttctccaacacctgagcccggggtcggagccggagacctgcccgggccaacttcagctcctgtacccagcggaagtcagtctggcgggcggggaagccctgtgagcccgcgccgtcaccaaaaagggctcctgaattgcaagatgccacctgctgaaaaagcctctagaatccgggcagccgaaaaggtgagtagaggagaccaggagtctcccgatgcctgcctcccaccaactgttccagaagcaccagcccccccacaaaagccccttaactcccagagtcagaaacacttggctccacccccactgctgtctcccctgcttccatcaatcaaacccactgtgcgtaagacgaggcaggatggatcacaagaagctcccgaggcaccactgtcgtcagaactggagcctttccaccctaagcccaaaattcgaacacgcaagagcagcagaatgacaccatttcctgccacgtccgccgcacccgaaccacacccctcgacctcaactgcccaaccagtcacaccaaagcctacctcccaggctacacgcagccgcactaatcgatccagcgtgaagacccctgaacctgtggtgccaactgcgcccgagcttcagccaagcacaagcaccgaccagcccgtcacttctgagccgacttcgcaggtaacgcgcggtagaaaatctagaagttcagtcaagacccccgaaacagtcgtgccaacagccctggagctgcagccttctacttccacagacagacccgtgacttccgagccgacatcccaagcgaccagagggcgcaagaaccgcagtagtgtgaagactcccgagcctgtggtgcctaccgcacccgagctgcagccttctacttccaccgatcagcccgtaaccagcgagcctacttatcaagccacccggggccggaaaaatcgttccagcgtcaagacccccgaaccagtggttcctaccgcaccggaactgagacctagcacgagcactgatcggcctgttacacctaagcccacttcccgtaccaccaggtcacggaccaacatgtcgtccgtcaaaacccctgagacagtggtgcccacagcccctgaactgcaaatcagcacctctacagaccagcccgtgacccctaagcccactagccgtacaacaaggtcaagaacaaatatgtcgtcagttaagaaccccgagtcaacagtgcccattgcccctgaattgccccccagcaccagcactgagcagccagtaacccccgagcctaccagtagagccactagagggcggaagaataggagcagcggcaagactcccgagacattagtgcctaccgcccctaagctcgaaccttcaaccagtacagaccagcccgtcaccccagagcctacatcgcaggcaacaaggggaaggaccaatcgtagctcagtgaagaccccggaaaccgtggtcccgaccgcccccgaactacaaccctcaacgtccaccgatcagccggtgacacccgagcccacatctcaggccaccagaggccggaccgatcggtccagtgtaaagaccccagagacagtggtgcccaccgccccagaactgcaggcctcagctagtacagatcagcctgtcacatctgagccaacaagccggacaactcggggccgcaagaatcgtagctccgtgaaaacccctgaaacagtcgtgccggcagcccccgaacttcagcctagcactagtaccgaccaacctgtcacaccagaacccacaagtagagcgacccgggggaggacaaaccgctccagcgtcaagacacccgagagcattgtgcccattgcacccgagcttcagcctagtaccagcaggaatcaactcgttaccccggagcctacttcacgtgccacccgctgcaggaccaaccggagttcagtcaaaacgcccgagccagtggttcctaccgccccggagccccatcccactacaagtaccgaccagcctgtcacccccaagctaacctcacgtgcgactaggaggaagaccaacaggagtagcgtgaagacacctaaaccagttgaacccgccgcctcagacctggaacctttcacacccaccgaccagagcgtcacgcccgaagcaattgctcagggtgggcagagcaaaaccctgaggagcagcaccgtgagggcaatgccggtgcctacaactcctgagttccagagtcctgtaactacagatcagcctatcagcccagaaccaataacccaacccagctgcataaagaggcagcgggcagcaggtaatcctgggtctctggccgctccaattgatcacaaaccctgcagtgctcctcttgagccaaaaagccaagcaagcaggaaccagagatggggagccgttcgagccgcggagtctctgaccgccatccctgagcctgcatcaccacagttgcttgaaacccccatccacgcgtcccagatccagaaagtggaacctgccggccgttcccgattcacgccagaactgcagcccaaagctagtcaatctaggaaacggtcactggcaacaatggacagcccaccccaccagaagcagccccagagaggcgaggtaagccaaaagaccgttattattaaagaagaggaggaggatactgccgaaaagcccgggaaggaagaagatgtcgttactccaaagcctgggaaacggaaaagagaccaggctgaggaagagcccaatagaatcccctcccgctcccttcgccgcactaagctgaaccaggagtcgacagcaccaaaagtactcttcactggcgtggtggatgctagaggcgagcgcgcggtcctggctctgggtgggtcattagcgggctcagccgccgaagcgtcacatttagttaccgacagaatcaggaggacagtgaagttcttatgtgctctcggacgcggaatcccgattctttctctggactggctgcaccagtcccgtaaggctggatttttcctgcccccagatgagtacgtcgtgactgaccccgagcaggagaagaactttggtttctccctccaggatgctttgagccgcgctcgggagcgcagactgttggaaggatacgaaatatacgtaactcccggcgtgcagcctccccctcctcaaatgggcgagattatttcctgctgcgggggaacctacctcccttccatgccgaggagctacaaaccacaaagggtggtcattacttgcccgcaggatttcccgcactgttccattccccttcgagttggactgccgctcttatccccggagttcttgttgacgggagttttaaagcaggaagccaaacctgaagctttcgtgctctccccactggagatgtcaagcacctag

SEQ ID NO: 123702 - DNA, 4968 bp, synthetic construct
  misc_feature 1..4968: note = Description of Artificial Sequence: Synthetic coding sequence
  source 1..4968: mol_type = other DNA
atgtatcatagactcgatgtgagtcttccctttgtctcaaggggaccgttaaccgtagaggagacccctcgagttcagggggagacacaaccccagcgtctgctcttggcagaggacagcgaggaggaggtggactttttgtcggaacgtaggatggtgaagaagagcagaacaacatcatctagcgtcattgtccctgaaagcgatgaggagggccattcacctgtgttaggcggcttgggtccacccttcgctttcaaccttaacagcgacacagatgttgaagagggacaacaaccagcaacggaagaggcgtcttccgcggcacggcgaggagccacggttgaggcaaagcagtccgaagccgaagtcgttactgagattcagctggaaaaagaccagcccttggttaaggagcgagataatgataccaaagtcaaaagaggcgccgggaatggggtggttccggcgggagttattctcgaaagatctcagccacctggggaagattccgatactgacgtggatgatgatagtcgtccaccaggtcgtccggccgaagtgcaccttgagcgcgcacaaccttttggtttcatcgacagcgacaccgatgccgaggaggaaagaatccccgctactcccgtggtgattcctatgaaaaagagaaagatttttcacggcgttggcacccgcgggccgggggcaccaggactggctcatctgcaggagtcgcaggccggttctgatacggacgtggaagaaggaaaggcgccacaggccgttccccttgaaaagtctcaggcatccatggtgatcaattccgataccgatgacgaggaagaggttagtgctgctctgacgcttgcacaccttaaagagagccagccagcaatttggaaccgggatgctgaggaggatatgccccagagggtggttcttttgcaacgatcacagacgacaacggagagagactctgacaccgacgtcgaagaggaggaactccccgtcgagaatcgggaagccgtgctgaaagaccacactaaaatacgcgctctggtgagagcccactctgaaaaggaccaacccccattcggggactctgacgatagcgttgaggccgacaaaagttcccccggcattcatctggaacgctctcaggcaagtaccaccgtggacatcaacacgcaggtcgaaaaagaggtacctccaggatctgcaattatacatatcaaaaagcaccaggtttcggtcgagggcaccaaccagacggacgtgaaggcagttggggggcccgctaagctccttgtggtatcactggaagaagcttggccgcttcatggcgactgcgagacagacgctgaggaagggacatctctgactgcatctgtggtcgctgatgtgcgaaagagccaactccctgctgagggagacgccggtgctgaatgggccgctgccgtgctgaaacaggagagagcccacgaagtgggcgcccaaggcggccctcccgtagcccaggttgaacaggacctgcccatctcaagagaaaacctgacggaccttgtggtggacaccgatactctgggggaatcaactcagccgcagagagagggcgctcaggtgcctactggcagggaacgagagcagcatgtaggggggactaaggatagcgaggataactacggcgattctgaagacttggatctccaggccacgcaatgttttttagaaaatcaggggctggaagtgcagtctatggaagatgaaccaacccaggctttcatgctgacaccaccacaagagcttggcccaagtcattgctccttccagaccaccggactgctgaattgcaagatgccccccgcggagaaagcctcacgaattcgtgcggctgaaaaagtgtctcgcggggaccaagagagtccagacgcttgtctgcctccaaccgtgcccgaggctccagccccccctcagaagcctctgaactcccaaagccagaagcacctggctcccccccctttgctgtcccccctcctacccagcatcaaacctaccgttcggaagacccgccaggacggcagccaggaggcaccagaagcacctctgtcttctgaactcgaaccattccatcccaaacctaagataaggactcgcaaatcgtcgaggatgaccccgtttccagctacatctgctgctcctgagcctcacccctccacttcgaccgcgcagcccgtcactcccaaacctactagccaggcgacaagatcgcgcactaaccgcagctcggtgaagacaccagaaccagtggtacctaccgcacctgaattgcagccctctacgtctactgaccagcccgtgaccagtgagcctacttctcaggttacccggggaaggaagagtcgcagtagcgtcaaaacacctgaaacggtggtacctacggccctggaactccaaccaagtacctccaccgatcgacccgtgacctccgaacccacgtcgcaggccaccagaggtcggaaaaatagatcttcggttaagactccagagcccgtcgttccaaccgcccctgaactgcaaccaagcacctccaccgatcagcccgttacaagtgaacctacttaccaagctacccgaggacgaaaaaataggtctagtgttaagacacccgaacctgtggtccctacagcccccgagctgagaccttctacatctaccgatcgccctgtaactccaaagccaacgtcaagaacaacccgctcgcgcacaaacatgagtagtgttaagaatcctgagtccaccgtccctatagctcccgaactgcctcctagcacctcaacagaacaacctgttaccccggagccaacatctcgcgccacccggggccgcaagaaccgcagctccgggaagactcccgagactctggtccccactgcccctaaactggaaccatcaaccagtactgatcagcccgtaacacccgaacccacgagccaggctactcgcgggcggaccaaccggtccagcgtcaagaccccagagaccgtggtcccaacagctccagaactgcagccttcaaccagcaccgatcaacctgtgacccctgaaccaacctcacaggctaccagagggcgcaccgatcgatccagtgtgaagacacccgagaccgtagtgcccaccgccccagagttgcaggcaagtgcttctacagatcagccagtgacaagcgagcccaccagccgaacaacaagggggagaaagaaccgatcttccgtgaaaactcctgagactgtggtcccagcagctcccgagttgcagccctccacatcaacagaccagcctgtgacccccgaacctaccagtcgtgcgactcgaggaaggaccaatcggagctccgtcaagacgcccgaaagcattgtcccaatcgctcccgagctgcaaccctctacaagtcggaatcagcttgtcacacctgagcctacttcacgcgccacccgctgtcgcaccaaccgttcgagcgtgaaaactccggagcctgtagtgcccacagccccagagcctcatccaacaacttcgaccgatcagcctgtgacccccaagctcacctccagggctactcggagaaaaaccaaccggtcctctgtaaaaacccccaagcccgttgagcctgcagccagcgacttggagccattcactcctacggaccagtcagtgacaccggaggcaatcgcccaaggcggtcagagtaagacactgaggagttctactgtgagagccatgccggtgcctacaacccctgagtttcaatccccggtcaccacagaccaaccaatatctcccgaacccattacacaaccgagctgtattaagcgccaaagagcagcagggaatccaggtagcctcgctgctccaattgaccataaaccttgcagtgcacctctcgaaccaaagtcacaggcatccagaaatcagaggtggggcgccgtgcgagctgctgagtctctgactgctataccagagccagccagcccacagctgctcgagactcccatacatgctagtcagattcaaaaggtcgaaccggcaggtaggagccggtttacaccagagctgcagcctaaagcttcacagagtcgcaagcgcagcctggccacaatggatagcccacctcatcagaagcaaccgcaacgcggggaagtgtcccagaaaacggtgataattaaggaggaagaggaggatactgcagagaagcctggaaaggaggaggatgtcgttactccaaaacccggtaaacggaaacgcgaccaagccgaggaggagcctaacaggatccctagtagatctctcaggcgaacaaagctgaatcaggagtcaaccgcacccaaagtgctcttcaccggtgtggtagatgctcgaggcgagcgtgcagtgctggcactgggaggatcacttgccggctccgcagctgaagctagccatttggtgaccgatcgtatcagacgtaccgttaaatttctgtgtgcactcggccgcgggattcccatcttgagcttggattggctgcatcagtcccgtaaggcaggttttttcctgcctcctgacgaatatgtggtaaccgatcccgaacaggaaaagaacttcggcttctcactgcaggatgccctgagcagggctcgggaaaggcggcttctggaggggtatgagatctacgtgaccccaggcgtgcagcctcctccaccacagatgggcgagatcatcagttgttgcgggggcacctatcttccaagtatgccacgcagttataaaccccagagggtggtcatcacctgccctcaagacttcccacattgttccatacctcttcgggtgggcctcccccttcttagccctgagtttttacttaccggggtgctgaaacaggaggcgaagcccgaggcatttgtgctgtcaccactcgagatgtcttctacttag

SEQ ID NO: 123703 - DNA, 489 bp, synthetic construct
  misc_feature 1..489: note = Description of Artificial Sequence: Synthetic coding sequence
  source 1..489: mol_type = other DNA
atggaagatacacaagccatcgactgggacgtcgaggaagaggaagagaccgagcaatctagtgaatcactacggtgcaatgtagaaccggtcggcagactccatatcttctcaggtgcacacggacctgagaaggattttcccctacacctgggaaagaatgtcgtcggccgcatgcccgattgttctgtagcattaccatttccttccatctccaaacaacacgcggaaatcgagatccttgcctgggacaaggcgccaatacttcgagactgtggttcgctcaatggcacccaaatcctgcgcccacctaaggtgttgtctcccggggtgtcccatcggctcagagatcaggagctgatcctctttgcggatctgttatgccagtaccataggctggatgtgtcactgcccttcgtttcacgggggccccttactgttgaggaaacccctcgagtgcagggcgaaactcagcctcaaaggctttag

SEQ ID NO: 123704 - DNA, 342 bp, synthetic construct
  misc_feature 1..342: note = Description of Artificial Sequence: Synthetic coding sequence
  source 1..342: mol_type = other DNA
atggaggatacccaggccatcgactgggatgtagaagaagaagaagagaccgaacagtcttccgagtccctgaggtgtaatgtcgagcccgtgggccgcctgcacattttctcaggtgcccacggcccagagaaggactttcctcttcacttagggaaaaacgtggtgggccggatgcctgactgttccgtggccctcccattcccgagcataagtaaacagcatgctgagatagagatcctcgcatgggataaagccccaatactgagggattgcggctccctgaacgggacgcaaatcctacgtcctcccaaagtcctcagccccggcgtaagtcactag

SEQ ID NO: 123705 - DNA, 342 bp, synthetic construct
  misc_feature 1..342: note = Description of Artificial Sequence: Synthetic coding sequence
  source 1..342: mol_type = other DNA
atggaggacacgcaggctatcgattgggatgttgaggaggaagaagaaaccgaacagtcatcagagtctctgcggtgcaatgtggagcccgtcggccgcttgcacattttttcaggagctcatggtcccgaaaaggacttcccactgcatctagggaagaatgtagttggtcgcatgcctgactgcagtgttgctcttccctttcccagtatctctaagcagcacgcagaaatcgagatcctggcatgggataaggccccaatccttagggattgtggcagcctcaatgggacgcagattttacggccacccaaggttctcagccctggcgtaagtcattag

SEQ ID NO: 123706 - DNA, 384 bp, synthetic construct
  misc_feature 1..384: note = Description of Artificial Sequence: Synthetic coding sequence
  source 1..384: mol_type = other DNA
atggaggacacacaggctattgactgggatgtggaggaggaggaggaaaccgagcaaagcagtgagtccctaaggtgcaatgtagaacccgtgggcagattacacatttttagcggcgcccacgggccagagaaggacttccccttacatctgggtaaaaatgtggtcggccgtatgccggattgctccgtcgccctgcctttcccctcgatttctaaacaacatgctgaaatagaaatcctggcatgggataaggcgccaatcctcagggattgtggaagcttgaacggcacccaaattctccggccacccaaggtcttgagccccggcgttagccaccgcctccgtgaccaggagctgattttgttcgccgacctgctgtag

SEQ ID NO: 123707 - DNA, 489 bp, synthetic construct
  misc_feature 1..489: note = Description of Artificial Sequence: Synthetic coding sequence
  source 1..489: mol_type = other DNA
atggaagatacacaagcaatcgactgggacgtggaggaagaggaagagacggagcaatcttccgagtcactgagatgcaatgtggaacccgtaggacgcttgcacattttctctggggcacatggccccgagaaggacttccctctccacctggggaaaaatgtggtaggtagaatgccagactgttctgtagctcttccctttccaagcattagcaaacagcacgcagagatcgagatcctggcttgggataaagcgcctattcttagggactgcggctccctgaatggcactcagatcctgcggcccccgaaggtgcttagtccaggtgtttctcaccggctgagggaccaggaattaatcctgtttgcagacttgctgtgccaatatcacaggctcgatgtcagcctgccatttgtctctcggggcccactgactgtggaggaaactcctcgcgtgcagggagagacacagcctcagcggttgtag

SEQ ID NO: 123708 - DNA, 342 bp, synthetic construct
  misc_feature 1..342: note = Description of Artificial Sequence: Synthetic coding sequence
  source 1..342: mol_type = other DNA
atggaagatactcaggccatagactgggacgtagaagaggaggaggaaacggaacaaagctcggagtctcttcggtgcaacgtggagcccgtcgggagactccacatatttagtggagctcacggcccagaaaaggactttcctctgcacctgggtaaaaacgttgtggggcgcatgccagattgcagcgtcgccctgccattcccatccatatcgaagcagcatgccgaaatcgaaatactggcttgggacaaggctcccattcttagggattgtgggagtctcaacggcacgcaaattctgcgcccccccaaggtgctttccccaggagtgtcccactag

SEQ ID NO: 123709 - DNA, 489 bp, synthetic construct
  misc_feature 1..489: note = Description of Artificial Sequence: Synthetic coding sequence
  source 1..489: mol_type = other DNA
atggaggacacgcaggctattgattgggatgtagaggaagaggaagaaacagagcagtcatcagagtcactcaggtgtaatgttgagcccgtgggtagactgcacatcttctctggggcacacgggcctgagaaggacttcccgctgcaccttggtaaaaacgtcgtgggcagaatgcccgattgtagtgtcgccctgcctttcccctccatttcaaaacaacacgccgagatcgagattcttgcctgggataaagcacctattctacgagactgcggttccctgaacggcacccaaattctgcggcccccaaaggtactcagccccggcgtcagtcatcgtttaagggatcaagagctcattctgtttgcggacttgctttgtcaatatcaccggcttgatgtctcactgccatttgtgagcaggggtcccctgaccgtcgaggaaaccccccgagtccaaggcgagacccagccacagagactgtag

SEQ ID NO: 123710 - DNA, 384 bp, synthetic construct
  misc_feature 1..384: note = Description of Artificial Sequence: Synthetic coding sequence
  source 1..384: mol_type = other DNA
atggaagacacgcaagctattgattgggacgtggaagaagaggaagagaccgagcaaagctcagagtcgctgcggtgcaatgttgagcctgtcgggagactgcatattttttcaggcgcccacggacctgagaaggatttcccattgcatctgggtaaaaatgtggtcggccggatgcctgactgctctgttgccctgcctttccctagcatctcaaagcagcacgctgaaattgaaattcttgcatgggacaaagcaccaattctcagagactgtgggagcctaaatggcactcagattctccggcctccaaaggtcctgtctcccggagtcagtcatagacttcgggaccaggaactgatcttattcgccgaccttctgtag

SEQ ID NO: 123711 - DNA, 921 bp, synthetic construct
  misc_feature 1..921: note = Description of Artificial Sequence: Synthetic coding sequence
  source 1..921: mol_type = other DNA
tgacacgtcggcgggacgaaagactctgaggacaactacggtgactcagaagatttggacctgcaggctacacagtgtttcctggaaaaccagggtttggaagctgtccaaagtatggaggacgagccaacccaggccttcatgctcacacctccacaggaacttgggccgtcccattgttccttccagaccactggtctactcaactgtaagatgcccccagccgaaaaagcgtcacggattcgcgccgccgaaaaggtgtcacgaggtgaccaggagagccctgacgcgtgcctgcctccgaccgtgcccgaagctccagcgccaccccagaaaccactgaacagtcagtcacagaaacatctggctccccctcctctgctcagccccttactgcccagcattaaaccaaccgtgcggaaaacccgccaggacggatcccaggaggctcccgaggctccactgtcttctgaacttgaaccattccatcctaagcctaagattcggacccgcaaatcctcgaggatgaccccatttccggcaaccagcgccgcccctgaacctcacccgtctactagtaccgcccagccagtgacacccaagccaactagccaggctacgaggtctaggactaaccggagctctgtaaagacacccgagccggtcgttcccactgcacccgaactgcagccctcaacaagcaccgatcaacctgtgacctccgaaccgacatcacaagtcacacgcggacgcaagtctcgaagcagcgttaagactcccgaaaccgtcgtcccgacagccctggaactgcagccatccactagtaccgatagacctgtgaccagcgagcctacctcccaagccactaggggacgcaagaatcgctcatcagtgaagaccccggaaccggtcgtgccttag

SEQ ID NO: 123712 - DNA, 6270 bp, synthetic construct
  misc_feature 1..6270: note = Description of Artificial Sequence: Synthetic coding sequence
  source 1..6270: mol_type = other DNA
atggaagacacacaggccatcgattgggatgtggaagaagaggaggaaacagaacaatcttcagaatccctgcgatgtaatgtcgagccagtcggtcgcctacatatcttttccggagcgcatggcccagagaaggactttccgctccacctgggcaaaaacgttgttggccgtatgcccgattgttccgtggccctcccctttccttccatttccaagcagcacgcagagatcgaaattctggcctgggacaaggccccaattttgagggactgcggttctctgaacggtactcagattctgcgtcccccgaaggtcttaagtccaggcgtgtcccatcggctgcgcgatcaggaactgatcctattcgccgatctcctttgccagtaccatcgcctcgacgtctcactgccgttcgtctctcggggacctctgaccgtggaagagaccccccgtgtgcagggggaaacccagccccagcggctactgttagctgaagactccgaagaggaggttgattttctttccgaacggaggatggtgaaaaaatcgagaacaacaagttcctcagtcattgtaccagaatcagacgaagaaggccattcacctgtcctggggggcttgggacccccctttgcatttaacttgaattctgatacagacgtggaggaggggcagcaacccgccaccgaggaagccagttcagctgctcgacgtggggccactgtggaggctaaacagtctgaggccgaagtagttacagaaattcagctggaaaaggatcagccattggtgaaggagagggataatgacactaaggtcaaacggggtgcgggcaatggagttgtgccagctggggtgattctggagaggtcccaaccccccggagaagattccgacaccgatgtggatgatgattcccgcccccccggcaggcccgccgaagtccatctggaacgtgcccagcctttcggcttcatcgactctgacacagacgccgaggaagaaaggattcccgctacgcctgtcgtcatccccatgaaaaaacggaaaatctttcacggtgttggtacccgaggcccgggggctcctgggctggcacacctgcaggagtctcaagctggatccgacaccgacgtggaggaggggaaagcgccccaagctgtgccgctggaaaagagtcaagcatcgatggttatcaactccgatactgacgatgaggaagaggtatctgccgctctgaccctggctcacctcaaggagtctcagcctgcaatttggaatcgtgacgccgaagaggatatgccccaacgggtggtattattacagcgatctcagacgaccaccgaaagagacagtgataccgatgtggaggaagaagaactgcctgtggaaaatcgggaggccgtgctgaaagaccacacaaagattcgcgccctggttcgggctcattccgaaaaggaccagcctccctttggcgactctgacgactccgtggaggccgataagtcatcccccggaatccacctggagcgaagtcaggcgagcaccactgtggacattaacacccaggtggaaaaggaagtcccccctgggtcagccattatccatatcaaaaaacaccaggtgagcgtggagggaacgaaccagaccgacgttaaggccgtgggaggacccgctaagttgctggtggtaagtcttgaggaggcatggcctctgcacggagattgcgagacagatgcagaggagggaactagtctcaccgcgagcgttgtcgccgacgtgagaaaaagtcaattgcctgcggagggggatgcaggtgccgaatgggctgcagcagtgctaaagcaggagagagcccacgaggttggtgctcagggtggtcctccggtggctcaggtggaacaggatctcccgattagccgcgagaacctcacagatctggtggtcgacaccgatacactgggggagagcactcaaccacaaagagaaggcgcccaagtccctaccggtagagaacgcgagcaacatgtgggcgggactaaggattcggaggataactacggggatagtgaagatctcgatctccaagccacgcagtgcttcctagagaatcagggcctggaggctgtccagtccatggaggacgagcccacacaagcgttcatgctcaccccgccacaggagttgggaccgtctcactgctcttttcagaccaccggcaccttggatgagccctgggaagtcctggccactcaaccattttgcttaagagaatcagaagacagcgagacacagccatttgatactcacctggaggcgtatggaccctgtctctcaccaccccgggctattcccggtgaccaacaccccgaatctccagttcacaccgagcctatgggcattcaggggcgagggcgccaaacagtcgataaagttatgggtatccccaaagagacagctgagcgcgtcgggcccgagcgaggcccccttgaacgcgagactgaaaagctgctgcccgagagacagacggacgttacaggcgaagaagaactaacgaaaggaaagcaggatcgggaacagaagcagctgttggcccgcgatacacagcggcaagaatccgacaaaaacggtgaatccgcgtctcccgagcgggacagggaatctctgaaggtagagatcgagaccagtgaagagattcaagagaaacaggtgcagaaacagacgctaccctccaaggcatttgaaagggaggttgaacgccccgtggccaacagagaatgcgacccagccgaactggaagagaaggtgccaaaagtaatcctggaacgagatacacaacggggcgagccagaaggcgggtctcaagaccagaaagggcaagccagttcgcctactcccgaaccgggagtaggagccggggatctgcctggacctacctcggcacctgtaccgtccggcagccaatcaggcggtcggggttctcctgtgtcacctcggcgacaccagaaaggattgctcaactgtaaaatgccgccggctgagaaagcaagcaggatcagagctgccgagaaggtgagccggggcgaccaggaatcaccagacgcgtgcctgccccccactgtgcccgaagcacccgcaccccctcaaaagcccctaaacagccagagtcaaaagcacttggcaccaccgcctctccttagccccctcctgccctccattaagcctaccgtacgcaagacacgacaggacggctcgcaggaagcacctgaagcaccattatcctctgagctggaaccatttcacccaaagcccaaaatcaggacacgcaagtcgtctaggatgacgccgtttccagcaacaagcgcagcccccgagccacatcctagcacctcgaccgcccaaccggtgactcccaagccaacaagccaggctaccaggagccggacgaacagaagctccgttaaaaccccggaacccgtcgtccccaccgcacccgagctgcagccaagtacctctacagaccaaccggtcacaagcgaacctacctctcaggtcacacggggaagaaagtcacgatcatccgttaaaacgcccgaaacagtggtaccgaccgctctggaactacagcctagcacttctacggacagaccggttactagtgaacccactagtcaagcaaccagaggcaggaaaaatagaagcagtgtgaaaacccctgaacctgtggtgcctactgctcctgagctacagccctctacctccactgaccagcctgtgaccagtgaaccaacctaccaggcaacaagagggcgcaaaaatagatccagcgtaaagactcccgaaccagttgtgccgactgctcccgagctgcggccatctacgagcaccgatcggccagtgacgcccaaaccaacaagtaggactacacggtcacgcactaatatgtcgtccgtgaagactccggaaacagtggtacccaccgcacccgaattgcagataagcaccagcacagatcagcctgtcacccctaagcctacttcaaggactactaggagccgaaccaacatgtctagtgtgaaaaatcccgagagcacggtgccgatcgcccccgagctccccccctccaccagtactgagcaacctgtcacccccgaacccacttcaagagccaccaggggccggaagaatcgctcctcaggaaagacacctgagaccctggtacctacagcaccaaagctggaacctagtaccagcaccgaccaaccagtcacacccgaacccacaagccaggctacgcggggaagaacaaatcggtcctcagtgaaaacgccggaaaccgtcgtacctacagcacccgaacttcagcctagcactagtactgaccaaccagtgactccagagccaacctcacaggccacacggggaagaactgacagatctagtgtgaaaacccccgaaactgtcgtccctacagctccagagttacaagcctcggctagcacagatcagccggtaacatccgaacctacttctcgcacaactcggggacgaaagaaccgctcatcagtgaagaccccagagacagtggtgcctgcagcccccgagctgcaaccctccacttccacagatcagcctgtaacccctgagcctacctcacgggcgacacggggccgcaccaatcggagttccgttaagacaccggagagcatagtaccaattgctcctgaattacagcccagcacgagccggaatcaacttgtgacgccagagcctacatcaagggccacccgctgtcgaacgaatcgcagctctgttaagacaccagagcccgtcgtgcccaccgcccctgagccacaccctactacctctacggatcagcccgtaactccaaaactgacgagtagagccacccgtagaaagaccaacaggtcctctgtcaagacccctaagcccgtggaacccgccgcttctgatctggagcctttcaccccaacagaccaatctgtcacccctgaggcgatcgcgcaaggcggacagagcaagacacttcgtagcagcactgtgcgggccatgccagtgcctacaacacccgagttccagagcccggtaaccacggaccagccaatcagccctgaaccaatcactcaaccgagctgcataaaacgccagcgagctgctgggaatcctggctctctggcagctccgatcgatcacaagccgtgcagcgctcccctagagcctaagagtcaagcctcacgtaaccagagatggggggcggtccgggccgcagagagtctcacagcaatcccagagcctgccagtccccaactcctcgaaactccgatccatgcctctcagattcagaaggtcgaaccagccggacgtagccgctttacacctgaacttcagccaaaggccagccagtcccgaaaaagatcacttgcgaccatggattcaccccctcaccagaagcagcctcagcgtggagaagtgagccagaagactgttattattaaggaagaggaggaggacactgcagagaaacctggcaaggaagaggatgtggtcaccccaaagcctggtaagagaaagagggatcaggctgaagaagaacctaataggatccctagcaggagtctgcgaagaacaaaactcaaccaggagagcactgctccaaaggtgttatttactggggtggttgacgctagaggagagcgcgcagtattagccctaggcggatcactcgcaggctcagccgctgaagcctcccacctggttactgacaggatccggcgcacagtgaaatttctgtgcgctttaggacggggaatccccatcctcagcttagactggctgcaccagagccgaaaggctggtttttttttgccccccgacgagtatgtggtcactgatcccgaacaggagaaaaactttggcttctctcttcaggacgccctgtctagagcgcgtgagcggcgcttgctggaagggtacgaaatttatgtaacgccaggagtgcagcccccccccccccagatgggagagataatctcatgctgtggggggacctatttgccatcaatgccgcggtcttataagccccagagggtggtgatcacctgcccgcaggattttccacattgtagtattcctctgcgagtggggctgccactgcttagcccggagtttctgctcacaggcgtgctgaagcaagaagccaaacctgaggcctttgtcctcagtcctctggaaatgtccagcacatag

SEQ ID NO: 123713 - DNA, 5409 bp, synthetic construct
  misc_feature 1..5409: note = Description of Artificial Sequence: Synthetic coding sequence
  source 1..5409: mol_type = other DNA
atggaagatacccaggctattgactgggacgtggaggaggaggaggagactgaacagtctagcgagagcttacgttgcaacgtggagcctgtgggaaggctgcacatcttcagcggggcccatggtcctgaaaaagacttcccccttcacctcggtaagaatgtggtgggcagaatgccagactgctccgtggctctgcctttcccaagcatctcaaaacagcacgcagaaatcgagatactggcctgggataaagctcccatcctgagggattgtggctctctgaacgggacccagatcctgcggccgcccaaagtactgagcccaggggtgtcacaccggctgcgcgaccaggagctgattctgttcgccgatttgctgtgtcaatatcatagactagatgtcagcctgccatttgtctctcggggcccgctgaccgtcgaggagacaccccgtgttcagggagaaactcagccccagcggctgcttcttgctgaagactccgaggaagaagtcgatttcctgtctgagcgaaggatggttaagaaaagccggaccacgtcctcatccgtcatcgtgcccgaaagcgacgaagagggacatagtcccgttttggggggactaggaccgcctttcgcctttaacctaaactcggacacggatgttgaagagggccagcaacccgcaaccgaagaggccagcagcgcggcccgccggggcgccaccgtcgaagccaaacagtccgaggccgaggtagtgacagaaattcagttggaaaaggaccagcctttagtcaaggaacgcgataatgacaccaaggtgaagcgaggtgccggcaacggcgttgtcccagccggagtgatactcgagcgtagccaaccgcctggtgaggacagcgatactgatgttgatgacgattccagacccccagggagaccagctgaagtccatcttgagcgcgctcagccctttggctttatcgacagtgatacggatgctgaggaggagcgcatccccgccacccctgtagttatccctatgaaaaaacgtaagatcttccatggtgtcggaacacgggggccaggcgctccagggttagctcacttacaggaaagtcaagccggaagtgataccgacgtcgaagagggaaaagctcctcaggccgtgcccctggagaagtcccaggcaagcatggttataaacagtgacactgacgatgaagaggaggtgtccgctgccctaaccctggcccacctaaaggaatcccagccagccatctggaatagagatgctgaagaagatatgccgcaaagagtggtgctgctgcagaggagtcagactactactgaacgcgactcggataccgacgtggaagaagaagaattaccagtggagaatagggaagcagtacttaaagaccatactaagatccgagccctagtgcgcgctcactcagaaaaagaccagcctccattcggagattcggatgattctgtggaggccgacaaatcctctccaggcatccacctcgaacggagccaggcatctacgaccgttgacattaacacacaggtcgaaaaagaggttcctccaggttccgctataatccatatcaaaaagcaccaggtcagcgtcgaggggactaaccagactgatgttaaggcagtgggagggccagccaaattactggtggtcagtttggaggaggcctggccattacacggggactgtgagacagacgccgaggaaggcacaagcttgactgcctctgtcgttgcagacgtgaggaaatcacagctgccagcagagggcgatgctggtgccgagtgggcggccgccgtgctcaaacaggagcgtgcccacgaagtgggcgctcagggcgggcctccagtagcccaagtcgagcaggatctcccgatcagtcgagagaaccttactgacttagtggttgacacggacacactgggcgagagtactcagccccaaagagagggagctcaggtgcctacaggaagggaaagagaacagcacgttggcggcacaaaggattcagaggacaattacggggactctgaagacctcgatctccaggcgacccaatgcttccttgagaaccagggactggaagcagtgcagtctatggaagatgagcccactcaggcatttatgctgaccccgccccaagagcttggaccttctcattgttctttccagacaaccggcaccttagatgagccatgggaggtgctcgccacacaaccattctgtctcagagaatctgaggactccgagactcagcccttcgatacgcatctggaagcatatggaccatgcttgagcccgccaagagcaattcctggcgatcagcaccccgaatcccccgtacacaccgagcctatgggcatccagggtcgagggagacaaacagttgataaggtcatgggtattcctaaagaaacagccgagagagtgggccccgaacgcggcccacttgaaagggagactgaaaaattgcttcctgaacgacaaaccgacgttaccggagaggaggaattgacaaagggcaagcaggatagggagcagaaacagcttctcgctagggatactcagcgacaggaatcagataagaatggcgagagtgcctctcccgagagggacagagagtccctcaaagtggaaattgagacctcagaggagatccaggagaaacaggtgcagaagcagacactgccctctaaagcctttgagcgggaagtggaacggcccgtggccaacagagagtgtgacccagcagaattggaagagaaagttcccaaggttatcctagagagggacacccagcgcggtgagccagagggcggtagtcaggaccagaagggacaggccagttcccctactccagaacctggtgtgggggcaggcgacctgccaggccccaccagcgctcctgttcccagcggctcgcagtcaggaggcagaggttcccctgtgagtcctcggcgccatcaaaaaggcctcctgaactgtaagatgccacccgccgagaaggcgtctcgaatcagagccgctgagaaggtcagccgaggagatcaagaaagccccgatgcctgtttgccgcctaccgtgcccgaagctcccgccccgccccagaagccgctaaactctcagtcacagaagcacctggcaccgccaccgctcctttcacctttgctgccatctatcaaacctaccgtgcgtaagactagacaggatggctctcaggaggctccggaggctccactgtccagcgaactggagccctttcatccaaagcccaagatacgcactaggaagtccagtagaatgacccccttccctgcgacctcagctgcccccaagctggagccatctacttcaaccgatcagccagtcaccccggagcctacctcgcaagcaaccagaggaaggacaaatagatccagcgtcaaaacccctgaaactgtggtgcccacagcccccgagctccagccctccaccagtacagaccagcctgtgacgccagaacctacgagtcaagcgactcgtggccggactgataggagctccgtcaagactccagagacagttgtccctactgctcccgagctgcaggcctcggcttcaactgatcagcctgtcacctcagaacctacttcccgtactacccgcggtagaaagaaccgcagtagcgtgaaaacaccagaaaccgtcgtgccggcggctccggagctccagccctctacctccactgaccaaccggtaacacctgagcctacctctagagccacccggggccgcacaaacagatcaagcgtgaagaccccagagtcaatcgtgccgatcgctccggagctccaaccgtctaccagcaggaaccagcttgtgacccccgaacctactagcagggcaactaggtgccgaaccaacagaagttcggtgaaaacacccgaacctgttgtgcctactgcaccagaacctcaccctacaacttctacggatcagcccgtcacccctaagttaacgtctcgtgcaacccgtcgcaaaactaacaggtcttcagtcaagaccccgaaacccgtggaacccgcagcctccgacctggaaccattcaccccaaccgaccagtctgtgactcccgaggctatcgcccaaggcgggcagtctaaaaccctgcggtccagcacggtccgggcgatgcctgttccgacaacacctgagtttcagtcccccgtaacaactgaccaacctattagccccgagcctattactcagccatcgtgtatcaaaagacagcgagcagcaggaaaccctggctccctggccgcaccgatcgaccataaaccatgctctgcaccccttgagcccaagtcccaggcaagtcgtaaccagcgctggggagccgtcagagccgctgaaagcttgactgctatccccgagccagcaagccctcagctcctggaaacgcccatacacgccagccaaattcagaaggtggagccagcaggcagaagcagatttacacctgaactgcagcctaaagcgtctcaatcgcgtaaacgatccctggctaccatggatagcccgccccaccaaaagcagcctcagaggggagaagtttcccaaaaaactgtgattatcaaggaggaggaagaggatacggcagagaagcccggcaaagaagaggatgtcgtgacgcctaagcctggcaagcggaagcgggaccaggccgaggaagagcccaaccggatcccaagcaggtcgcttcgcaggactaagctgaatcaggagtctaccgccccaaaggtcttgtttacaggcgtcgttgatgctaggggtgaaagagccgtactcgccctgggtggtagcttggctgggtcggcagccgaggcctcacatttggtcacggacaggattcggaggacggtgaagttcctctgcgccctgggccgcggaatccccattctctcactcgattggcttcatcagtcgaggaaagccgggttctttctcccccccgacgagtacgtcgtcacagaccctgaacaggagaaaaattttggattctccctgcaggatgcgctctctagagcgagagaaagacgactgctagagggctacgaaatatacgtgactccaggtgtgcaacccccccctccccagatgggcgaaattatttcatgctgcggtggtacatatttacctagcatgccacggtcttacaagccacagcgcgtcgttataacctgcccccaggattttccccactgttctattccccttcgagtcggcctacctcttctcagccctgagtttcttctgaccggggtcctgaaacaagaggcaaaacccgaagcattcgtgcttagccctctcgagatgtctagtacatag

SEQ ID NO: 123714 - DNA, 342 bp, synthetic construct
  misc_feature 1..342: note = Description of Artificial Sequence: Synthetic coding sequence
  source 1..342: mol_type = other DNA
atggaggatacccaagcgatcgactgggacgtcgaagaagaggaggaaacagagcagtcctcagagtccctgcggtgcaacgtcgagcctgtaggcaggcttcacatatttagtggcgcccacggtccagagaaagacttccccttgcatctgggcaagaacgtcgttggaaggatgcctgactgcagcgtggctctcccctttccttccatttctaagcagcatgccgagatcgagattctcgcctgggacaaggcaccgatcctgcgagactgcggctcattgaacggaacccagatacttcgccctcctaaggtcctcagccccggggtctcgcactag

SEQ ID NO: 123715 - DNA, 6270 bp, synthetic construct
  misc_feature 1..6270: note = Description of Artificial Sequence: Synthetic coding sequence
  source 1..6270: mol_type = other DNA
atggaagacacccaagccatcgattgggatgtggaagaggaagaagaaactgagcagtcttcagagtccctgaggtgtaatgttgagccggtgggtcgcctgcatattttttccggggcccacggccccgagaaagattttccactacaccttggcaagaatgtggtgggccgtatgcccgactgcagtgtggctctgccatttccttccatcagcaagcagcatgcagaaatcgaaattctggcatgggacaaggctcccattttaagagattgcgggagcctgaatggcacgcaaatcctgaggcccccgaaggtgctatctccaggcgtgtcgcaccgacttcgcgaccaggagcttatcctctttgcagatctactgtgtcagtatcaccgcctggatgtatcattacccttcgtctctcgaggtcctctgactgtcgaggaaactccacgtgttcagggggagacccagccgcagcgtttgctgcttgccgaggacagcgaggaagaagttgacttcttgagcgagcggcggatggttaagaaaagccgtactacgtcctccagcgttattgttcctgagtcagatgaagagggacattcgcctgtgttaggtggcttgggcccacccttcgcctttaatcttaattctgatactgacgtggaagaaggacagcaacctgcaaccgaagaagcaagctcagccgcccgtaggggagcaaccgtcgaagcaaaacagtccgaagcagaggtggtgactgagattcagctggagaaggaccagcctctggtcaaggagcgggacaacgacactaaagtgaaaaggggagccggtaacggagtagtccccgccggcgtaattcttgagagaagtcaaccaccaggcgaagacagcgacaccgatgtcgacgacgacagcagaccccccggcaggcccgctgaggtccacctggaacgagcccagccctttggcttcatcgattctgataccgacgcagaggaggagcggattcctgcaacccctgtagtcatcccaatgaaaaaaagaaagatcttccatggtgtgggtacccgaggtcctggtgcacctggactagcccacttacaggagtctcaggctggtagtgataccgatgtggaagagggcaaagcacctcaggcagtacctctcgagaagtcgcaggcatcaatggtaattaatagcgacaccgatgacgaagaagaggtctcagcagccctgacactcgcacaccttaaagagagtcagccagctatctggaaccgggatgccgaagaagatatgccacaaagagtggttcttcttcagcgatcacagaccacaaccgagcgggattcagacaccgatgtcgaagaagaggagctcccggtcgagaacagagaggccgtgctgaaagatcacacgaaaattcgggcactggtgcgtgctcacagcgaaaaagatcagccccccttcggggacagcgacgattctgtagaagcagacaagagcagccctggaatccatttggagcgcagtcaggcgtctaccacagtggatattaatactcaagtagaaaaggaagtcccaccgggatcagcaattattcacatcaaaaagcaccaggtcagcgtggaaggcactaaccaaacagacgtgaaagccgtgggtggacccgctaaactcctggttgtgagccttgaagaagcatggccactacatggtgattgcgagaccgacgccgaagaaggtacttcactgacagcgtccgtagtggcagacgtgcgtaagtcccagcttccggccgaaggggatgctggggccgaatgggcagccgccgtgctgaaacaggagcgcgcacacgaggtgggagcccaggggggccctcccgtggcacaggtggagcaggaccttcccatctcgcgtgagaatctgacagatctggtcgtggacacagacactttaggtgagagtactcagcctcagagggagggcgctcaggtccccactggacgggaacgggagcagcacgttggggggacaaaagactccgaggataactacggagactctgaagatctggatctgcaggcaacacaatgctttttagaaaaccagggactcgaagctgtgcaaagcatggaggatgaacccacccaggcttttatgttaaccccacctcaggagttgggccccagccactgttcattccagaccaccgggacgctggatgagccgtgggaggtgctcgcaacacaacccttctgtttgcgggaaagcgaggattccgagacccaaccttttgatacccacctcgaggcctatgggccttgcctctcccccccccgggccatcccaggtgatcaacaccccgaatcccccgtgcatacagaacctatgggaatccagggaagaggacgtcagaccgtggataaggtcatggggatcccaaaggaaactgccgagcgagtggggccagaacggggccctctcgagcgtgagacagaaaaactgctgccagaacgccagacagatgtgacaggagaagaagaactgacaaaggggaagcaggacagagagcaaaagcagctgctggcacgggatacccagagacaggagtctgacaaaaacggggaatctgcctccccagagcgcgatcgggaaagtttaaaggtagaaatcgagacctcagaggagattcaggaaaagcaagtgcaaaagcaaacactgccaagtaaagctttcgagcgggaggttgagaggccagtggccaatcgcgagtgcgacccagcagagctggaggagaaagtgccaaaagtcatccttgagagggacactcagagaggtgagccagagggcggcagtcaggaccagaaagggcaagccagcagtcccactccagaacctggcgtgggggccggggacctgccaggcccgacttcagctcccgtgccaagtgggagccagtctggcggccggggctctccagtttctccgcgacgtcaccagaaaggactgttaaactgcaagatgccgcctgcagagaaggcatccagaattcgcgcggctgagaaggttagtcgtggcgatcaagagagccccgacgcatgtctgcctccgaccgtacccgaagcccctgcaccccctcagaagcccctcaattcgcagagtcagaaacatctcgccccacccccattactgagccccttattaccttctatcaagcccaccgttaggaagaccaggcaggatggcagtcaagaagcccccgaggcgcccctgagctccgagctggagcctttccatcctaaaccaaagattagaactcggaaaagttcgagaatgacaccattccccgctacctcagcagcccccgagcctcaccccagtacatctacagcccagcccgtgacacctaagccgacctctcaggccacgaggtcccgcactaaccgcagtagtgtaaagacccccgagccggtcgtcccaactgcccccgaactgcaaccctcaacctctacagatcagcccgtcacatccgaacctaccagtcaggtgacaaggggaaggaagagccgcagttcagttaaaacacccgaaaccgtcgtgccaactgcacttgaactgcaaccctctacgtcgactgatagaccagttacctcagagccgaccagtcaggccacacggggcaggaagaatcgcagttcggttaagacccctgagccggtggtcccaaccgcccctgaacttcagccatccacaagtaccgaccaacctgtgacatctgagccaacctaccaagcaacacgaggacggaaaaatcgaagcagtgtgaagactccagagcccgtcgtgcccacagcgccagagctgaggccatctacttctactgaccgccctgtgacacctaaacctaccagtcgaactacgcggtcccgtactaacatgtcctcagtgaaaacccccgagaccgtcgtgcctaccgccccagagctgcagattagtaccagcacagatcagccagtgactccaaagcctaccagcaggaccacccgctctaggaccaacatgagttcagtgaaaaatcccgaatcaaccgtgccaatcgctcccgaactccctccaagcacctcaacagagcagcccgtgacgcctgagccaaccagccgtgctacgcggggcaggaaaaatcgtagcagcggaaagacacccgaaacccttgtgccaaccgctcctaaactcgagccctccacaagtaccgatcagccagtaactccagagccaacatcccaggctactcggggccgcaccaatcgatcctcagtgaaaactccagaaacagtggtgcccaccgcgccagaactgcagccttccactagtaccgaccaacccgtgacgcctgaaccaacctcccaggccacacgaggtcggactgatcggtcctcggtgaaaacacctgagacagtggtcccaaccgcccccgaactgcaagctagcgctagtaccgatcaacccgttacgtccgaacccacttcaaggacgactcgcggccggaaaaaccggagctctgtaaagacgcccgagacagttgtccctgccgcccctgcattacagccgtcaacttctaccgaccaacctgtgacccctgagccaaccagtcgagccacaaggggaagaactaatcgatcgtcagtgaaaacaccagaaagtatagttcccatcgcaccagagctgcagccttccacttccagaaaccaactggtcacgcccgagccaaccagccgcgccacccgctgcagaactaatcgtagctccgtgaagaccccagaacccgtagttccaactgcccctgagcctcaccctactacttcaaccgaccaacctgtgacgccgaaactgacttctcgcgcaacgcggcggaagaccaatcgcagcagcgttaagactccaaaaccggtggagcccgcagcctctgacctggaaccattcactcccacggaccaatctgtaacaccggaggccattgcccagggtggacagtctaagaccctgcgctcttctacagtccgggcaatgcccgtccccaccacccctgagtttcagagcccagttaccactgatcagccaatcagccctgagcctattactcagccgagctgtataaagcgtcaacgggctgctggaaatcctggctccctcgctgcaccaatcgatcacaagccctgctccgcccccttggagcccaaaagtcaggcctctagaaaccagcggtggggagccgttcgggccgcagaaagcctcaccgccatccccgagccggcttccccccaactgctcgagactccaattcatgcatcccagattcagaaggtggaacctgcgggacgctcacgatttaccccagaactccagcccaaggcgtcacagagcaggaagaggagcctcgctaccatggactcccctcctcatcagaagcagccccagcgcggcgaagtttcacagaaaactgttataattaaggaggaagaagaggatacagccgaaaagcccgggaaagaggaagatgtggtcacacccaagcccggaaagcggaaacgagaccaagcagaggaggagccaaaccgcataccgtcccgctcattgcggcggacaaaacttaatcaagaaagcaccgcccccaaagttctgtttacaggagttgtggacgcgaggggtgagagggccgtgcttgctctggggggcagcctggcaggaagcgctgccgaagcctcccacctggtaaccgaccgtattcgaagaacagtcaagttcctgtgtgccctaggcagaggaatccctattctttcactggactggttacatcaaagtcggaaggccgggttcttccttcccccagacgaatacgttgttaccgacccggagcaggaaaagaatttcggtttctctcttcaagatgctttgagcagggctagggaacgcaggctcctagaaggctatgagatttatgtgacacctggagtgcagcctcccccccctcagatgggtgagatcataagctgctgcggcggaacatatctccccagcatgcctaggagctataaaccccaacgtgttgtgataacctgtccacaagatttccctcactgttccattccactgcgcgtcggactgccacttctgtctccagaattcctgcttacaggagtcctcaagcaggaggcgaagcccgaggcattcgtcctctcccccctggagatgtcctccacatag

SEQ ID NO: 123716 - DNA, 738 bp, synthetic construct
  misc_feature 1..738: note = Description of Artificial Sequence: Synthetic coding sequence
  source 1..738: mol_type = other DNA
atggaggacactcaggctattgattgggacgtggaagaggaagaagagacagaacaaagttcagaaagcctgcgctgcaacgtcgagccagttggccggcttcacatctttagcggcgctcatggcccagagaaagacttccccctgcatctgggcaaaaatgtggttgggcgcatgcctgactgttccgttgccctgccgtttccctcgatttctaagcaacatgccgagatcgagatcctggcctgggacaaggctccaatcctgagggactgtggatctctcaacgggacgcagatcttgaggccccccaaggtcctgtcacctggggtgagtcatcggctgagagaccaggagctcatcttattcgcagacctgctgtgccaatatcaccgcctggacgttagcttaccttttgttagcagaggacccctgacggtggaagaaaccccccgagttcaaggggagacacagccccagagactgctgctagctgaggattcggaggaagaggtcgatttcctgagcgagagacgcatggtaaagaagagccggaccacaagctcatcagtgatcgttccggagtctgacgaagaagggcatagccccgtcctgggtgggctaggaccaccttttgctttcaacttgaactccgacaccgacgtcgaggagggccagcaaccagccaccgaagaggcatcaagcgcggctagacggggagccacggtcgaagcgtag

SEQ ID NO: 123717 - DNA, 342 bp, synthetic construct
  misc_feature 1..342: note = Description of Artificial Sequence: Synthetic coding sequence
  source 1..342: mol_type = other DNA
atggaggacacccaagccatcgactgggacgtcgaggaagaggaggagactgagcaatccagtgagtcgctaagatgcaacgtggaaccggtaggcaggctccatatttttagtggcgcgcacggtcccgaaaaagattttcccttgcacctgggcaagaatgtggtcggccgcatgccagattgctcagttgctctgcccttcccctcaatcagcaagcagcatgcagagatcgaaatactggcctgggataaagctccgatcctcagagattgtggctccctgaatggcactcagatcctccggccccccaaagttctgtcacctggggtttcgcattag

SEQ ID NO: 123718 - DNA, 384 bp, synthetic construct
  misc_feature 1..384: note = Description of Artificial Sequence: Synthetic coding sequence
  source 1..384: mol_type = other DNA
atggaggacactcaggccatagattgggatgtggaggaggaggaagaaacagagcaatcctctgagtctttgcgatgcaatgtggagcccgtgggaaggctgcacatcttcagcggggctcatgggccagaaaaggacttcccactccacttggggaagaacgtggtcggtagaatgcccgactgtagcgttgccctgccttttccctctatatcgaaacagcacgccgaaattgaaatcctggcttgggacaaggcccccattcttcgcgactgtggctccctgaatggtacacagatactcagaccgcccaaagtgttgagcccgggcgtcagccatagactccgtgaccaggagttgatccttttcgccgatttactgtag

SEQ ID NO: 123719 - DNA, 6270 bp, synthetic construct
  misc_feature 1..6270: note = Description of Artificial Sequence: Synthetic coding sequence
  source 1..6270: mol_type = other DNA
atggaggacacccaagctatcgattgggacgtcgaagaagaagaagaaaccgagcagtcttccgaatcccttcgatgtaacgtggaaccagtcggccggttgcacatcttctctggagcccacgggccagagaaggactttcctctccatttggggaaaaacgttgtcggaaggatgcccgactgtagcgtggcactaccttttcccagcatttccaaacaacacgccgaaatagagatcctggcctgggataaggcccccatcctccgagactgtggatccctcaacggcacccaaatcctccgtccacccaaagtactgtctcctggagtgagccatcggctgcgcgatcaggagctgatcctgtttgctgatctactatgccagtatcaccggctggacgtgagcctgccatttgtcagcagaggacctcttacagtggaggagacacctagggtgcagggcgagacacagccgcagaggctcctgctggccgaggattctgaggaggaagtggactttctgagtgagcgcaggatggtgaagaagtcccgaacaactagctcttctgtcatcgtgccagaaagcgacgaagaaggtcactctcctgtccttgggggtctcggccctccctttgcattcaatctcaactctgacacagacgtggaggagggtcaacaacccgctacagaggaagccagctcagcggcccggcgtggggcaaccgtagaggccaaacagagcgaggccgaggtggtgaccgagattcagctggagaaggatcagcctctggtgaaagaaagagataacgatacaaaggtgaagcgcggagctggcaacggagtggtccccgcgggggtgatccttgagaggtctcagcctccaggagaggatagcgataccgacgtggacgacgactctcgcccaccaggcaggccagctgaggtgcacctggagcgggcccagccattcgggtttatcgactctgacacagacgctgaggaagagcggatccctgcgacacccgttgtaatcccaatgaagaaacgcaagatttttcacggagttggcaccaggggccccggggcacccgggctcgcgcaccttcaggaatcccaggcagggtccgacacggacgtcgaagaaggtaaagccccccaggccgtgcctctggagaagagtcaggcttccatggtgatcaactccgataccgacgatgaagaagaggtctccgccgctcttacgctggcccacctgaaggagtctcagccagctatctggaatcgggacgccgaggaagacatgccccaaagagtggtcctgctgcagcggtcacagaccactacagaacgagatagtgacactgatgttgaggaggaagagctccctgtggagaacagggaggccgtgttgaaggatcacaccaagatacgggcgctggtacgcgctcactccgaaaaagatcagcctccatttggcgacagcgacgacagtgtcgaggccgataagtcatctccaggcattcacttagagcgcagccaggcttctaccactgtggacattaacacgcaggtggagaaggaggtgcccccagggtcagccatcattcacatcaagaagcatcaggtgtcagtggaaggcaccaaccaaactgacgtcaaggccgtgggcgggcctgccaagttgctggttgtcagtctcgaagaggcctggccactgcacggggattgtgagacggacgccgaggaggggactagtctaactgcatccgtggttgcagatgttagaaaatcccagctgcctgctgaaggtgacgctggtgcagagtgggctgctgctgtgctgaaacaggagcgggcacacgaggttggcgcccagggcggtccaccagtggcacaagtcgaacaggacctgccaatatctcgcgaaaacctaactgatttagtcgtggacaccgatactctcggcgagagtacacaacctcaaagggaaggcgctcaggtacccactggcagggagagggagcagcacgttgggggaactaaagacagcgaggacaactatggtgactctgaagatcttgatctccaggctacacagtgctttttagagaaccagggccttgaggctgtccagagcatggaggacgaacctacccaggctttcatgctgacaccccctcaggaactagggccttcccactgtagtttccagacgacgggaacactcgatgagccatgggaagtcctggctacacagcctttctgccttagggagtccgaggattctgaaacccagccgtttgatacacacctggaagcctacggcccctgtctgagtccaccgcgagccatccccggagaccagcaccctgaatccccggtgcacactgaacccatgggcattcaaggccgcggtaggcaaacagtcgataaagtaatgggcatccctaaagagactgcagaaagagtgggaccagagcgaggcccgttggagcgtgaaaccgaaaagctgctgccggagaggcagacagacgtgaccggggaggaggaattgacaaaagggaaacaggacagggagcagaagcagttgctcgctagggatacacagcgacaagagtctgacaaaaatggcgagtctgctagccctgagagggacagagagagcctgaaagtggagattgagactagcgaggagatacaggagaaacaggtgcaaaagcagactctgcctagtaaggcctttgagcgcgaggtggaaaggcctgtggccaatcgggaatgtgatcctgccgagttggaagagaaagtgccaaaggtgatcctggaaagggatacccagaggggtgagcccgaagggggttcccaggaccaaaaaggacaagcttcttctcctacacctgaaccgggcgtcggcgccggtgacctgccagggcctaccagtgcaccagtaccgtcagggtcacagtccggcgggagagggagccctgtctccccccgaagacatcagaagggcttgctcaattgtaaaatgcctccagccgagaaagcttccagaattagagctgcagagaaggtatcccggggcgatcaggagtccccggacgcctgcctgcctccgaccgtgccagaggcacctgccccccctcagaaacctcttaatagccaaagccagaagcaccttgcaccacctccactcctctcaccgctgctgccatctataaaacccaccgtgcgaaagacaagacaggatggaagccaagaggcaccagaagcccccttgtcgagcgagctggagccattccatcctaagccaaagattcgcactcgaaaatcgtcccgaatgacaccctttcccgccacttctgcggctcctgaaccacacccctctacctccactgcccaacccgtcacccctaagccaacgagccaggcaacgaggagcagaaccaaccgttcatcagttaagacaccagaacctgtcgtgcctaccgcccctgagctgcagccttctacgagcacagatcagcctgtgacgtccgaacccacgtcgcaggtgacacgcggacgtaaatcacgcagctctgtgaaaactcccgagacggtggtgcccacagccttggaactgcagccgtcaacttcaactgataggccagtgaccagcgagcccacgagccaggctactcggggcagaaagaataggagtagtgtgaaaacccctgagccagtggtccccactgcaccggaactgcagccatcgacaagcaccgaccaacccgtaacatccgagcctacatatcaggcaacacggggaagaaaaaacaggagctcagtgaagactccggaacccgttgtgcccacagccccagagctgcgcccgtcaacatccaccgacagacctgtgacccctaagccgacatcacgcaccacacggagtcgaacaaacatgtcaagcgtgaaaacccccgagaccgtggtgcccaccgcacctgaattgcagatctctacttccactgaccagcctgtgacccctaagcctactagtagaactacacggtcccgaacaaatatgagttcagtgaaaaaccctgagagtactgtacccatcgctccagaattaccaccctccacctcaacagagcagcctgtcacccccgagcccacgtccagggccactagaggtcgcaagaataggtccagcggcaaaacaccagaaacgctggtcccaacggcaccgaagctggaaccgagcacttctacggatcagccagtcacacctgagccaacctcacaagccaccaggggaagaaccaatcgctcctccgttaagactcccgagactgtcgttccgacagcacctgaattgcagccttcgacttccaccgaccagccagtgaccccggaaccaacctcacaagccacacgcggaagaacagaccggtctagcgtgaaaaccccagaaaccgtcgtgcctaccgctcccgagcttcaggcgagcgcgtccactgaccagcctgtcacctcagaaccaaccagcaggactactcgaggccgcaagaacaggtcttccgtcaaaacgcccgagactgtggtgcctgccgcacccgagttacagccaagtacctctaccgatcagcctgttactcctgaaccgaccagtagggctacgagggggaggacgaatcgaagttcagtaaagactccagagtcaattgtccccattgcaccggagttgcaaccttctacaagccgtaatcaactggtaacacccgagccaacctccagagccactcggtgcaggacgaaccgctcctccgtaaagactcctgagccagttgtgcccaccgccccagaaccccacccaaccacttccacagatcaaccggtgacccccaagctcactagccgggcaactaggcgaaagaccaatcgatccagcgtaaaaacacctaagccggtggagccagcggccagcgacctggaacccttcaccccgaccgaccagtcagtcacccctgaagctattgctcagggtggacagagtaagacgctgcggagttctactgttagggccatgcctgtgcccaccactcctgagttccagtcacccgtcaccacggatcagccaatttccccggaacctattacacaacccagttgtatcaagcgccagcgtgccgccggcaatccaggcagcctggcagcacctattgaccacaagccatgctccgcccccctcgagccaaaatcccaggcaagcaggaaccagcgttggggcgcggtcagggccgccgagagccttacggctattcctgagccagctagccctcaattgttagagactcccattcacgcttcccaaattcagaaagtcgaacccgccgggcgcagccgatttacccctgaacttcagccaaaggcgtcgcaaagccgaaagcgctctctcgccactatggatagcccacctcatcaaaaacaacctcagcgcggtgaggtgtcccaaaagaccgttatcattaaggaagaagaggaggataccgcggagaagccaggcaaggaagaggacgtggtgacacccaagcccggcaagcgaaaacgagaccaggctgaagaggaacctaaccgaattccaagccgctcactgaggcggacaaagctcaaccaagaatctaccgctcccaaggttctgtttacaggagtagtggacgcgcgcggggagcgagccgtattagccctgggcgggtctctagctgggagtgccgccgaggcttctcacttggtgactgatcggattcgacggacggttaagttcctttgtgcgcttggccggggcatccccatcctcagcctggactggctgcaccagtcccgaaaagcaggtttcttcctgccacctgatgagtacgtggtgactgatcctgagcaggagaaaaactttggcttcagcctccaggacgcattgtcccgcgccagagagagacgtcttctggaaggatacgagatttacgtgactccgggtgtgcaaccaccaccgcctcagatgggggaaattataagctgttgtggagggacttacctgccttccatgcctcggtcctataaaccacaacgtgtggtgattacgtgtcctcaggacttcccacactgctcaattcctctgcgcgtagggttaccccttctgtcgcccgagtttctgctgactggtgtcctgaagcaggaagctaagccagaggctttcgtgctatccccactagagatgagctccacttag

SEQ ID NO: 123720 - DNA, 489 bp, synthetic construct
  misc_feature 1..489: note = Description of Artificial Sequence: Synthetic coding sequence
  source 1..489: mol_type = other DNA
atggaggatacccaggctatcgattgggatgttgaagaagaggaggaaacagagcagtctagtgaaagccttaggtgcaatgtcgaacccgtgggtcgactgcacattttctctggggcccacggtcctgaaaaggatttcccactccatctgggaaagaacgtggtcgggaggatgcccgattgctccgtcgcacttcctttcccatccattagcaaacagcatgccgagattgagatacttgcttgggacaaagcccctattctaagagactgcggcagccttaacggcactcaaatccttaggccccctaaggtcttaagtccgggagtttcccacaggctgcgagatcaagaactgattctgtttgcggatttgctctgccagtaccatcgcttagatgtgtcactcccatttgtatccagaggacctctgaccgtagaagagaccccacgcgtgcagggtgagactcagccccagcgactgtag

SEQ ID NO: 123721 - DNA, 921 bp, synthetic construct
  misc_feature 1..921: note = Description of Artificial Sequence: Synthetic coding sequence
  source 1..921: mol_type = other DNA
tagcacgtcggcggcactaaggattctgaagataactacggcgactccgaggatctagatttacaggcaacgcagtgcttcctagagaaccagggcttggaagctgttcagagtatggaggacgagcctactcaggcgtttatgcttactcctccacaagagctcgggccaagtcactgcagttttcagactactgggctcctcaattgcaagatgcccccagcggaaaaggcgagtcgtatcagggccgctgaaaaagtgtcaagaggggatcaggagtcaccggatgcctgtcttccccctacagtgcctgaggcacccgccccgcctcagaaaccgcttaattcccagtcccagaaacatctggctcccccgccactcctgtctcccttgttgccatctatcaagcccacggtacggaaaacacgccaggatggttcacaggaggcccccgaggctccactgagcagtgaactggaaccgttccacccaaaaccaaagataaggaccagaaagtcatcaaggatgaccccctttcctgcaacctccgccgcccccgaaccacatccgagcacatctactgcccaaccggtgacccctaaacctacgtctcaggctacaagatctagaaccaatcgcagtagcgtgaagaccccagaacctgttgtccctacagcgcctgagttacaaccatcaactagcactgatcagccggtgacttcggagcccactagccaggtcactcgtggacgaaagagccgaagctccgtcaaaacccctgagacagtggtaccgacagcactggagctccagccatccacctcaactgacaggcctgtaacaagcgagcccacatcacaggctacccggggaaggaagaatagaagtagcgttaagacccctgagccagttgtaccgtag

SEQ ID NO: 123722 - DNA, 921 bp, synthetic construct
  misc_feature 1..921: note = Description of Artificial Sequence: Synthetic coding sequence
  source 1..921: mol_type = other DNA
tgacatgtaggaggcactaaggactccgaagacaattacggagactctgaagacctggatctgcaagcgacacagtgtttcttggaaaaccagggtctcgaggccgttcagtcgatggaggacgaacccactcaagccttcatgctgacaccccctcaagaactgggacctagtcactgctctttccagacaaccggacttttgaactgtaagatgcctcccgccgagaaggccagccgcattagagcagccgagaaggttagccgaggcgaccaggagtcccctgacgcctgcctccctcccacagtaccagaggcgccagcaccccctcagaagcctttgaacagccaatcacagaagcacttggcgccgcctccccttctctcaccccttctgccttccatcaagccaactgtcaggaaaactagacaagacgggagtcaggaggcccctgaggctccactgagctctgagttggaaccattccaccccaagccaaaaattagaaccaggaaatcttcccggatgacccctttcccagctaccagcgctgcccccgaaccgcacccatcgacttctacggcgcagccagtaacccctaagccaacctcccaggcaactagaagtcgtacaaacagatcttctgtgaaaactcctgagcctgtggtcccaaccgccccagaactgcagccttcaacatcaaccgatcagcccgtgacaagcgagcctacttctcaggtgacacggggcaggaagagtagatcatccgtgaagacacccgagaccgttgttcccacggccctcgagctgcagccaagcacttcaaccgatagacccgtaacatcagagcctacaagccaagccactcgggggcgcaaaaatcgcagctctgttaagacacctgaacctgtcgtcccatag

SEQ ID NO: 123723 - DNA, 384 bp, synthetic construct
  misc_feature 1..384: note = Description of Artificial Sequence: Synthetic coding sequence
  source 1..384: mol_type = other DNA
atggaagacacccaggccatcgattgggacgtcgaagaggaggaggagaccgagcaaagctccgagagtctgaggtgcaacgtagagcccgtgggcagactccacatatttagcggggcccatggcccggagaaggactttcctctgcacctgggcaaaaatgtagttggaaggatgcccgattgctccgtcgctctgcccttcccgagcattagcaagcagcatgccgaaatagagatcctcgcctgggacaaggctcccattctccgagattgcggaagccttaacggtacacaaatactgcgtcccccaaaggttctctcgccaggggtgagccacagactgagggaccaggagctcattctgtttgcggacctgctctag

SEQ ID NO: 123724 - DNA, 921 bp, synthetic construct
  misc_feature 1..921: note = Description of Artificial Sequence: Synthetic coding sequence
  source 1..921: mol_type = other DNA
tagcacgttggtgggaccaaggactcagaggataattatggcgattccgaagacctggatctccaggctacccagtgcttcctggaaaaccagggcctggaggccgtacagtctatggaggacgagccgacccaagctttcatgctgactccccctcaggagctcggacccagtcattgttcattccagactacgggccttctgaactgcaagatgcccccagcagaaaaagcctcacgaattcgcgcagccgaaaaggtttctcggggtgaccaggaatcaccagacgcttgtctccctcctaccgttccggaggcccctgccccgccacagaagcctctgaactcccagagccaaaaacatctggctccccctccgctgttatccccattgcttccatctatcaaaccaacagtgcggaaaactcggcaggatggcagccaggaggcgcctgaggcccctctgtcctcagagcttgaacccttccaccctaaaccaaagattcgaacaaggaaatcctctagaatgacacccttcccagccacctccgcggctcccgagccccacccgagtacatctacagctcagccggtaacccctaagcctaccagtcaggctacacggtctaggaccaacagatccagcgtaaagacgccagaacccgtcgtgcccaccgcccctgaacttcagcccagtacttcaaccgatcaaccagttacatctgaaccaacatctcaggtgacccgcggccgcaagtctagaagtagcgtcaaaacaccagaaactgtggtgccaaccgccctggaacttcagccgagcacatcaacggatcgcccagtgacctctgagccgacatctcaggccaccaggggcaggaagaacaggtcatctgttaagacccccgaacctgttgttccttag

SEQ ID NO: 123725 - DNA, 489 bp, synthetic construct
  misc_feature 1..489: note = Description of Artificial Sequence: Synthetic coding sequence
  source 1..489: mol_type = other DNA
atggaagacacgcaagccattgactgggatgtagaagaggaggaggagacggagcagtcttctgagagtctgaggtgtaatgtggaacccgttggccgcctgcacatcttctctggcgcccatggcccagaaaaagacttcccacttcacctgggcaaaaatgttgtcggaagaatgccagactgcagtgttgcactccccttcccgtccatatcaaagcaacacgctgagatcgagattttggcctgggacaaggcaccaatattacgggattgtgggtctctaaatggcacccaaattctgcgccccccaaaagtattgtccccaggcgtgtcccatcgactgagagaccaggagttaatcctcttcgcagacctgctgtgtcagtaccaccgtctcgacgtgagcttgccttttgtctcccggggtcccctcaccgtggaagaaacgccaagagttcagggagagacgcagccacagcgcctgtag

SEQ ID NO: 123726 - DNA, 6270 bp, synthetic construct
  misc_feature 1..6270: note = Description of Artificial Sequence: Synthetic coding sequence
  source 1..6270: mol_type = other DNA
atggaagatacacaggcaatcgattgggatgtggaagaagaggaggaaacagaacagtcatctgaaagtcttcgatgtaatgtggagcctgtgggcagacttcatattttcagtggggcccacggacccgaaaaagatttcccactacaccttgggaagaacgtggtcggcagaatgccagattgttctgtggccctgccgttcccaagtatttccaaacagcacgctgaaatagagatcttggcatgggataaggcaccgatactgcgtgactgcggttctcttaatggtacacaaatcctgagacccccaaaggtgctgtctcctggcgtcagtcacaggctaagggatcaggaattgatccttttcgccgacctcctgtgccagtatcacagactggatgtgtcacttcctttcgtgagccgcgggcccctcaccgttgaagagactcctagagtgcagggcgaaacacagccccagcggttgctgttggcagaggattccgaggaggaggttgatttcctgagcgagcgcagaatggttaagaagagtcggacgacatccagctcagttattgtgcctgaaagtgatgaggagggccattcaccggtcttaggtgggctggggccacctttcgccttcaacctcaattccgatacggacgtcgaagaaggccagcagcccgcaacggaagaagcttcatccgccgccagaagaggggccaccgtggaggctaagcagtcggaagccgaggtggtgacagagattcagctcgagaaagaccagccccttgtcaaggagagggacaacgatacaaaagttaaacggggggctggtaacggtgtcgtgcctgctggcgtgatcttggagaggtctcagccccctggtgaggattccgataccgatgtggacgacgattcaagacctcccgggagaccagctgaggtgcacttggagagagcccagccttttggatttatcgactccgacactgatgcggaggaggagaggattcctgcaacccccgtggtcatccccatgaaaaaaagaaaaatctttcacggggtagggacgcggggccccggcgcacctgggctggctcaccttcaggagtcacaagcaggttcagacaccgatgttgaggaggggaaagcaccccaggcagtgcctctggaaaagtctcaagccagtatggttatcaattctgacacagacgatgaagaagaagtcagtgcagctctaaccctcgctcatctgaaggaaagtcagcccgcaatttggaaccgcgacgccgaggaagatatgccacagcgagtcgtgctgctgcagcgctcacagaccaccacagagcgcgacagcgacaccgatgttgaggaagaggagctgcctgtcgagaatcgtgaggcagttctgaaggatcataccaagataagagctctcgtccgcgcccattccgagaaagaccaacctccatttggcgacagtgatgacagcgtagaggctgataaaagctctcctgggatccaccttgaacggagccaagcttccaccactgtggacatcaatacccaagttgagaaggaggtgccccccggcagtgccataatccacatcaaaaagcatcaggtgtcagttgagggaaccaaccagacggacgttaaggccgttggaggtcctgcaaaactcctcgttgtgtctctggaagaggcctggcccctgcatggcgattgcgaaacagacgcggaggagggcacgagtctgacagcttctgtagtagcggacgtgcggaagtctcagttgcccgccgagggcgacgctggggcggagtgggctgccgctgttctgaaacaggagcgtgcacatgaagtgggtgctcaggggggcccacctgttgcccaggtggagcaggacctgccaatctcccgcgagaatctgactgatctggtggtggataccgatacgttaggcgagtctacccagccacagagggaaggcgcccaggtgccaacaggacgcgagagagagcagcacgttggcggaactaaggactctgaggacaactacggggacagcgaagacctggacctccaggcaacgcagtgcttcctggaaaatcaggggcttgaggccgtgcagagtatggaagatgagcccacccaggcttttatgctaactccacctcaggaactgggcccctcacactgcagctttcagacaacaggcacccttgatgaaccctgggaagttctcgcaacacagcccttctgtctgcgcgagtctgaagattccgagacccaacccttcgacacccacctcgaagcatacggaccctgtctcagcccccccagggctatcccgggtgatcagcaccctgagagccctgtgcatactgagcccatgggcatccaaggccggggccggcagacagtggacaaagtgatgggcataccgaaagagacggcggaacgggtcgggcctgagcgaggtcccctcgagcgtgaaactgaaaaacttctgcctgagcgccagactgacgtgactggcgaggaagagctgactaagggaaaacaggaccgcgaacagaaacaacttctcgccagggacacacaacggcaggagtccgataagaacggcgagtcggcctctcccgaacgggaccgtgaatcgctgaaggttgagattgagacgagcgaggaaatccaggaaaagcaggttcaaaaacagacactcccatccaaggcctttgaacgcgaggttgagaggccagtggcaaatagggaatgtgacccagctgaactcgaagagaaggtgcccaaggtgatcctcgaaagggatacgcagcgtggagaacccgaaggaggatctcaagatcagaaggggcaggcttccagcccaacccctgagccaggcgttggggctggtgatctgcccggacctacaagtgcccccgtccccagtggcagccagtccgggggccgcgggagccctgtctctccacggcgccaccaaaaggggctgcttaactgtaaaatgccccctgctgagaaagccagtagaatcagagcagcagagaaggtgtcccggggcgatcaggaaagccctgacgcgtgtttgccccccacagtccctgaagccccagcccccccccagaagccattgaatagtcagagccaaaagcacctggctccgccccccttattgagtccactccttcccagcataaagcctaccgttcggaagaccagacaagatggaagccaggaggcaccagaggcaccactgtcttcagaattggaaccattccatcccaagcccaagataagaactcgaaaatcatcgagaatgaccccgttccccgcaacatctgcagccccagagccacatccttcaacctctacagctcagcctgttaccccaaagcctacttctcaagccacaaggagcagaacaaacagaagtagtgtcaagacccccgaaccagtggtccctacggcgccagagctccagccatccacaagcaccgaccagcccgttacatctgagccaacaagtcaagtgacccggggtcgcaagtcacgctcatctgtgaagacccctgagacggtggtgcctactgccctggagcttcagccatctacttctacggacaggccagtcacaagcgaaccgacctcccaggctacacgcggtcgtaagaaccgttcgtctgtgaagacccctgaacccgtggtgcctaccgcgcccgagttgcagccaagcacttccacagaccagcccgtcacctccgagcctacctaccaggctaccagaggcaggaaaaaccggtcctccgtgaagacccccgagccagtggttcctacagccccagagctgcgtccctcaaccagtacagatcggcctgtgaccccaaaacctaccagcagaaccacgcgcagcaggactaacatgtccagcgtgaagaccccggaaacagttgttcccacggctcccgagctccagatctctacatcaactgaccagcccgtgacaccaaagccaaccagtaggaccactcgctctagaacaaatatgtcttctgtgaagaacccggaatctacagtcccaatcgctccagagctcccaccctcaactagtacagagcagccagtgacaccagagcccaccagccgggcaactaggggccgcaagaataggtcctcaggaaagacacccgagacactggtgcctaccgctccaaagttggaacctagcactagcactgatcagcccgtgacacccgagcctacatcgcaggctaccaggggccgtacaaataggtctagtgtgaagacacccgaaactgtggtgccaaccgcccccgagctgcagccctcaacaagtaccgaccagcctgtcacacccgagccgacctctcaggctacccggggaaggacagatagatcttccgtcaaaactccggaaacagtggtgcctaccgctcctgaactccaagcctctgcttctaccgatcaacctgtgacgtcagaacctacatctagaactacccgtggaagaaaaaaccgaagttcagtgaaaacgccggaaaccgtggtacccgccgccccagagttgcagcccagcacctcaactgatcaaccggtcacacctgagccgacgtccagggccaccaggggacggaccaataggagttccgttaagactccagagagcatcgtccctattgcacctgaactgcagcccagtaccagtcggaaccagttagtgacaccagaacctacaagtcgtgcaacccggtgtaggaccaaccggtctagcgttaagaccccggaacctgtggtcccaacggctccggagccccatcctactactagcaccgaccagcctgtgacacctaagcttacttcaagagccactcgccggaagacaaacaggtctagcgtgaaaacaccaaagccagtggaaccagccgcaagtgatctggagcctttcactcctaccgaccaaagcgtaacccctgaggccattgcccagggaggccagagtaagacgctcaggagctcaacagtgcgcgccatgccagtacccactacccctgaattccagagcccagtcaccacagatcagcccatatcacctgagcctattacgcagccctcttgtatcaaaagacagcgcgctgcaggcaaccccggttctctcgcagcacccatcgaccacaagccgtgcagcgcccctctggaacccaaaagccaggcttcccgtaaccagcgctggggagcagtccgtgccgccgaaagcctgacagccattcccgaacccgcgagtccgcaactcctggaaaccccaatccacgccagccaaatccagaaggttgagcctgcggggaggagtaggtttacaccggagcttcagccaaaggctagtcaaagcaggaagcgctctctcgccactatggactctcccccacaccaaaagcaaccgcaacggggggaagttagccagaagacggttatcataaaggaagaggaagaagacacggccgagaagcccggcaaggaggaagatgtggtgaccccaaagcctggtaaacgcaagagagatcaggcggaggaggagcctaacagaatcccaagtcggagtctaaggcggactaaactcaaccaggagtctaccgcacccaaagttctctttactggcgtcgtcgacgctaggggggaacgagcggtactggcgttagggggatcactcgcgggctccgccgctgaggcctcccatctggtaaccgacagaatcagaagaaccgtaaagtttttgtgtgccctgggcagggggattcctatcctgagcctcgactggcttcaccagagccggaaggcaggtttctttttaccccccgacgaatatgtggtgacagatcccgagcaagagaaaaattttgggttttcattacaggatgccctatcacgtgccagagaacggcgacttctggaggggtatgagatctacgtaactccaggtgtgcaacctcccccaccccagatgggcgaaatcattagctgttgcggtgggacatatctgcctagcatgcccaggtcatacaaaccccagagggtagtcattacatgtcctcaggactttccccattgttcaatccctctgagagtgggacttccccttctgtcaccagaatttttgctcaccggggtgctgaaacaggaggcaaaaccggaggcttttgtgctttccccactcgagatgtcctccacctag

SEQ ID NO: 123727 - DNA, 735 bp, synthetic construct
  misc_feature 1..735: note = Description of Artificial Sequence: Synthetic coding sequence
  source 1..735: mol_type = other DNA
atggaagatactcaggccatagactgggatgtggaagaagaagaggaaaccgaacagtcctctgaaagcctccgctgtaacgtggagccggtgggacgcctgcacatatttagtggcgcccacggccccgagaaagacttccccctccatttaggcaagaatgtggtgggaaggatgccagattgttctgtcgcattaccgttccccagtatctccaaacaacatgctgagatagaaatactggcatgggacaaagctcctattttaagagattgtgggtcccttaacggaacccagattcttaggcctcccaaagttcttagccccggtgtctctcacaggctcagggaccaggaactgattttatttgcggacttgttgtgtcagtatcaccgcctggacgttagtctaccctttgtgagcaggggacccctgacagtcgaagagacccccagggtccagggggagacacagccccagcgtctactcctcgccgaggattctgaggaggaagtagattttctttcggagaggaggatggtaaagaaaagcaggacaactagctctagcgttatcgtgccggaatctgatgaagaaggacactcccctgtgctcggaggcttgggcccgccctttgctttcaacctcaatagcgataccgatgtggaagaggggcagcaacctcacagaggggggctcctgtcctgtcagaagaggtgccattgtaggggttag

SEQ ID NO: 123728 - DNA, 384 bp, synthetic construct
  misc_feature 1..384: note = Description of Artificial Sequence: Synthetic coding sequence
  source 1..384: mol_type = other DNA
atggaggacacccaggccattgactgggacgtggaggaagaagaagagacagagcaatcctccgagagcctgagatgcaacgtggagcctgtcggccggcttcacatcttttctggggctcacggaccagagaaggattttccactgcaccttggcaagaatgtagtcggacggatgcccgattgtagcgtggctctgccatttccatctatctctaaacaacacgctgaaattgagatactggcctgggataaggctcctattctgagagactgcgggtcactgaacggcactcagatcctcagaccccctaaggtactctcccccggcgtgtcccatcgtctgcgtgatcaggagcttatactcttcgctgacctgctgtag

SEQ ID NO: 123729 - DNA, 342 bp, synthetic construct
  misc_feature 1..342: note = Description of Artificial Sequence: Synthetic coding sequence
  source 1..342: mol_type = other DNA
atggaggacacccaagctattgattgggatgtagaagaagaggaagaaacagaacagtcctctgaaagtctcaggtgcaatgtggagcccgtgggtcgtctgcatatattttccggtgcccacggacccgaaaaggattttccgctgcacttgggtaagaacgtcgtgggccggatgccggactgttctgtagccctgccattcccgagcattagcaagcagcacgctgagattgagatcctggcgtgggataaagctccaattcttcgggactgcggcagtctgaacggtactcagattttgaggcccccaaaggttctttcaccaggtgtgagccattag

SEQ ID NO: 123730 - DNA, 5409 bp, synthetic construct
  misc_feature 1..5409: note = Description of Artificial Sequence: Synthetic coding sequence
  source 1..5409: mol_type = other DNA
atggaggatacacaggcaatagactgggatgtggaagaagaagaggagacagaacagtcgagcgagagcttgcgttgcaacgtcgagccagtgggcaggctccacattttttcaggcgcccatggtccggagaaagacttcccccttcacctggggaagaacgtcgtggggcgcatgcccgattgcagcgtggctctcccgttccccagcatttctaagcagcatgctgaaatagagatactggcatgggataaggctcccattctgcgggactgcggcagcctgaacggcacccagatcctgcgcccacctaaggtgcttagcccaggtgtgagtcaccgcttgcgagatcaggagctcatccttttcgctgatttactttgtcaatatcaccggcttgatgtgagcctccccttcgtctctaggggccctctgaccgtcgaggagacaccaagagttcagggagagacacagcctcagaggctgctcctggccgaggactcggaagaagaagtggatttcttgagtgagaggcgtatggtcaagaaaagcaggaccaccagttccagcgtaatcgtgcccgaatccgacgaagaaggccactcccccgtgctgggaggattggggcccccattcgcctttaatctgaattcggacaccgatgttgaggaggggcaacagcctgccactgaggaggcatcttcggctgcgcgtaggggcgcaaccgtcgaggccaaacagtctgaagctgaggttgtaacggagattcagctggaaaaggaccagccgctggtgaaggagcgcgataacgatacaaaagtcaagaggggcgccggaaacggtgtcgtgcctgcaggcgtgatcctggagcgctcacaacctcctggggaagactccgacacagacgtggacgacgactcacgccccccaggcaggcccgcggaggtccatctagaacgcgctcaaccattcggcttcatcgactccgacaccgacgccgaggaggagagaatacccgcaacaccagttgtgattcctatgaaaaagcggaagatatttcacggagtgggaacaagagggccaggtgcccctggattggcacatttgcaagagtctcaagcgggctcggatacagatgtcgaggaggggaaagcccctcaggccgttccacttgagaagtctcaggcgagcatggttattaacagcgatactgacgacgaggaagaggtgagcgctgccctgaccctagctcacctcaaggaatcccagcccgcaatttggaatagggacgctgaggaggatatgccgcagcgcgtggtgctcctccagaggagccagacaaccacggagcgggatagcgacacagacgtggaggaggaagaactgccggtggaaaatcgcgaggccgtactgaaggatcatactaagatccgcgccctcgtccgagctcatagcgagaaggaccaaccccctttcggcgacagtgatgacagcgtggaagctgataagtcatctcccggtatccacctggagcgatcccaggcctccaccactgtagatataaatacgcaggtggaaaaggaagtcccgcccggaagcgccatcatccacattaaaaaacatcaggtgtctgtagagggcactaaccagaccgatgtgaaagcggtcggcggtcctgccaaactgctcgttgtgagcctggaagaagcctggcctctgcatggagattgtgagaccgatgctgaggagggcacctctctgactgctagcgtcgtcgcagacgttcgtaagtcccagttgccagcagagggggacgctggggcagagtgggctgctgcagtccttaaacaggaacgcgctcacgaggtaggcgcacagggaggcccaccagtggcccaagtggaacaggatttacctatttctcgtgagaacttgaccgacctggtcgtggatacggacaccttgggcgagtctacacagccacagcgtgagggggcccaggtgcctactggaagggagagggagcaacacgtgggtgggaccaaggactcagaagataattatggagatagtgaggaccttgatctacaggccacacagtgttttctggagaaccagggcctcgaggcagtacagagcatggaggacgagccaactcaggcattcatgctgactcctcctcaggagctcggcccatcccactgttctttccagactaccggtactctggatgaaccctgggaagtgcttgcgacgcagccgttctgcttgagggagtccgaggacagcgaaacacagccattcgatactcacttagaagcctacgggccctgcctttcaccacctcgagccatcccaggcgatcagcaccccgaaagccctgtgcatactgagcctatgggcattcaaggtagaggaagacagaccgtagataaggtgatgggcattccgaaggaaacggccgagagagtgggtccggaacgtgggcctctcgaaagggaaaccgagaagctgctgcccgagagacagactgacgtgaccggcgaagaagaacttacaaagggtaaacaagatagggagcagaaacagttgctcgctagagacacccagcgccaggagtctgataaaaacggggaatccgcctccccagaaagggatcgagagagcttgaaggtggagatcgaaacctctgaggagattcaggaaaaacaggtccaaaagcagacattgccgtccaaggcttttgaacgtgaggtcgagagacctgtcgccaatagagagtgcgacccagccgaactcgaggaaaaagtgccaaaggtcatcctggaaagggacacccagcggggggagcccgagggcgggtctcaggaccagaaggggcaagcaagctcacccaccccagagccgggggtgggcgctggcgacctgccgggccctacaagtgccccggtcccatccggctcccagtctggaggacggggttctccagttagccccagacgtcatcagaaaggattactgaactgcaagatgccccctgcagagaaagcatctaggattagagcggcggagaaggtcagccgtggcgaccaggaatctcccgatgcttgccttcccccaaccgtgccagaagctcccgctccaccccaaaagccgctcaactctcagtcccagaagcacctcgccccaccacccctgctctccccactgctcccgtcgatcaaacctaccgtgcgcaaaacacggcaggacggttcacaggaggcacctgaagctcccctgtcctcagaattggaacctttccatcccaagcctaaaattagaacccgaaagtcctccaggatgacaccctttcctgcaacgtcagcggctccaaagttagagccatcaacctctacagaccagcccgtgacaccggaacctaccagtcaggccacgcggggacgtactaatagaagctctgtaaagacgccggagacagttgtcccaacagccccagaactacagccgagcacaagtaccgaccagcccgtgacaccagagcctacgagccaggcaacacgcggtcggacagacagatccagcgtaaaaaccccagaaactgtcgtgccgactgccccagagctccaggcatctgcaagcacagatcagccagtgacctcagaacccaccagccggaccaccagggggaggaagaatagaagtagcgtaaaaacccctgaaactgtggtccccgcggcccctgagctgcagccctctacctccacagaccagcccgtcactcccgagccaacgtcacgcgctacacgtggccggactaataggagcagcgtgaaaaccccggagtcaattgtcccaattgctcccgagctgcagccgtccaccagtaggaatcaactcgtcacaccggagcctacttctcgcgcgactagatgcagaacaaacaggtcctcagttaaaactcccgagccagtggttccaacagcccctgaaccccaccctacaacgagcaccgatcagcctgttacaccaaagctgacaagcagagccactcgccgcaagacaaacagatcctccgtgaaaacacccaaacctgtggaaccagccgcgagtgaccttgaaccttttacgcccactgaccagtcagtgacaccagaagcaattgctcagggaggacaaagtaaaactctccgctccagcacggtccgggcgatgcctgtgcctacaacccctgaattccagagcccagtgactacggatcagcctatatccccagagcccataacccagccctcatgcatcaagagacagcgcgccgccggtaacccgggatccctggccgccccaatcgatcacaagccatgttccgcccctctggagcctaaaagccaggcctctagaaaccaacggtggggtgccgtgagagcagcagaatctctgactgcaattccagagcctgccagtccgcagctgctggaaactcccatacacgcctctcagatccagaaagtcgaacctgctggtcggagtagattcacccctgagttacagcccaaggcatcccaatcgaggaagcggtccctggctacaatggacagtcccccacaccagaaacaaccacagagaggcgaagtgtcccagaagactgtgattatcaaagaggaagaagaagataccgccgagaaaccgggaaaagaggaagacgtcgtgaccccaaagcccggaaagcggaaaagggatcaggctgaggaggaaccgaaccgcattccctctcggtctctgcggagaaccaaattaaatcaggaatcaaccgcccccaaagtgctgtttacgggcgtcgtcgacgctcgcggggagagagccgtgctggcattaggcggctccctggccgggagcgctgccgaggcttcccatctcgtcacagaccggattcgtagaactgtgaaatttctttgtgctctaggtaggggaatacctatattaagcctcgattggttgcatcaatcaaggaaggcaggatttttcttgccccccgatgagtacgtggtgactgaccccgagcaggaaaaaaacttcggcttcagccttcaggacgccctgagccgcgcccgagagcgcaggctgttagaaggctacgagatttacgtcacccccggtgtgcagcccccaccaccccagatgggagagattatcagctgctgcggggggacatatctaccttcgatgcctagatcctacaagcctcagagagtcgtcatcacttgtccccaggattttccgcactgttctatacctttgagggtgggcctccctctgttgtcccctgagtttttgcttaccggcgtcctcaagcaggaagccaagccagaggcatttgtgttatcgcccctggagatgagttccacatag

SEQ ID NO: 123731 - DNA, 735 bp, synthetic construct
  misc_feature 1..735: note = Description of Artificial Sequence: Synthetic coding sequence
  source 1..735: mol_type = other DNA
atggaagatactcaggccatagactgggacgtggaagaggaagaagaaacagaacagtcttcagagtcactacggtgcaatgtagagccagttggccgcctgcacattttctcaggtgcccatggacccgagaaggatttccctctgcacctggggaagaatgtagtgggccggatgcctgattgctctgttgcactcccgtttccttccattagcaaacagcacgcagagatcgagatcctggcttgggacaaggccccgatccttagagattgcggtagtctgaatggaacccagatactgcgcccccctaaagtcctgtctcctggggtctctcatagactcagagatcaggagctgattctatttgccgacctgttatgtcagtatcatcgccttgatgtatccttaccattcgtgagtagagggccactgacggtcgaagaaacgcccagagtgcagggagaaacccagccccagcgcttacttctggcggaggattcggaggaggaagtcgattttctcagcgaacgcagaatggttaagaagagtcggaccacatcctcgagtgtgatcgttccagaatcggatgaggaagggcactcacccgtcctgggcggacttggcccgcctttcgcgtttaatctgaattccgacacagacgtcgaggaaggacaacaaccacaccgcggaggactgctgtcctgccagaaacggtgccactgtcgtgggtag

SEQ ID NO: 123732 - DNA, 5409 bp, synthetic construct
  misc_feature 1..5409: note = Description of Artificial Sequence: Synthetic coding sequence
  source 1..5409: mol_type = other DNA
atggaggacacccaggccatagactgggatgtggaagaagaagaagagacagagcagtccagtgagagcctaaggtgtaacgtggaaccagtgggccgcctgcacatcttcagtggcgcgcatggtccagagaaggattttcccctccacttaggtaaaaacgtggtgggccggatgcccgattgtagcgtggctttaccctttccctccattagcaagcagcatgccgaaattgagatcttagcctgggacaaagccccaattcttcgggattgtggttcactaaacgggacgcaaattttgcggcctcctaaagtccttagccccggtgtctctcaccgactaagggaccaggagctgattctcttcgctgacctgttgtgccaataccaccgattggatgttagcttgccatttgtctctaggggacctctgaccgtagaggaaaccccccgagtgcagggcgagacccagccacagcggctcctgttggccgaggacagtgaagaagaagtcgactttttgtcagagagacggatggtgaagaagtcaaggactacgagctcttcggtgatcgtccctgaatccgatgaggaaggtcacagcccagtgttaggaggtttgggccccccttttgcttttaatcttaacagcgatacggacgtggaggagggccagcagccagctactgaggaagcttcctcagctgccaggagaggagctaccgtggaggcgaagcaatccgaggccgaggttgtaactgagatccagctggaaaaggatcagccactggtaaaagagcgtgataatgacacgaaggtcaaacgcggcgccggcaacggggtggttcccgctggagttatattagaaagatcccaaccgcccggcgaagactcagacactgacgtagatgatgactccaggccacctggaaggcccgccgaagtgcacctggagagagctcagccctttggttttattgatagcgataccgatgccgaggaagaacggatccctgccaccccggttgttattccaatgaagaaacgaaagatctttcacggcgttgggacccgcggtccaggcgctcccggacttgcccacctccaagagagccaggccgggtcagatacagacgttgaggagggaaaggccccccaggccgtgccgttggagaaatctcaggccagcatggtaatcaatagtgatacagacgacgaagaagaggtgtcagctgcccttactctagctcacctgaaagaatctcagcctgcaatctggaatagagatgcggaagaggatatgccgcagagggtggtcctcttgcaaaggtcacagacaacaactgagcgagacagtgatactgatgtggaggaagaagagctacccgtggaaaatcgggaggctgtattgaaagaccacacaaaaattcgggcgttagtccgggcccatagcgagaaagaccagcccccattcggggattctgacgattcagtggaagccgataaaagctcaccaggaatccacctggagagaagtcaagcctcaacaaccgtcgatattaacacacaggtggagaaagaagtgccacccgggtccgccattatccatataaaaaagcatcaggtttcagtggagggtaccaaccaaaccgacgtcaaggccgtgggcggaccagccaagttgctggtggtgtcgctggaagaagcgtggccgcttcatggtgactgtgagaccgatgccgaagaggggacatcgcttacggcttccgtggtggccgatgtgagaaaaagtcaactgccagccgagggagacgccggagccgagtgggcagccgcggtgcttaaacaagaacgggcacacgaagtgggcgcacagggaggaccccccgtcgcacaggtagaacaggatctacctatcagccgagaaaacttaacagatttggtcgttgacacagacactcttggtgaatccactcagccacagcgggagggggcgcaggtaccaactggcagagaaagagaacagcatgtgggagggacgaaggatagtgaggataattacggagattcggaggatctggacttgcaggcaacacaatgttttctagaaaaccaggggctagaggctgtgcaatccatggaagacgaacctacccaggctttcatgctgactccaccacaggagctcgggccctcccattgtagctttcagactactgggactctggacgaaccttgggaggtgctggcaactcagcccttctgcctgcgtgagtccgaagacagcgagacgcagccatttgacacgcatctggaagcctatggaccgtgcttgtcaccacctcgggccattcctggagaccagcatccagagagccccgtacacactgaacctatgggaattcagggacggggaaggcagacggtcgacaaagtcatgggtatacctaaagagacagctgagagagtggggccagaaaggggaccgctagagcgcgagactgaaaaactcctcccagagaggcagactgatgtgacgggagaggaggaactgaccaagggtaagcaagacagggagcagaagcagttacttgcccgggacacccagcggcaggagagcgacaagaacggtgaatcagcctcaccagaacgggatcgtgaaagcctcaaagttgagatcgaaaccagcgaagagatacaagaaaagcaggtgcagaagcagaccctgccgtcaaaggctttcgaacgggaagtggaacggcctgtggccaatcgcgaatgcgaccctgccgagctggaggagaaagttcctaaagtaatcctcgagagagacacgcagaggggagaacccgagggagggtcgcaagatcagaaagggcaagcttcttctccgacaccagaacctggcgttggagctggggatttaccaggacctacgtccgcaccagtgccaagcggatctcagtctggcggtcggggttctcctgttagcccaagaagacaccagaaaggactgttgaactgcaagatgcctccggccgaaaaggcgtccagaatcagggcagccgaaaaggtgtctagaggcgaccaggagtcgcccgacgcctgtctaccaccaactgtaccagaggcgccggcaccccctcaaaagccactgaatagccagtcccagaaacatctggctcctcccccattgctgtcacctctgctgccatctatcaagcccacagtgcgtaaaactcggcaggatgggtcccaggaagccccagaggcacccctgtcctccgaactagaaccattccacccaaaacccaaaatccgcaccaggaaaagctcccggatgactcccttccctgccacaagcgctgctccaaagcttgaaccttcaacgagcactgaccagcctgtgacccctgaaccaaccagccaagcgacacgcgggcggactaatagaagcagcgtcaaaactcctgagactgtcgttcctaccgcacccgaactgcaaccatcaacttcaactgatcagccagtgacccctgaacccaccagccaagctactcgcggaaggacggataggagcagtgtcaaaacccccgagactgttgtccccacggcacccgagctgcaggcttctgcatccaccgaccagccagtaacaagcgaacccacctctcgcactaccagggggcggaagaaccgcagttccgtgaagacgcccgaaactgtagttcccgccgccccagaactacagccatcaacgtccaccgaccagcctgtaacccccgagcccaccagtagggccacccggggacggaccaatagaagttctgtcaaaactccagaatcgattgtgccaattgcccctgaactgcagcctagtacctcccggaaccagcttgtcactccagagccgaccagccgcgccacacgatgtcggactaatagatctagcgtcaaaacccctgagccagtagttccaaccgcccccgagccgcacccaacaacttctaccgaccagccagtgacaccaaaactcacgtctagggccacgagaaggaaaaccaacagaagctccgtgaaaacccctaagccagtcgagccagccgcttcggatctggaaccgttcacacccaccgaccagagtgtcactcccgaggccatagcccagggaggccaatctaagactctacgttctagcaccgtgagggccatgcctgtcccaacaacacccgagttccagagcccagtgactaccgaccagcccatttcacccgaacccattactcagccgagctgcattaaaagacagcgagctgctggtaaccccggatcactagctgcaccgattgatcacaagccttgcagcgcaccgcttgaacctaagagccaggcttctaggaatcagcgctggggcgccgttagagcagccgaatcattgacggcaatccctgaacccgcttcgccacaattgctcgagaccccaatccacgcatcccaaatacaaaaggtggagccagctggaaggagcaggttcacacctgaactgcagccaaaggcgtctcagtcccgcaagagaagtctcgccaccatggatagcccaccccaccagaagcagccacagcgcggggaggtgtctcagaagacagtgataattaaagaagaggaagaagataccgcagagaaacccggaaaagaagaggatgtagtgaccccgaaaccgggcaagcgcaagcgcgaccaggccgaggaagaacccaaccgcattcctagccgcagcctgcggagaaccaagctgaatcaggagagcaccgcaccaaaagtattgttcaccggagtggtggacgctcgtggggaacgtgccgtgcttgccctgggaggttccctcgctggctccgccgctgaggcatctcatctggtgacagacaggattaggcgcaccgtgaaattcctgtgcgctcttggtagggggatacccatcctctccctggattggctacaccagtctcgtaaagccggcttcttcctgccacctgatgagtacgtcgttacggatcccgagcaggagaagaactttggcttctcgctacaagacgcattgtcacgagcacgcgaacggcgcttgctggaaggctacgaaatatacgttactcctggggtgcagcctcctccgccccagatgggagagatcatctcatgttgtggtgggacatacctcccttccatgccaaggtcctacaaacctcagcgcgtcgtaatcacttgtccccaggatttccctcactgttccattcctttgagggtcgggttaccgctccttagccccgaattcctgctgaccggcgtgcttaaacaagaggcaaagccagaagctttcgtattgagccctctggagatgagtagtacctag

SEQ ID NO: 123733 - DNA, 735 bp, synthetic construct
  misc_feature 1..735: note = Description of Artificial Sequence: Synthetic coding sequence
  source 1..735: mol_type = other DNA
atggaggatactcaggctattgactgggacgtggaagaagaagaggaaaccgagcagtccagtgagagcctgaggtgtaacgtggaacctgtcggacgtctacacatcttcagcggagctcatggacccgaaaaggatttcccgcttcacctaggcaaaaatgtcgttggccgaatgccagactgctcagtggccctgccttttccgagcatatcgaaacaacacgccgaaatagagattctcgcctgggataaagcaccaattctgcgtgattgcggctctttaaatggcacacaaatcctcaggccccccaaggtgctgtcccccggagtctcccatcgcctgcgtgatcaggaattaattttgtttgcagacctcttgtgccagtaccacaggctggatgtctctcttccatttgtttctaggggtccactcaccgtggaggagacccctcgcgtgcagggagaaacacaaccgcagcgattgctccttgccgaagacagtgaggaggaggtggattttctgagcgagcgcagaatggtgaagaagtcaaggaccaccagttctagcgtgattgtgccagaaagcgacgaggaggggcacagcccggtgttgggtggcctgggaccccctttcgcctttaatctgaatagcgacacagatgtcgaggagggacagcagccccacagagggggactgctgagctgccagaagcgatgccactgccgtggctag

SEQ ID NO: 123734 - DNA, 735 bp, synthetic construct
  misc_feature 1..735: note = Description of Artificial Sequence: Synthetic coding sequence
  source 1..735: mol_type = other DNA
atggaggatactcaggctatcgactgggatgttgaagaggaggaggaaaccgagcaatcgagcgaatcacttcgctgtaacgtggaacctgttggaagactgcatatcttttccggggcgcatggtcccgaaaaggacttccctttacacttaggcaaaaacgtcgtaggccggatgccagattgtagcgtggccttgccgttcccttccattagcaaacagcatgccgaaatagagatcttggcctgggataaggcaccaatcctgagggattgcggatccctgaacggaacccagatccttaggcccccaaaggtcctctctcctggagtttcccaccgactgcgggaccaggaactgattctgttcgcggatcttctctgtcaatatcatcgtctggacgtttctctgccctttgtttctagaggtccactcacagtagaggagaccccaagagtgcaaggagagacacagccgcagaggctgttactggcggaagactcggaggaggaggtagactttttgtccgagagacggatggtgaaaaagagccggacaactagctccagtgtcatcgtccccgaatccgatgaggagggacacagccctgtgcttgggggacttgggcctccatttgcctttaatcttaattcggatacagacgtggaggagggtcagcagccccacaggggcgggttactttcctgccagaagcgctgccactgtcggggttag

SEQ ID NO: 123735 - DNA, 738 bp, synthetic construct
  misc_feature 1..738: note = Description of Artificial Sequence: Synthetic coding sequence
  source 1..738: mol_type = other DNA
atggaagatacccaggccatcgattgggacgtcgaggaagaagaggaaaccgaacaaagtagtgaatcactcaggtgcaacgtggaacctgttggccggctgcatatcttctcaggagcgcacgggcccgaaaaggattttcccctccacctgggcaagaatgtggtcggcagaatgcctgattgttcggttgcgttgcccttcccgtccatctcgaagcaacacgcagagatcgaaatcctcgcttgggataaagccccgatcctgagggactgcgggtctttgaatggcactcaaatcctgcggccccccaaggttctaagtcccggagtaagccataggctgagagaccaggagctgatcctgttcgcagacctcctgtgccaatatcatcgcctggacgtgtccctgccattcgtctctagggggccactgactgtcgaagagactcctagagtccagggggagacgcagccccagcgattgctgctggcagaggattccgaagaggaagttgactttctctcagaaaggaggatggtaaagaagtctcggactacttcatcaagcgtaattgtgccagaatccgatgaggaaggacactcaccggtgttgggcggtctcggacccccatttgccttcaatctcaactctgacaccgatgtcgaagaaggccaacagccagcgactgaagaggcttcatccgctgcacggcggggcgctacggtggaagcctag

SEQ ID NO: 123736 - DNA, 5478 bp, synthetic construct
  misc_feature 1..5478: note = Description of Artificial Sequence: Synthetic coding sequence
  source 1..5478: mol_type = other DNA
atggaggatacacaggccatcgactgggatgtagaggaagaagaggagacggagcagtcttcagagagtctacgatgcaacgtggaacccgtggggagactgcacattttctccggtgctcacggcccagaaaaagattttccccttcacctgggaaagaacgtggtggggcggatgcccgactgctccgtcgctctgcctttccctagcatttctaagcagcacgccgagatcgaaatcctggcatgggacaaagcccccattctgagagactgcggttcacttaacggaacacaaatacttagacctcctaaagtgctctcccccggcgtgtcccacaggctccgggaccaagagctgattctgttcgctgacctcctttgtcaataccataggttggacgtgtcccttccctttgtcagtcgggggccgctcaccgttgaagagactcctcgggtgcagggagagacacagccccagcggttgctgctcgctgaggactccgaggaagaggtggactttctatcagagcggagaatggttaaaaaaagtcggaccacctcgtcctccgttattgtcccagagagcgatgaagaaggacactcccccgtcttaggaggcctcggcccgccattcgctttcaatcttaactctgacactgatgttgaagagggccagcagcccgcgactgaggaggctagtagcgccgctagacgcggagccactgtggaagcgaagcagagcgaagccgaagtggtaactgaaatacagctcgaaaaggaccaaccccttgtgaaagaaagagacaatgatactaaggtaaagaggggagccgggaacggtgtcgtccccgccggagtaatcctggaaaggtctcagcctcccggagaagacagcgacactgacgttgacgatgatagccggcccccagggcgcccagccgaagtgcacctcgagagagcccagccttttggtttcatcgattctgacaccgatgccgaggaggagaggatacctgctacccctgtggttatccccatgaagaagagaaaaatcttccacggtgtggggacaaggggtccaggcgcacccggcctcgcccatctgcaagagagccaggcaggctccgacaccgatgtcgaggagggaaaagcaccccaggccgtccctctggaaaaatctcaagcctcaatggtgataaattccgataccgatgatgaggaggaggtgtctgcagccttaaccctcgcccacctcaaggagagccagcccgctatatggaatcgggacgcggaagaagacatgccacaacgagtcgtcctgctgcaaaggtctcaaaccactacggagcgcgattccgatactgatgttgaagaagaggaactgcccgtcgaaaatagagaagccgtgttgaaggaccacacgaagatccgggctttggtgagagcgcactccgagaaggatcagccgccattcggggactctgatgatagcgttgaggcagacaaatcgagtcccggtatacacctcgaaagatctcaggcctcaactactgtggacattaatacccaggtggagaaagaagtaccccctggaagcgctattatccatatcaagaagcaccaagttagcgtggaggggaccaaccaaacggatgtcaaagctgttgggggtcccgcaaaactgctcgtggtcagtcttgaagaggcctggcccttgcatggtgactgtgaaaccgatgccgaggaaggtacgtccctgactgcgtctgttgtggccgacgttcgcaagagtcagctgcctgccgagggagacgctggagccgagtgggcagccgcagttctcaaacaagaacgggcccatgaggtgggagctcagggtgggccccctgtggctcaggtggagcaggatttgcctatttcacgtgagaatctgaccgatctggtggtagataccgacactctaggggagagcacccagccgcagcgggagggtgcccaggtcccaacaggacgcgagcgtgagcagcacgtcgggggcaccaaggactctgaagacaactacggtgactccgaagatttggatctgcaggcaacccagtgctttctggaaaatcagggcctggaggctgttcagtcaatggaggatgaaccaacacaggctttcatgttgactcctcctcaggagttaggtcccagtcattgctctttccaaaccactggcctgttgaattgcaagatgcctcctgctgagaaggcatcccgcatacgggcggctgagaaagtttcacggggggaccaagaatcacctgacgcctgtctccccccaaccgttcccgaggctccagctcctccccagaaacccttgaattctcagtcccaaaagcacctggcgccacccccactactgtcacctctactcccgtccataaaacctacggtgaggaagactcggcaggacggaagtcaggaggccccagaagcccccttgagtagcgaattggaaccgttccatcccaagcctaagattcgaactcggaagtcgagtaggatgaccccatttccagcaacatctgccgccccagagccccacccatcgacctcgacagcccagcctgtcacccccaagcccacatcccaggcgactcggtcaaggaccaaccgatccagtgtcaagaccccagagcccgttgtgcctaccgctccggagcttcagccctccacttcaaccgatcagcctgtgacctctgagcccacatcgcaagttacgagaggcagaaagagtcggtcttccgttaagaccccggagaccgttgtccctacagctttggagcttcaaccctcaacttccactgatagaccggtaaccagcgaaccgaccagccaggcaacacgaggtagaaagaacaggtctagcgtgaagacacccgagcccgtagtacccacagcccccgagctgcagccctctacgagtaccgatcagccagtgacctccgagcctacctatcaagcaactaggggtcgcaagaatcgatcctccgtcaaaaccccagaaccagtcgttcctactgccccggagctccggcccagtactagcacagatcggcccgttactccgaagcctacctcacgtacaacacggtcccgcaccaatatgtcttcggtgaaaaccccagaaaccgtggtgcccaccgctcctgagctgcagataagcaccagcactgatcaaccagtgacgccgaaacctacttctcgcacaacacgatcccggacaaacatgtcctcggtcaaaaatcccgagtccactgtgccaattgcaccggaactcccacctagtacaagcaccgagcagccagtcactccagaaccaactagccgggccaccaggggtagaaaaaatcggtcctctgggaaaactccagaaaccctggtgcccacagctcctaagcttgagccctctaccagcacagatcagccagtgacccccgaacccacttctcaggctacacgggggaggacgaacaggtccagtgtaaaaactcccgaaaccgtggtgccaacagcccctgagctgcagccgtcaacatctacggaccagcccgtcacccctgaacctacctcccaggccacacgcggacggaccgacagatcgtcggttaaaactccggagaccgtcgtgcccaccgctcccgaactgcaggctagcgcctctaccgatcagcctgtgacgagcgaaccaacttctcggactacacggggtagaaaaaacagatcgagcgtgaaaactcccgaaacagtcgtgcctgcggcaccagagctccagccatcaacctccacggatcaacctgtcactccagagcctaccagtcgcgcaacacgcggacgaactaatcgaagtagcgtgaaaacaccagagagtattgtgcccatcgcacccgaattgcagccctcgacgtctcgcaaccagctggtcacaccggagccaacctcaagagccacccgctgcagaactaatcgttctagtgtgaagacgcctgagcccgtcgtgcctaccgctcctgagccccaccctacaacatccaccgaccagcctgtcactccaaagctgactagtcgggctaccagaaggaagacaaaccgaagttccgtgaagacgcccaaacctgtcgagcccgctgcctcggacctggagccatttacaccaacggaccagtcagtgacacctgaggccatagctcagggaggacaaagtaagacactcagaagctcaactgtgcgcgccatgcccgtgcctactactcccgaattccagtcacctgtgacgaccgatcagcccatcagccccgagcccatcacgcaacccagctgcataaaacgccagcgggcagccggaaatccaggaagcctggccgcccctattgaccacaagccatgttccgccccccttgagcccaagagccaggcttcgcgtaatcagcgctggggcgcagtgcgggccgccgagtcgttgactgctattcctgagcccgcatctccgcagctcctggagactcctattcatgcatcccaaattcagaaagttgagcctgccggccgcagccgattcactccagagctgcagcctaaggccagccagagccggaaacgcagtctggcaactatggatagtccaccacaccaaaaacagccgcagcgtggcgaggtgagccagaaaaccgtcatcattaaagaggaggaggaggacacagccgaaaaacctggcaaggaagaggacgtcgtgacaccaaagccaggcaaacgtaagcgcgaccaggccgaggaagagccaaataggattccgtctcgttccctcagacgcactaaactgaatcaggagagtactgcccctaaagtgcttttcacgggcgtcgtggatgcacgtggtgagagagcagtactcgcactgggcggcagccttgctggcagcgcagctgaagcctcccacctggtgactgatagaattcgccgcaccgtgaaatttctatgcgccctagggcgaggcataccaatactgagcttggactggctacatcaatcgcgtaaagccggtttctttctgccgccggatgaatacgtggtgacggatcccgagcaggaaaagaatttcgggttctcgctgcaagacgctctgtctcgggcccgtgaacgtcggctcctagagggatatgagatttacgtcactcccggtgtgcaacccccgccccctcagatgggcgaaatcatctcctgttgtggtggaacttatttgccgtcaatgcccaggtcttataagcctcagagagtagtgataacatgcccccaggactttccccattgttcaataccccttcgcgtcgggttacccttactgtccccggagttcctactgaccggggtattgaagcaggaggcaaaacccgaggcgtttgtcctgagccctctagagatgagcagcacttag

SEQ ID NO: 123737 - DNA, 738 bp, synthetic construct
  misc_feature 1..738: note = Description of Artificial Sequence: Synthetic coding sequence
  source 1..738: mol_type = other DNA
atggaggatactcaggccattgactgggacgtagaagaagaggaggagactgaacagtccagtgaatcgctccggtgtaacgtggaacctgtgggccggctgcacatatttagcggcgcccatgggcctgagaaagatttcccgctgcacctggggaagaacgtggtggggcggatgccggattgctcagttgctctgccttttcccagtatctcgaaacagcatgccgagattgaaattcttgcctgggacaaggcccctattcttcgggactgtgggagtctaaatgggacccagattctgagaccacctaaggtgctcagccccggagtgtcacaccggctgcgcgatcaggaacttatcctattcgcagacttactttgtcagtatcatagactcgacgtgtcgttgccgtttgtgtctcgcggaccattgacagtggaggagactccacgggttcagggggaaactcaaccccagagactgctgctcgccgaggatagcgaagaggaagtcgacttcctgagcgaacggaggatggtgaagaagtctaggacaacctcctctagtgttattgttcctgagagcgacgaagagggtcactcccctgtgctcggggggctgggccctccttttgcctttaacctaaactcagacactgatgtcgaggaaggtcagcagcctgcgaccgaggaggcctctagtgccgctaggcggggcgcaactgtcgaagcctag

SEQ ID NO: 123738 - DNA, 5409 bp, synthetic construct
  misc_feature 1..5409: note = Description of Artificial Sequence: Synthetic coding sequence
  source 1..5409: mol_type = other DNA
atggaagacacgcaagctattgactgggatgtggaagaggaggaagagaccgaacagtcctccgaatccttaagatgtaacgttgagcccgttggcaggctccatatcttctccggcgcgcatggccccgagaaagacttccccctccacctggggaaaaatgtggtcggaagaatgccggactgcagcgtcgccttaccgttccctagcatatctaagcaacacgccgagatcgagatactggcctgggataaggcgcccatcctcagagactgtggctcactcaacggcactcaaattctgcgaccccccaaagtgctctctcctggcgtcagtcaccggttgagagatcaggagctgattctgttcgccgacctgctttgccagtaccatagactggatgtcagcctgcctttcgtttctcgcgggccgctgaccgtcgaggagactcccagggttcaaggcgagactcagccccaacgcctgttgctggcggaagattctgaagaagaggtagactttctcagcgaacgtaggatggtcaagaaatctcgaacaacttcctcatccgtaatagtgcccgagagcgatgaagaggggcatagtcctgtactgggggggttgggtcctccgtttgccttcaatttaaacagcgataccgatgtggaggagggccagcagcccgcgaccgaggaagcctcaagcgccgcaagaagaggcgcgacggtggaagccaagcaatcagaggcggaggtggttacagagatccagctggaaaaagatcagcctctcgtcaaagaacgggacaatgatacgaaggtcaagcggggcgccggaaacggggtagtcccggcgggagtgatcctggagcgcagtcagccgcctggcgaagatagcgacactgatgtcgatgatgacagccggccaccaggccgaccagcagaagtccacctggagcgtgcacaaccatttggatttattgattcagacactgatgccgaggaagagaggatcccggccacccctgtggtcatacctatgaagaagcgtaaaatcttccacggggtcggcacccgcggccctggggcgcccgggctggcgcacctacaggagtcccaggctggcagcgacacagatgtagaggaaggaaaagctccccaggccgtgcccttggaaaaatctcaagcttcaatggtgattaacagcgacactgacgacgaggaagaagtgagcgccgctttaactctggctcacctaaaggaatcccagcctgcgatctggaacagagacgccgaagaggacatgcctcagcgagtggtactgttgcaacggtcgcagacgacaaccgagagagatagtgatactgatgtggaggaagaagaactccctgtcgagaacagagaggcagtgttaaaggatcacacaaaaatcagagccctggttagagcccatagtgagaaggatcagccaccttttggggattcggacgacagcgtcgaagcagacaaatctagcccgggcatccatctcgaacggagccaagcctcaaccaccgtggatatcaatacacaagttgaaaaggaggttccccccggctcagctattatccacataaagaaacaccaggtttctgtcgagggcaccaaccagacagacgttaaagccgtcggcgggcccgccaagctcctggtagtgagcctggaggaggcttggccacttcacggagattgcgaaacggacgcagaagaggggacctctctgacagcatctgtggtggccgatgtgagaaaaagccagctgcctgccgaaggagacgccggcgcagagtgggcagctgccgtcttaaaacaggagcgggctcacgaagtcggcgcgcagggtggcccacctgtcgcccaggtagaacaggacttgcccatatctagggaaaatctcacagacctggtggtggatacggacaccctgggggaatctactcaaccccagcgagagggcgcgcaggtccccacaggtagggagagggagcagcatgtcggtggcaccaaagactccgaggataactatggagactctgaggatctcgatctccaggccactcagtgtttcctcgagaaccagggacttgaggcagtccaaagcatggaagatgagccaactcaggcttttatgctgacgcctccacaggaactgggacccagtcactgtagttttcaaaccaccggtactctggacgagccgtgggaggtcctcgccacacagcccttttgtcttcgagaatcagaagactccgaaacacagccgtttgacacacacctcgaggcctacggcccttgcctgtcaccacctcgcgcaatcccaggggaccagcatcctgagagccccgtccatactgagcctatgggaatacagggccggggtcgccagaccgtggataaagttatggggattcccaaggagactgctgaacgcgtcggaccagagcgcgggcctctggagcgtgaaacagaaaagctgctccccgaacgtcagaccgatgtgacgggagaggaggaattgaccaaagggaagcaggacagggaacagaagcagctgcttgcccgggacacacagcggcaggaatcagacaaaaatggagaatcggcctcccctgagagggatagggagagtctgaaggtcgagatcgagacatctgaggagatccaggagaagcaggttcagaaacagacccttcctagtaaggcctttgaacgagaggtggaaagaccagtggctaatagagagtgcgatccggctgagctcgaagaaaaggtgcctaaagtcattcttgagcgggacacgcagcgcggggagcctgagggcggctcacaagaccagaagggtcaggcgtctagcccgactcccgagcccggcgttggcgccggtgatcttcctggtcccacaagtgcacctgtgccgtcggggagtcagtcagggggccgcggcagtcccgtatctccacgtcgacaccagaagggcctcttaaactgcaagatgccacctgcagagaaggcatcgcgtatacgggcagcagagaaggtgtcacgcggcgaccaggagagtcccgacgcatgcctgccccctacagtacccgaagcaccagcgcctcctcagaaaccgctgaactcacagagtcagaaacacctggccccaccacctctactatctcccctgttaccatccataaagccaaccgttaggaagaccagacaagatggcagtcaagaggccccagaggcgcctttgagcagcgagctcgagccatttcacccgaaaccaaagatccgcactcggaagtctagcagaatgactccattcccagccacctccgctgcgccaaaactcgagcctagcacctcaacagatcagcctgtgacccccgagcctactagccaggccaccaggggtaggaccaatcggagctccgttaaaacccccgaaacagttgtgccaacagcacctgagttgcagccttccacatcaactgatcagcctgtgacaccagagccaacatcccaagccactagaggtcgtacagatcggtcatccgtcaaaacaccagagacagtcgtccccacggcgcctgaacttcaggcatctgccagcactgatcaacccgtcaccagtgaacctacatccagaaccactcgaggcagaaaaaacaggtcttctgtgaaaactcccgaaacggtcgttccagccgccccagagctccaaccctctaccagcactgaccaacctgtcacccccgagcctacaagtcgcgccactcgcggccggactaatcgctcatctgttaaaacacccgagagcatcgtgcctattgctcccgagcttcagccctccacctctcggaaccagctggttacccccgagccaacatctagagcgacaagatgtaggaccaatcgttcctcagtaaagacccctgagcctgtcgtcccaaccgcccctgaaccccatccgactaccagcaccgaccaacccgtgactcccaagctgaccagccgcgcaactcggcgtaaaaccaaccgttctagcgtgaaaactcccaaacccgtggaacctgccgcatcagacctggaacccttcaccccaactgatcagagtgtgacacctgaagcgattgcccagggcggacagtccaagaccctaaggagcagcacagtccgggccatgcctgtgccaaccacccccgagttccagtctcccgtcaccaccgatcaaccaatttcccctgaacctattacacagcccagttgcattaaacgacaaagggctgctggcaaccccgggagcctcgcagcccccatcgatcataagccatgttcagcccccttggaaccaaaaagccaggcaagtcgaaatcagaggtggggcgcggtgcgggcagccgagtctctgactgctattccggagcccgcatcccctcagctgctcgagactccgattcacgctagccagattcaaaaagtggaaccagctggtagatcccgatttactcctgagctccagccaaaagctagccagtcgaggaagcgctcccttgccacaatggactcaccccctcaccagaagcaaccccagagaggcgaggtgtcccagaagaccgttatcataaaagaggaagaggaagacacggccgagaaacccggtaaagaggaggacgtggtgactcccaagcctggcaaacgcaagagagaccaggcagaggaggagcccaaccgaatccccagcaggtccttacgccgcacaaagctcaaccaggaatccactgcccccaaagttctttttactggggtagttgatgcacgcggggaacgggcagtgctggccttgggcggttctctggcagggagcgcagccgaggcctctcacctggtcacggatcgcatccgaagaacggtgaaattcttatgcgccctgggtcggggcatcccaatcttgagcctggactggctgcaccagtctcgcaaagctggcttctttctgcctcccgatgaatatgtggtgaccgacccagaacaggagaaaaacttcggtttcagcttgcaggatgctctcagccgcgcaagagaaaggcgacttctcgagggatacgaaatatacgtgactcccggggtgcagcccccccctcctcagatgggcgaaatcataagctgctgcggtgggacctacctcccaagcatgcccagatcatacaaaccccagcgagtcgtaatcacctgcccccaagacttcccccattgttctattcctttgcgggtgggcctgcctctgttatcgcctgagttcctcctgacaggagtactgaagcaggaggcaaaacccgaggcctttgtcctgagtccactcgaaatgtcttcgacatag

SEQ ID NO: 123739 - DNA, 738 bp, synthetic construct
  misc_feature 1..738: note = Description of Artificial Sequence: Synthetic coding sequence
  source 1..738: mol_type = other DNA
atggaagatactcaagctatcgattgggatgtggaggaagaggaggagacggagcagagttctgagagtctgcgatgcaatgttgagcctgtggggcgactgcacatctttagtggcgcccacggacctgaaaaggattttccactccatctcggaaaaaatgtcgtcgggaggatgccagactgtagcgtggccttgccttttccaagcatctctaagcagcacgcagaaatcgagattttagcttgggataaagccccaattcttcgagattgcggaagcctaaacggcacgcagatcctacggccccccaaggtcttgagccctggagtgtcacatcgcctcagggaccaagagctcatcctgtttgccgacctactgtgccagtatcaccgtctcgatgtctccctccctttcgtaagccgtggccccctcactgtcgaagaaactccccgcgtgcagggggagacacagcctcagcgtctgctgctcgccgaggactcagaggaggaagtcgacttcctgagtgaacgcaggatggtaaagaaatcccgaactacatcgagcagcgtaatcgtccccgagtctgacgaggaaggacacagccccgtgctgggcggactcggaccaccctttgcattcaacctcaacagcgacactgatgttgaggagggtcagcaacccgctacagaagaagctagcagcgcagcacgacgtggagctacggtggaagcttag

SEQ ID NO: 123740 - DNA, 5409 bp, synthetic construct
  misc_feature 1..5409: note = Description of Artificial Sequence: Synthetic coding sequence
  source 1..5409: mol_type = other DNA
atggaggacacgcaggccatcgactgggatgtggaggaggaggaagaaaccgagcagagcagcgagagcctacgatgcaatgtggaacctgtggggcgattgcacatcttttcaggtgctcacggccccgagaaagatttccccctgcatttaggcaagaatgtcgtgggacgaatgccggactgcagtgtcgccctcccattccccagcatatccaaacagcatgccgagattgaaatcctggcctgggataaggctccaatcctcagagactgcgggtctctcaacgggacccaaatcctacgccctcctaaggtgctgtcccccggggtcagtcaccggctgagggatcaggaactgatcctgttcgcagatttgttgtgtcagtatcaccgcttggacgtgtcgctgccttttgtatcaagaggtcccctgaccgtcgaggaaactcccagggtccagggcgaaacccaaccccaaagactcctgctggccgaggatagcgaggaagaggtggattttctgagcgagagacgaatggtcaagaagtcgcgcacaaccagctcatctgtcatagttcccgagagtgatgaggagggacatagccctgttctcggaggcctgggcccaccttttgcttttaacctgaacagcgataccgacgtcgaggaaggccaacagcctgccactgaagaggcctcgtccgctgctcgcaggggcgcaacggtagaggctaagcaatctgaggcagaggtcgtaaccgaaattcaactcgaaaaggaccagccccttgtgaaggagcgggacaatgataccaaggtaaagcgtggcgctggcaacggggttgtacccgcaggagtgatccttgagcgtagccagccccctggggaagacagcgacacagatgtagacgacgattctcgcccacccgggcgtccagcggaggtgcacctcgagcgagcgcagcctttcgggttcatagatagtgataccgacgccgaagaggagcggatccctgctactcctgtggtgattcctatgaagaaaagaaaaatcttccacggtgtggggactcggggccctggggcacctggccttgcacacctccaggaatcacaggccgggagtgacaccgacgtggaggagggaaaggcgccacaggctgtgccactcgagaagagccaagcaagtatggttataaattccgacacagacgacgaagaggaagtgtcagctgctctgactctggctcacctgaaggaatctcagccggccatctggaatcgggacgccgaagaagatatgcctcagcgcgtggtcttgcttcagcgcagtcagactacaaccgagcgcgacagtgacactgacgttgaagaggaggagctgcccgtcgaaaatcgtgaagctgtgctgaaggaccacaccaagatcagggccctggttagagcccattccgaaaaagatcagccaccctttggggactctgacgattccgttgaggccgataagagttctcccggcattcatctggaaaggtctcaggcctcgaccactgtcgacatcaatacccaggtggaaaaggaggtgccccccggcagcgctattatacacattaagaaacaccaagtaagtgtcgaggggacgaaccaaaccgatgtgaaggccgttggtggccctgcaaagctgcttgtcgtatctctggaagaagcctggcctcttcacggggactgcgagactgatgccgaagaaggcactagtctgacggcaagcgtcgtcgcagacgttcgaaagtcacagctccctgcagaaggcgatgccggagccgagtgggcagcagctgtgttgaagcaggagagggcccatgaagtcggagctcagggagggcctccggtggcccaggtggagcaagatctgccgattagtcgggagaacctcacagacctagtggtagacaccgataccctgggtgaaagtacgcagccacaacgtgagggcgcccaggtgccaaccggcagggaaagggagcagcacgtgggcgggacaaaggactccgaggataactatggagattctgaggatcttgacttacaagctactcaatgctttcttgagaatcagggcttggaggccgtccagagcatggaggacgaacccacacaggccttcatgttaacacctccccaggaacttggcccctcccactgctccttccagaccaccggaaccctggacgagccgtgggaggtcctggctactcagcccttctgccttagagaaagcgaggacagcgagacccagccattcgacacccacctggaggcatatggaccatgcttatctcccccaagggcaattccaggggaccagcaccccgagagcccagtccacactgagccaatgggaatccagggacggggtaggcagaccgttgataaggtgatggggatccctaaggaaaccgccgaaagggtgggcccagagcgaggtcctctcgagagggagacggaaaaactgttgccagagcggcagaccgacgtaacaggggaagaagaattaacgaagggcaaacaggaccgcgaacaaaaacagctgcttgcccgggatacgcagagacaagaatctgacaagaacggggaatccgccagccccgaacgcgacagggaatcactgaaagtggaaatcgaaaccagtgaagaaattcaagaaaaacaggttcaaaaacaaactctgccaagcaaggcatttgagcgggaggtggagcgacccgtagcgaatagagaatgtgaccccgctgaactggaggaaaaggtcccaaaggtgatcctagagcgagacacacagcggggggagcctgagggagggtcccaggaccagaaggggcaggcctcatcccctactcccgaacccggagttggtgccggggatctgcccggtcctacttctgcgcctgtgccgtctggcagccagtcgggcggacgtggaagcccagtgagccctagacgacatcagaagggtctgctcaactgtaaaatgccgcctgctgaaaaggcttcgcggattcgagctgcagaaaaggtgagtaggggcgatcaggaatcccccgatgcatgtctgccccccactgtgcccgaggcccccgcgcctccgcagaagccactgaatagccagagccagaaacacctggccccccctcctctcctgtccccacttttaccttccatcaaacccacggtaagaaaaacccgtcaagatggctcacaggaagccccagaagctcccctttcatctgaactggagccattccatcctaaacccaaaatccgaactcgcaaatccagccgcatgacacccttccccgccacatcagccgcacctaagctggaaccaagcacctcgaccgatcaaccagtgaccccggaaccgacctctcaagcaacaagggggagaacaaataggtccagcgtgaaaacccccgagacggttgtccccactgcccccgaactgcagccttcaactagcactgaccagcccgttacccctgagccaacttcacaagccacacgggggcgtactgaccgcagcagcgttaagacccctgaaactgttgtgcccacggcacccgagttgcaagccagtgcgtcgacagatcaaccagtaacctcggagccaacgtctcgcactacacggggcaggaagaatcgctcatccgtgaagaccccagagacggtggtgccagctgcgcccgccctgcaaccttccaccagtacagaccaacctgtaacacccgagccaacgtccagagccacaaggggacgcacaaaccggtccagcgttaagacaccagaatccattgtgcctattgctccagaactccagccatcgactagccggaaccagctggttacccccgaaccgaccagtcgagcgacacgttgtaggaccaaccgctcctcggtcaagactcccgagccagtagtgcctaccgctcccgagccccaccccactacatctacagatcagccagtgacacctaagttgaccagtagagcaacgaggcgcaaaactaaccgctctagtgtgaagactcccaaaccagtggagccagctgcatctgacctcgaaccattcaccccaaccgatcagagcgtgactccagaggctatcgcacagggtggccagtccaagacactgagatccagcaccgtccgggcaatgcctgtccccaccaccccagagttccagagtcccgtcaccaccgatcagccaatatcccctgaaccaattacccaacctagctgcattaaaagacaacgagccgctggcaatccaggcagcttggccgctcccatcgatcacaaaccctgcagcgctcccttagagccaaagtcccaggcaagtaggaatcagagatggggtgctgtgcgtgcagcagaatccctcacagctattccagaaccagcttccccacagctgctcgagacacccatccacgcatctcagatccagaaggtggagccagccgggcgaagcaggtttacacccgagcttcaaccaaaggcgagccagagtcgcaagagaagtctggcaactatggacagccctccccaccagaagcagccgcagagaggcgaagtttcacagaagacagtcatcataaaggaggaggaggaggacacagctgagaaacctgggaaggaggaggacgttgtcacacctaaacctggcaagagaaaacgcgaccaggcagaagaggagcccaatcggataccttctcgcagtcttcgccgcacgaaactaaatcaagagtctactgcacctaaagtcctgtttacaggagtcgtcgacgctagaggggaacgcgccgtgctggctttaggtggaagtctcgccggcagtgccgcagaagctagtcatcttgtgacagaccgtatccgcagaacagtgaagttcctctgcgctctgggaaggggcattcccattttaagtcttgattggctccatcagagcagaaaggctggattttttctccctcctgacgagtatgttgttacagacccggaacaagagaagaacttcggcttctccctccaagatgctttatctcgagcccgcgaacgtcgtctgttggaaggatacgaaatttacgtgacccctggggtccagccaccccccccccagatgggcgagatcatttcctgctgcggcggtacgtacttgccatccatgcctagatcatacaagccccagagggtcgtgatcacctgcccacaggatttcccgcactgctctattccgctgcgagtgggtctcccgcttctgagccctgagtttctcctgacaggggtgttgaaacaagaagctaagccggaggccttcgtgttatcccctctcgagatgtcctctacgtag

SEQ ID NO: 123741 - DNA, 5478 bp, synthetic construct
  misc_feature 1..5478: note = Description of Artificial Sequence: Synthetic coding sequence
  source 1..5478: mol_type = other DNA
atggaggatactcaggcaattgactgggacgtggaggaggaggaggagaccgaacagtcttccgaatccttaagatgcaatgttgaaccagttggcaggctgcacattttttcaggggcccacggaccagagaaagactttcctttacatctgggaaaaaacgtggtaggacgaatgcctgattgcagcgtggctctgccatttccttctatatccaagcaacatgcagaaattgaaatactggcctgggacaaggcccccatactcagggactgtggctctctaaatggtacccagatactgaggccacccaaagtgctctcacccggggttagccacagattgcgcgatcaagagcttatcctgtttgccgatctgctgtgccagtaccatcgcctggacgtgtccctgccattcgtgagtagaggaccactgacagtggaggaaactccccgcgtccagggagaaacccagccacagcgtttgctgctcgctgaagattctgaggaggaagttgactttctatcagagcggaggatggtcaagaagagccgcaccacttccagctccgtgatagtgccagaaagcgatgaagaaggccactctcctgtactcggtggcttgggccctcctttcgccttcaacctcaattccgacacagatgtggaggagggtcaacagccagctactgaagaagcctcctcagcagctcgacggggtgccactgtcgaggccaagcagtcagaggcagaggtcgtcactgaaatacaactggagaaagaccagcccctggtcaaagagcgcgacaatgatacaaaggtgaagcgcggggctggcaacggggtggtccctgccggggtgatactagagagaagccagccgccgggcgaagatagcgataccgacgtggatgatgactcgaggccacctggaaggcctgccgaggttcaccttgagagggcacagccatttggctttatagactcagatactgacgccgaagaggagcgaattcccgcaacccctgttgtaatacctatgaagaagcggaaaatttttcacggagtcggtactagagggcccggtgcacctgggctggcccatctgcaggagagccaggcgggcagcgatactgacgtagaagagggtaaagccccgcaggccgtgcctctcgagaagtcacaggcttccatggtgataaactccgatactgacgacgaggaggaggtgagtgctgcattgacgctcgcgcatttgaaggagagccagccggctatatggaaccgggatgcggaagaggatatgccacagcgtgttgttttactgcaaaggagtcaaaccactaccgagcgggattccgacaccgacgtagaggaagaggagctgccagttgagaacagggaggcagtcctgaaggatcataccaagatccgggcgctggtccgggcacatagcgaaaaggatcagccccctttcggagactctgacgactcagtcgaagcggataaaagttccccgggaatacacttagagcggtctcaagctagcaccactgtggatattaacacacaggtagagaaggaggttccgccaggctctgccataatacacatcaagaagcaccaggtgagcgtcgaggggactaatcaaacagacgtaaaggccgtgggcgggcccgcaaaactcctggtggtatccctcgaggaagcttggccactgcacggagactgcgaaactgacgcggaggagggcacgtctctcacagccagcgttgtcgcagacgtccggaagtcgcaattgccagccgagggcgacgccggagccgaatgggcagcagctgtgctgaaacaggaacgcgcccatgaagtaggggcgcagggaggtccaccagttgcccaggttgaacaggatttgccaatctctcgcgagaatctcaccgacctggtcgtggacactgatacactgggtgaatcgactcagccccagcgagaaggtgcacaggtgcccaccggccgcgaacgcgagcagcatgtgggaggcactaaggactctgaggacaactatggtgattccgaggacctggatttacaggccacccaatgcttccttgagaaccagggtctggaggcggtacagtccatggaggatgagcctacgcaagcctttatgctgactcctccccaggagctagggccatctcattgctccttccagactacaggcttacttaattgtaagatgccacccgccgaaaaagccagcagaattcgcgccgccgagaaggtttctaggggtgatcaggaaagcccagatgcttgtctgccgccaactgtccctgaggccccagcccccccccagaaacccctcaattcccagtctcagaaacacctggccccccctcccttgctctctccgctcttaccctcaataaaacccactgttcggaagacaaggcaagacgggagccaggaagcacccgaagcaccactatcatcggaactcgaaccattccatcctaaaccaaagatcaggactcgcaagagctcacgcatgacaccattccccgccactagcgctgctcctgagccccatccttcgacgtcaactgcacaacctgtcactccaaagccaacttcacaggctactcggtcccggaccaacagaagcagcgtgaagacgccggagcccgttgttccgaccgccccagaactccagccctcaacttcaacggatcagcccgtcacatcggaacccacgtctcaggtcactaggggccgcaagagcagatccagtgttaagacgcccgagactgtggtgccaactgctttggagctccagccttctacttctactgaccggcctgtcacatcagagccaacctcacaggccacccgggggcgcaaaaataggtcctccgtaaaaactccggagcctgttgtgcctactgctcccgagctgcagccatccactagtaccgaccagccggtgaccagcgagcctacttatcaagctactcgggggcgcaagaatcgctcaagcgtgaagactcctgagcccgtggttcctacggctcccgaactgcggccgtctaccagcacggaccgcccagttacaccaaagccaacatctaggaccactaggtccagaaccaacatgtccagcgtgaagacgccagagaccgtggtccctaccgctcctgagctgcagatttccacctcgaccgatcagcccgttactcctaagcctaccagcagaacaaccagatcaagaaccaatatgagctccgtgaaaaatccggagtctaccgtgcccatagccccagagttaccaccatcaacaagcacagaacagcctgttacgcctgagccaacttcccgagctacccgtggccgaaaaaataggagctccgggaagacacccgagacactcgtccccacggccccaaagctcgagcctagtaccagtactgatcaaccagtcacacctgaacctacatcacaagccaccagggggagaaccaacagatctagtgtcaagacccctgagacagtagtgcccactgcaccagagctgcagcccagtacatccacagatcagcctgtgacccctgaaccgacatcccaggctacccgggggagaaccgaccggagttccgtaaagactccagagacagtcgttccaacggcccctgagctgcaggcctccgcctccaccgaccagcctgtgacttctgagccgacctcgcggactacccgcgggaggaagaatagaagcagcgtcaagactccagaaactgtggtgcctgcagcccccgaactacaaccatcgacttctacagaccagcccgtcaccccagaaccgacatcccgagccactagaggacggacaaataggtcatccgtgaagaccccggagtcgattgtaccaatcgcccctgaacttcagccgagcacaagcaggaaccagctggtgactccagagcctacttccagagcgacccggtgccgaactaacagatcaagcgtgaaaactcctgagcctgtcgtcccaactgcacccgagccacaccccaccaccagcacagaccagcccgttactcctaaactgacatccagagctactcggaggaaaacgaatcggagttctgttaaaactcctaaacctgtggaaccggccgctagcgacctggagcctttcacccctacagaccagagcgtaacaccagaggcaattgcccaaggcggacagagcaagacactgaggagctctaccgtgagagctatgcccgtgcctaccacccctgaatttcagtcccctgtgactacagaccagcctatatcacccgagcctataactcagcctagctgcatcaaaaggcagagggcagccggaaatccaggttcattagccgcccccattgatcacaagccttgtagcgcaccactggaacctaaatcacaagcttctcgaaaccagcggtggggcgcggttcgggccgcagaatcactcaccgccattcccgaacccgccagccctcagctgctggagacgcccattcacgcctcacagattcagaaagtcgagcccgcagggcggtctcggttcacccccgagctccagcccaaggcttcgcaatcacggaaacggagtcttgccactatggactcacccccgcatcagaagcagccacagcggggggaggtatctcagaaaacagtgatcattaaggaggaagaagaggacactgcagagaaaccaggtaaggaggaggatgttgttaccccaaagcctgggaaacgcaaaagggaccaggctgaagaggagcctaacaggatcccatccagatccctccggcggaccaagctgaaccaggagtctactgcaccaaaggtgctttttacaggggtggtcgatgcccgcggcgaacgagctgtcctcgcactagggggcagtttggcagggtctgctgctgaggcatctcatctagtgacggaccggatccggcggacggtcaaatttttgtgcgccctgggccggggaatccctatcctctcactcgattggttgcaccaatcacgcaaggcgggcttcttcctgccacctgacgagtatgttgttacagaccctgaacaggaaaagaacttcggctttagtttacaggatgcccttagtcgggctagagaacgtaggctgcttgaggggtacgagatatatgttactccaggagttcagccaccccccccacagatgggggagatcataagttgctgcggtggcacttacctgcctagtatgccccggagctacaagcctcaaagagtagtgataacctgccctcaggacttcccacattgttctatccctctgcgcgtcggactgcccctcctgtcccccgagtttctactgacaggcgtgctgaagcaagaggccaagcctgaagcattcgtcctcagtccactggaaatgtcttctacttag

SEQ ID NO: 123742 - DNA, 4968 bp, synthetic construct
  misc_feature 1..4968: note = Description of Artificial Sequence: Synthetic coding sequence
  source 1..4968: mol_type = other DNA
atgtatcatcgactggacgtgagcctgccgttcgtgtcacggggacctttgacagtggaagagacacctcgtgtgcagggtgagacccagcctcaacgactcctgctggccgaggactcagaggaagaagtggacttcctttccgagagaaggatggtaaaaaaatcgcgcactaccagctcatcagtcatcgttcctgaatccgatgaggaggggcatagtccggtgcttggagggttggggccccctttcgccttcaacctgaactctgacaccgatgtggaggaagggcagcagcccgctacagaggaggccagctctgcggcaaggcggggagctacagtcgaagccaagcagtccgaggcagaagtggtcacggagatccagctggagaaggatcagccactcgtgaaggaacgagacaatgatacaaaggtcaaaaggggcgctggaaacggggtggtccccgctggtgtgatactggagcgttcgcagccccccggcgaagactcagacacagatgtcgacgatgattctcggcctccaggtagaccggcagaagttcatctggaacgcgcgcagcctttcggttttatcgacagtgacacagacgcggaggaagagaggatcccagctactcctgtggttatacccatgaagaagagaaaaatcttccacggcgtgggaactcgagggcctggcgccccaggcctggcccatctgcaggagtctcaagctgggtctgacaccgatgtggaggaagggaaggctccacaagcagtgcccttggagaaaagtcaggcaagcatggtgataaactccgacactgacgacgaggaagaagtgtcagctgctttaactctcgctcatctgaaggagagccaacctgctatctggaacagggatgctgaggaggatatgccccagcgcgttgtgcttctgcagcgtagtcagacaacgacagaacgcgactctgacaccgacgttgaggaggaggagctgccagttgagaaccgcgaggccgtgctgaaggatcatactaaaattagggcgctggtgagagcacactctgaaaaggatcagccaccatttggcgacagcgacgactccgtcgaggccgataagagctccccagggatacacctagagagatcacaagcatcaactaccgtggatattaacactcaggtggagaaagaagtgccccctgggtccgccatcatccatataaaaaaacatcaagtctcagtggaaggcaccaaccaaacggacgtaaaggcagtgggtgggcctgcgaaattattggtggtcagcttggaagaagcctggccgctgcacggagactgcgaaaccgacgccgaggagggtaccagtttaacagctagcgttgtggctgatgtgcgaaagagccagctgcctgccgaaggcgatgccggggcggaatgggcggcagctgtcttaaaacaagagcgggcccatgaagtcggtgctcaagggggtcccccagttgcgcaggtagaacaagaccttcccatttcccgtgaaaacctcacggatctggtagtggacacagatacattaggagaaagtacccagcctcagcgagagggagcccaagtgcccaccggacgcgagcgtgagcagcacgtgggcggtaccaaagacagcgaggataattatggggactcagaagacttagacctgcaggctactcaatgctttctggagaaccaggggctcgaagtgcagtccatggaggacgagccaacacaagcttttatgctcacaccccctcaggaacttgggcctagccattgtagcttccagactacaggactgttgaattgcaagatgcccccggccgagaaggcctcgcgaatccgtgctgccgaaaaagtttcacgtggagaccaagaaagccccgacgcctgtcttccaccaacagttcctgaagctcctgcaccacctcagaagcccctgaattctcagtctcagaaacatctggcccccccacccctgttgtcccctctgctgcccagcattaaacccactgtaagaaagactcgccaggacggatcccaggaagctccagaagcccccctgagctccgaactggagccattccatcccaagcccaaaattcgtacaagaaagagtagtaggatgacacccttccccgctacatctgccgctcccgagccccacccaagcacttccactgcacagcctgtgactccgaagcctacatcccaggctactcgctctaggaccaaccgaagtagcgtgaagacccccgaaccagtcgtgcctacagctcccgagctgcaacccagcacgtccacagaccaacctgttacttcagaacctactagccaggtcaccagagggcggaagtcccgctcttcggtgaaaactcctgaaactgttgtgccaacggctttggagttacaaccctctactagtacagatagaccagtgacttctgaacccacgtcccaagctacaaggggccggaagaacaggagcagcgtgaaaacaccagaacctgtggtgcccaccgcgcctgagctgcaaccgtccacaagcactgaccaacccgtgactagcgaacctacataccaagctacacggggacgaaaaaatagatctagtgttaaaacccccgagcctgtcgtgccaaccgctccagagttgcgccccagtacgtctactgaccggcctgttacccccaagccaacctcaagaaccactagaagcagaacaaacatgagtagtgtgaaaaatcctgagtcaactgtccctatagcccccgagctgccaccaagcacttccacagagcagcctgtcacgccagagccaacatcccgcgctactagggggagaaagaatagatcatcgggtaagacccctgaaactttggtacccacagcaccaaaactggagcctagcacttctacggaccagcccgtgactccagagcctacatcacaagccaccaggggaaggaccaaccgaagtagcgttaaaacacccgaaaccgtagtccccacagcccccgaactccagccttccacctccaccgatcagcctgtaacgcctgagcctacctctcaggccaccagaggccggactgatcgctcatctgtaaagacaccggaaaccgtggtgcccacagccccggagctgcaggcgtcggccagcactgatcagcctgtcacctcagagccaacttccaggacgactcggggcaggaaaaaccgctcctcggtaaagacaccagagactgtggtgcccgcagctcccgaactgcagccaagcacaagcaccgatcagcctgttacaccggagcccacaagccgggctactaggggccgcaccaatcggtcttccgtaaagacgccagagagcatagtgcctattgcaccggaactccaacctagcacatcacggaatcagctcgtgacaccggaaccaacctcaagagccacaaggtgccgtacaaaccgcagcagtgttaaaaccccggaacctgtcgtgcccactgctcccgaaccgcacccaactaccagcactgaccagcccgtaactcccaaactgactagcagggccacaagacgaaaaactaacagatcaagtgtaaaaacccctaagccagtagagcccgcagccagcgacctcgaaccatttacaccaacagaccaatccgtcacaccagaggccatagcccagggcggacaaagtaagacacttagatcgagcactgtgcgtgcaatgccggttccgacaactcccgagttccaatcaccagtgaccactgaccaaccgattagcccagaaccaatcactcagccatcctgtatcaagcgacagcgtgcggccggcaacccaggctctctggccgcaccgatagatcataagccatgctctgcaccgctggagccaaagtcccaagctagccgaaaccaaagatggggcgccgtccgcgctgccgaatcccttacagcgatacccgaacccgccagccctcagctgctcgagacacctattcacgcttctcagatccagaaagtcgaacccgcagggagatccagattcacgccagaactgcagccaaaagcttcccagagtcggaagcgaagtcttgctaccatggactcaccccctcatcagaaacagccacaaagaggcgaagtcagtcagaaaactgtgattatcaaagaggaagaagaggatacggctgagaaaccaggcaaggaggaagatgtcgtgacacccaagcccggtaagaggaaaagggatcaggctgaggaggaaccaaatagaattcctagccggtcactgcggagaaccaagttaaaccaggaatccacagcccctaaggtgctctttaccggtgtagtggatgcacggggagagagggcagtgctggctctgggagggtcattggctggatctgctgcagaggcaagtcacctggtcactgatagaattaggaggaccgttaagtttctctgcgccctaggaaggggcattccgatcctctccctggactggctgcaccaatctaggaaggctgggttcttccttccaccagacgagtatgtcgtgacagatccggaacaggaaaagaacttcggattttcgcttcaggacgcgctaagcagagctcgggaaaggcgactccttgaggggtacgaaatttatgtgacgcctggagtgcagccaccgccccctcagatgggcgaaatcatctcgtgctgtggcggtacgtacctcccatccatgcctcgcagttacaagccacaaagggttgtgattacttgcccacaggattttccgcactgctcaatacctctgcgtgtcggtctacccttactctcccccgagttcctactgacaggcgttttgaaacaggaggctaagccggaggcgttcgttctgtcaccactggagatgagcagcacctag

SEQ ID NO: 123743 - DNA, 4968 bp, synthetic construct
  misc_feature 1..4968: note = Description of Artificial Sequence: Synthetic coding sequence
  source 1..4968: mol_type = other DNA
atgtatcatagattggatgtttccctaccattcgtctcccgcggacccctcaccgtggaggaaacaccaagagtgcagggagaaactcagccccagcggctactgcttgccgaggacagcgaagaagaagtcgactttctgagcgagaggcgcatggtcaaaaaatctcggacaacctcttcttcggtaatcgtgcccgagtccgatgaggagggtcacagtcctgtcctgggagggttgggtccgcccttcgctttcaacctcaactctgatacagacgttgaggaaggtcagcagcccgcaaccgaagaagcatcatcagccgcccgccgcggcgccacagtggaggctaagcagtccgaggcagaagtggtgactgagatacagctcgagaaggaccagccactcgtgaaggagcgggacaatgatacaaaggtgaaacggggtgcagggaatggcgtggttccagccggcgtgatcttggaacggtcccagccgccaggagaggacagcgacaccgacgtcgacgatgatagccggcccccaggcagacccgctgaagtccaccttgagcgtgcccaacctttcggttttatagattccgacacggatgctgaagaggagagaattccagccacccctgtggttataccaatgaagaagcggaagatctttcatggtgtcggtacccgcggaccgggcgctcccggacttgcacacttacaggagtctcaggctgggagcgatacagatgtcgaagaaggaaaggcccctcaggccgttcccttggagaagtcccaagctagtatggtcatcaactccgacacagacgacgaagaggaagtgtcagcagccctgaccctggcccatcttaaagagtcccagccagctatctggaatcgcgatgctgaggaggacatgccacagcgcgtagtactactgcaacgaagccaaaccacgactgagcgggactcagatacggacgtggaagaagaagagctgccggtagagaaccgggaagcagttttgaaagatcatactaaaattcgcgcactggtacgggcccatagcgagaaggatcaaccgccctttggtgattcagacgatagcgtggaggctgacaagtccagtccagggatacatctggagcgtagtcaggcttctacaaccgttgacataaatactcaagttgagaaggaagttcctcccgggagtgccattattcacataaaaaagcaccaggtgagcgtcgaaggtacaaatcaaaccgatgtcaaggcagtgggtggccctgcgaagctgctggtcgttagtctcgaggaagcctggcccctgcatggagactgcgagacggatgccgaggaaggcacctctctaaccgcaagcgtggtggcagacgtgcgtaagtctcaactgccggccgaaggggatgccggagccgagtgggccgcggctgtattgaagcaggagcgggcccatgaagtaggcgcacagggcggcccccccgtcgcacaggtggaacaggatctcccaatctcgcgggagaacctgacagatctggtagtcgacacagatactttaggcgagtcgacacaacctcagcgggaaggcgcccaagtgcccacgggacgggagcgagaacagcacgtggggggaacgaaagatagcgaagataattatggcgactccgaggacctggatctccaggccacacagtgcttccttgagaatcagggtttggaagtgcagtccatggaagatgagcctacacaggcgttcatgcttacgccccctcaagagcttgggccttcgcactgctcttttcagacaacggggctcctgaactgtaagatgccaccagccgagaaggcttcgcgtattcgagccgccgagaaagtgtccagaggcgatcaggagtctcctgatgcatgtctccctcctaccgtgccagaggctcccgccccgccccaaaagcctctcaattcccaaagccagaaacaccttgcacccccccctttgttatcccccctgctgccctctattaagcccacagtccggaagacaagacaggatggctctcaagaggccccagaagctcccctttcctccgagctggaaccattccaccctaaacctaaaatcagaacaaggaagtctagcaggatgacacctttccccgctacatcagccgcaccggagccacacccaagcacaagtacagcccagcccgtgactcctaagcctacaagccaggccacacggtcacgaaccaacagatcctctgtgaagactcccgaacccgtcgtacctaccgcaccagaactgcagcccagcactagtacagaccaaccagtcactagcgaaccaacgtcgcaggtgactaggggccgaaaaagcagatcttcagtgaagactcccgaaaccgttgtacctaccgcactggaactgcaacctagcacatctaccgacaggcctgttactagcgagcctacatcccaggcaactcgtggaaggaaaaatcgcagctccgtgaagacacccgaacctgtagtgcccaccgcaccagaactgcaaccatcgacaagtaccgatcagcccgtcaccagtgagccaacttaccaggcaacccgcggccgaaagaaccggagctccgttaagacgccggaaccggtggtgcccactgcgcctgagcttaggccctccacctctaccgaccgtcccgtcacccctaagcctacaagcagaacgaccagatcccggacgaatatgtctagcgtaaagaatcccgagtctaccgttcccatcgccccggaattgccaccttccaccagcacggagcagcctgtgaccccagagccaacaagtagggcaacacggggacggaagaacagatcctcaggtaagactcctgaaactctggtgcctaccgcccctaaactggagccgtctacctccacagaccagcctgtgacacccgagcccacaagtcaggccactcgcggccggaccaataggtcgtctgtgaaaacccccgagaccgttgtaccgactgctccagagctccagccttctacctccaccgaccagcctgtcacgcccgagccaaccagccaagccacaaggggcaggaccgatcggtcgtcagttaaaactccagagaccgtcgtccctactgcccctgaactgcaagcctccgcctctactgaccaacctgtgacgagcgaacccaccagtcgtaccactcggggcaggaaaaaccggtcttctgtgaagaccccagagacagtagttcccgccgcgcccgctctgcagccctccacctccacagaccagcccgtgacccctgagccaactagtcgagctacccggggccgtaccaaccgtagcagcgtgaaaactcccgagtcaatcgtgcctatcgcgccggaattacagcccagtacctcacgcaatcaattagtgacccccgaacccactagccgggccacaagatgtcggactaaccgctccagtgttaagacaccggaaccagtagtgcctacagcccctgagccccatccaaccacgtcaacggatcagccagtgacgcctaagctgacgtccagggccacaagaagaaagacaaacaggtcatcggtcaaaactccaaaaccagtcgaacccgcagcatcagatcttgaaccctttaccccaaccgaccagagcgtaactcccgaggccatcgcacagggtgggcagtctaaaacactccggagttctaccgttagagccatgcccgtccccaccacaccagagtttcagagtccagtcaccaccgatcagcctatttctccggagccaatcacccagccctcatgcattaagcgccaacgggctgcagggaatcccggcagcctggccgcccccatcgaccacaaaccatgctctgctcctctggagcctaagagccaggcctccagaaatcagaggtggggggctgtaagagccgcagagtcccttacagccattcctgagcctgcctcaccccagctcttagagaccccaattcatgcttcacaaatacagaaggtggaacctgctggcagatcccggttcacccccgagctgcaacctaaggcctcccaatcccgaaaaagaagtctcgcaacaatggactcacccccacatcaaaaacagcctcagagaggagaagtgagccagaagaccgtgatcatcaaagaagaggaagaagatactgcagaaaagcccggcaaggaggaggatgtcgtcacccccaagcctgggaagaggaaaagggaccaggctgaggaagagcccaaccgcattccctcccgaagtctcaggcggacgaagcttaatcaggaatctacagcccccaaggtcttgtttacgggggtggtggacgccagaggggaacgcgccgtgctcgctctcggcggcagccttgcgggatctgctgccgaagcctcacatcttgtcacagataggatacggcggacggtgaaattcttatgtgccttgggtagggggattcctatccttagtttggactggttgcatcagagcagaaaggctggtttctttctcccccccgacgagtacgtagtcaccgacccggagcaggagaagaatttcgggttttctttacaggacgccctgtctcgcgccagagaaaggaggctgctggaaggatatgagatttatgtgactcccggcgtccagccaccacctcctcagatgggagagatcatctcgtgttgcggtgggacttatctgccatccatgccccggtcatacaaacctcagagagttgtgatcacatgcccccaggacttcccccactgctcgatcccattacgcgtgggactccctctgctaagtcccgagttcctgctgaccggggtgctgaagcaagaggccaagccggaggccttcgtactgtctccgctagagatgagcagcacatag

SEQ ID NO: 123744 - DNA, 666 bp, synthetic construct
  misc_feature 1..666: note = Description of Artificial Sequence: Synthetic coding sequence
  source 1..666: mol_type = other DNA
atggaggatactcaggccatcgactgggacgttgaggaggaagaagagacagagcagtccagcgagagcctccggtgtaacgtggaaccagtaggccgtttacacatattctcgggggcccacggtccagagaaggacttcccattacacctaggtaagaacgttgttgggcggatgcccgactgctctgtagcgctgcccttcccgagtatcagcaaacagcatgctgaaatcgagatcctcgcctgggacaaagccccaatcctgcgtgactgcggatcacttaatgggacccaaattctctcttcttccctccccccgcctcagaccagcttactgcctctgagtctgcggctgagactgttgggagaagagcagatagatccgctctcaaggcttctgaaacaactttcaccccagcctctctcataccgcctgcctcctccccagacctcattatcaccactatccccacatctcggcccgctgggggaggagaaaatcgggccgctgtcaagacctttgaaacagttgtgtccgcagcctctgtcatccagcctgcccccaccccagactaatttgagccctctttctccccatctggggccactgggtgctgggcagataggcccacttagtaggccgttaaatcaactgagtctctag

SEQ ID NO: 123745 - DNA, 666 bp, synthetic construct
  misc_feature 1..666: note = Description of Artificial Sequence: Synthetic coding sequence
  source 1..666: mol_type = other DNA
atggaagacactcaggccatagactgggatgtggaagaagaggaagagactgagcagagcagtgaaagtctcaggtgtaatgtcgaaccagttggtagactgcacatattcagtggcgctcatggacctgagaaggactttccgctgcacctgggcaaaaatgtggtgggtcggatgcccgattgctcggttgccttgccctttcccagtatttctaagcagcatgccgaaatcgagatactggcatgggataaggccccaattctgagggattgcggcagtctgaacggtacacagattctgagctcctcgcttccccctccacagacatcattacttccactgtccctcaggctacgcttgctgggggaagagcagattgacccgctgtctcgtctgctcaaacagctgtctccacaacccctatcctataggttacctcctcctcagacttctctaagcccattaagcccccacttgggcccgctcggagaagagaagatcgggcctctatcacgtcccctgaaacagctttgtccacagcccctgagtagcagcttgccaccgccccagactaaccttagtcctctttctccccacctcggacctctgggtgccgggcaaatcggcccactttcccgccccctcaatcaactgtccttgtag

SEQ ID NO: 123746 - DNA, 738 bp, synthetic construct
  misc_feature 1..738: note = Description of Artificial Sequence: Synthetic coding sequence
  source 1..738: mol_type = other DNA
atggaggatacgcaggcaattgattgggatgtggaggaagaggaagaaacagagcagtcctccgaatctctaaggtgtaatgtggagccggtgggacgcctacatattttctctggcgctcatgggccggagaaagactttcctcttcacctgggcaagaacgtagttggcagaatgcctgattgttccgtggcgctgcctttcccatctatcagcaaacagcatgccgagatcgaaatcttagcttgggataaagctcctatcctcagggactgtggcagtcttaatggcacgcagattcttcgtcctcctaaagtcctttcaccaggcgtctcgcatagactccgtgaccaggagctgattctctttgcagacttgttgtgtcagtatcaccggttggatgtgtccctgccttttgtgagtcgcgggcccctgactgtcgaggagaccccaagggttcagggcgaaactcaaccgcaacgtctgctgctggcggaagatagtgaagaggaggtggatttcttgagcgagaggcgtatggtgaaaaaaagtcgcaccacaagtagcagtgtcattgtcccagaatccgatgaggaggggcattcgccggttctcggcgggctggggccaccattcgccttcaacttaaactcagacactgacgtcgaagagggccagcagcctgctactgaggaggccagtagcgccgcacggaggggagcaacagtcgaggcctag

SEQ ID NO: 123747 - DNA, 4968 bp, synthetic construct
  misc_feature 1..4968: note = Description of Artificial Sequence: Synthetic coding sequence
  source 1..4968: mol_type = other DNA
atgtaccatcgactggacgtatcattaccatttgtcagcaggggccccctcactgtggaggagactcctcgggtacagggcgagacacaacctcaacggctcttactggcggaggattccgaggaggaggtggatttcctttcagaacggaggatggtcaaaaaatccaggactacaagctctagtgtaatagtgcccgaatcagatgaggagggacactcgcccgtgttaggaggtttggggcctccatttgcgttcaatctgaactccgacactgatgtcgaagaaggccagcagcccgctacagaagaagcgagttcagctgctcggaggggagcaaccgttgaggccaagcaatcggaagcggaagtcgtgacggagattcaacttgaaaaggaccagccccttgtgaaggaaagagacaacgatactaaggtaaagcgtggcgcaggaaatggcgttgtgcccgctggggtaatattggagcgttctcagcctcctggagaagacagcgacacagacgtggatgatgacagtcgtccacccgggcgccccgccgaggtgcacctcgaaagagcacagccttttggcttcatagatagcgatacagatgctgaggaggagcgcattccagccactccggtggttataccaatgaagaagcgcaagattttccacggagtcggcacccgtggacccggggcccccggcctcgcccatctgcaggagtcacaggctggctctgataccgatgtggaggaaggaaaagccccccaggcagtccccctggagaagagccaggctagcatggtcattaatagtgataccgatgacgaagaggaagtctctgccgctctgacattggctcatctgaaggagtcacagcccgcgatctggaacagggacgccgaggaggatatgccccagcgagtagtccttctgcagagaagtcaaactaccactgaaagggacagcgataccgatgtcgaggaagaagagctaccagtcgagaatcgggaggctgttcttaaggaccatacaaagattcgggccctcgtgcgggcccattcagagaaggatcaacctccgttcggcgattcggatgactccgtggaggcagacaaaagcagtcctggaattcacctcgagaggtcacaagccagcaccactgttgatatcaatactcaagtggagaaagaggtgccgcccggctcagctataatccatatcaaaaaacatcaggtatcagtggaaggaactaatcagacagatgttaaggcggtgggtgggcctgctaagttacttgtggttagcctggaggaggcttggccactccacggcgattgcgaaacagatgcagaggagggcactagcttaacggcttctgtagtagccgacgtgagaaagagtcagttgccggcagaaggggatgccggagctgagtgggctgccgctgtcctgaagcaggagcgagcccacgaggtgggggcacagggcgggccacctgtcgcccaagtggaacaggacctgcccatttcacgggagaacctgactgatctggtcgtagacaccgatactctgggtgagagcactcagcctcagcgcgaaggggcccaggtgcctaccggcagagagcgagagcagcatgtgggaggtacgaaagattcagaagacaactatggcgatagtgaagacctggatcttcaagcaacgcaatgtttcctggaaaaccaggggctggaggtgcaatccatggaggacgagccaacacaggcgttcatgctgacgcccccgcaggagctcggcccaagtcattgtagctttcaaacgactgggttactcaactgcaagatgccccccgcagagaaagcatctcggatccgcgctgctgaaaaggtgtctcggggagaccaagaatctcccgacgcttgcctcccccccactgtccctgaagctcccgcgcccccgcagaaacccttaaactctcaaagccagaagcacttggcaccaccacctctactttcacccttactaccctcgattaaaccaaccgtccggaaaaccaggcaggatgggagtcaggaggcacctgaggcccccttgtcttccgaactggaacccttccaccccaagcccaaaattcgtaccagaaagtcatcgcggatgactcctttcccagctaccagtgctgcaccagagcctcaccctagtacgtcgaccgcgcaacctgtaacgcccaagccaacatcacaggctacacgatccagaaccaatagaagcagtgtgaagacacccgagcctgtcgtgccgactgcacccgagctgcaaccttcaacttccactgatcagcctgtcacctccgaacctacttctcaggtgacaaggggccggaagagccggagctctgttaagacacctgagacggtcgtccctactgcccttgaactgcagccctccacgtcaacagaccggccggtcacttcggagccgacctcccaagctaccagagggagaaagaaccgcagttccgtgaagaccccggagcctgtcgttcccactgcacccgagctgcaaccctcaacatcaacggaccagcccgtcacttctgaacctacctatcaggctaccagggggagaaagaacagatccagtgtcaaaactcccgagcctgtggtccccacagcccctgagttgaggccaagcacctccaccgaccggcctgtgacgcctaaacctacttccagaaccacgcgaagtcgtactaatatgtcttcagtgaagaaccctgagtccactgtgcctatcgcgcctgagcttccacctagcacgtccaccgagcagccagtgacgcccgaacctacctcaagggctacccgggggagaaaaaacaggtcgtccggcaaaactcccgagactttggtgccaacagcccccaaactggaaccgtccacctcaaccgatcagcctgtgacgcctgagcctacttctcaggccactcgcggccgaaccaatcgatctagcgtgaaaaccccagaaactgtagtgccgacagctcccgagctgcagccttctacttcaaccgaccagcccgttaccccagaacccacctcccaggcaacgcgcggacgaaccgataggtcatccgtgaaaactcctgagactgtggtccctaccgcacccgaactacaggcctctgcaagcaccgatcagcccgttacaagcgagcccacatctagaacgacacgggggcggaagaatcgctcttccgtgaagacgccggagaccgtggtacccgccgctccagagctacagccctccacatcgacagaccagcccgtcacaccggaaccgacctcccgagctacccgcggcagaacgaaccggagctccgttaaaactcctgaaagcattgtccctatcgctccggaactacagccatcaacgtcccgcaaccagctggtgacgcctgaacctacctcacgcgccactcgttgccgaacaaatcgctcctcagttaaaactcctgaaccagtggtgcccaccgcccccgagccacaccccactacaagcacagatcaaccagttactcccaagctcacttccagagccaccagacggaaaaccaaccgctcctctgtgaagaccccgaaaccggtcgaaccagccgcatctgatctggaaccatttacacccacagaccagagtgtgacaccagaggcaatcgctcaaggcggccaatctaagaccttgcggtcctcaaccgtccgcgccatgccagtaccaacaacacccgaattccagtctcccgtgaccaccgatcagcccatcagccccgagcccatcacacaaccgtcatgcatcaagaggcaaagagctgccggaaatcctggtagcttagctgcccccatcgaccataaaccttgctctgcgccgttggaaccaaagtctcaggcctcaagaaatcagcggtggggggccgttcgggcagccgaatctttgaccgctataccagagcccgcctccccgcagctgttggaaacgccaatacatgctagtcagatacagaaggtggagcccgctggacggtccagatttacccccgagttgcaacccaaggcttctcagtcccggaaacgtagtcttgcaaccatggatagccctccccatcagaaacagccgcaaaggggtgaagtcagccagaagaccgtaattattaaggaagaagaggaagatactgccgagaagcctggcaaagaagaggacgttgttactccaaagcctggtaaacgcaagcgcgaccaggccgaggaggaaccaaaccggatcccatctcggtcactccgaagaacgaagctcaaccaagagtccaccgccccgaaagttttgtttaccggtgtggtagatgcaaggggagaacgcgccgtgctggctcttggcgggtctctggccggcagtgctgcagaagcatcacatttggttacagacaggattagacggacagttaaatttctgtgtgccctcggacggggaatcccaatcttgtcgctcgattggctgcaccagtccaggaaagctggcttttttctgccaccagacgagtacgtggtcaccgacccagagcaagaaaagaattttggattctccctgcaggacgccctctcccgtgctcgggaaagacggctgttggagggatacgagatctatgttacccctggtgtgcagccaccgcctcctcagatgggtgaaatcatctcatgttgcggcggcacttatctgccctccatgccccgatcatataaaccacagagggttgtcatcacctgtcctcaggacttcccacactgctccattccactgagggtgggcttgcctctgcttagcccagagtttcttcttaccggagtcctgaaacaggaagccaagccggaggcattcgtgctctcccccctcgagatgtcctcaacttag

SEQ ID NO: 123748 - DNA, 5478 bp, synthetic construct
  misc_feature 1..5478: note = Description of Artificial Sequence: Synthetic coding sequence
  source 1..5478: mol_type = other DNA
atggaagacacacaggcaatcgactgggatgtcgaggaggaagaagagaccgagcagtcaagtgaaagcctgcggtgtaacgtggagccggttggccggctccacattttctctggcgcccacgggcccgaaaaagatttcccactccacctcggcaaaaatgtggtcggcagaatgcctgattgttcagtagcccttccctttccaagtatctcaaagcagcacgctgagattgagatcctcgcatgggataaggctccaattctcagggactgcggttccctcaacggaacccagattctccggccccccaaggttctctcccctggtgtctcccataggctaagggatcaggaacttatcctattcgctgatctactctgtcaatatcaccggctggacgtcagtctccccttcgtatccagaggacccctaacagtcgaggagacccctcgcgtgcaaggtgaaacccagcctcaacgcctattgcttgctgaggatagcgaagaagaggtggacttcctttccgagcggcggatggttaagaaaagtcgcaccacatcctcttccgttattgtgcctgagtccgatgaggaaggccattctccagtcctgggcggcctggggccacctttcgctttcaacctcaatagcgatactgacgtggaggagggacagcaacctgctaccgaagaggccagctccgccgcacgcaggggtgctaccgtggaggctaagcagtcagaggccgaagtggtgactgaaattcagctggaaaaggaccagccactcgtgaaagaacgtgacaacgataccaaggtcaagcgcggggccggcaatggcgtcgttcctgctggggttatccttgagagaagccagccccccggggaggactccgataccgatgtagacgacgacagtcggcctccaggacgacccgcagaggtgcatttggaacgggcccaaccctttgggtttattgactctgacacagatgctgaagaagaaaggatcccagccacacctgttgtgattccaatgaaaaaacgaaaaatctttcatggcgtgggtaccaggggtccaggcgcaccgggcttggcccacttgcaggagagccaggcgggaagtgacacagacgtggaggaaggcaaagccccgcaagccgtcccgctggagaagagtcaggcttccatggtgatcaatagtgacactgatgacgaagaagaagtgtccgccgctctcactttggcccatttgaaggagtctcagcctgcaatttggaatagagatgctgaagaagatatgccccaacgtgtcgtcctgctgcaaagatcacagacaactaccgaaagagactccgatacagatgttgaggaagaggagctacccgtggagaatagggaggctgtgctgaaggaccataccaagatccgggcgctggtccgcgcccactcagagaaagatcagcctccgtttggcgactctgatgactcagttgaggccgataagtcctcccccgggatccacctggagagatcgcaggcttccacaactgttgatattaatacacaggttgagaaagaggtgccccccggttcagctatcatacacatcaaaaagcaccaggtttctgtggagggaaccaaccaaacggatgtgaaagccgtagggggccctgcaaaactcttagtggtctcccttgaggaagcttggccactccacggggactgcgagacagacgccgaagaaggtacttccctgacagcctccgtggtagcggatgttaggaagtctcagctccccgcagagggagacgcaggcgcggagtgggcggctgcagtcctgaaacaagagcgagcgcatgaagtcggagctcaaggcggcccgcccgtcgcgcaagtggaacaggacctgcctatttcgagggagaatttaacagatcttgtggtggatactgacaccctgggagagtctacacagccccagcgggagggcgcccaggtcccaaccggccgagagagagaacagcatgtgggtggaactaaggattccgaagacaactacggggacagcgaagacttggatcttcaggctacacagtgtttcctagagaatcaggggcttgaggccgtccagtctatggaagacgaacctacacaggcctttatgttgactccaccacaggaactgggcccgagccactgcagtttccaaaccacagggctgctcaattgtaagatgccccccgcggagaaagccagccggataagggctgcagaaaaagtatcacggggcgatcaggagagccccgatgcctgtcttccccctactgtgccagaagctccagcgccccctcagaagccactgaactctcagtcccaaaaacacctcgcccctcctccgctcttatcgcccctgctccctagcatcaagcccacagtacggaaaactcggcaggatgggtcccaggaagcccccgaggccccattatcttccgagctggaacctttccaccctaaaccaaagatcaggacaaggaagtcaagtcggatgacccccttccccgccactagcgctgccccagagccgcacccttccacctccacggctcagccagtcaccccgaaacccactagtcaggccacccgatcaagaacgaacagaagtagtgtcaaaacacccgaaccagtagtcccaaccgccccagaattgcagccttcaacgtcaaccgaccaacccgtgacaagcgaacccacatcacaggtaacaagggggaggaagtctagaagcagcgtgaagaccccagagacggttgtccccactgcgctggaactccagccatctacgagcactgacaggcccgtcacatctgagcccactagccaggctacacggggtcggaaaaataggtctagtgtcaaaaccccagagcctgttgtacccacagctccagaactgcaaccttccactagcactgatcagcccgtgacaagcgagcccacctatcaggctacgcggggccgaaaaaatcgcagctcagtgaaaaccccagagccggtggtgcccaccgcccccgagctgaggccaagcacatctactgaccggcccgtgacacccaagccgacatcccggacaacgcggtcacggacaaatatgagttcagtgaagactcccgagactgtcgtgcccacagctccagagttgcagatctctactagtactgatcagccagttacccctaagcctacctcacggacgactcggtcacgaaccaacatgagcagcgtgaaaaaccctgaatccactgtcccgatcgcccccgagctgccaccgtctacctccaccgagcagccggtgacccccgaacctacttcgcgagcgacacgcgggaggaaaaaccggtctagcggcaagacccctgagaccctcgttcctaccgctccaaagctcgaaccctcaactagcactgaccaaccggtaacccccgagcctacgtcccaggcaacaaggggaagaacgaaccgttcctcagtgaagacacctgagacggtggtcccgacagctcctgaacttcagccatctacatcaacggatcaaccagtaacacccgaacccacatcgcaggcgacaagaggccgaacagataggagcagcgtgaagacacctgagacagtagtacccactgcccccgaactacaagcttccgcatctaccgatcagccggtgacaagcgagcctacaagtcgtaccacaagaggacgtaaaaatagatcaagcgtgaagacgccagaaactgtcgttccagctgctcctgaactgcagccctcaacgtccacagaccagcccgttacgcccgaacccacatctcgggcaacacggggtaggacgaatcgcagctcggtgaagacccctgagtctatcgtgcccatcgcaccagaattacaaccttccacttctcggaatcagctggtgaccccggagccgacttcccgggccaccaggtgtcgcacaaataggtcaagcgtcaaaactcccgagccggtggtgcctacagcgcccgagcctcacccgactacatcaaccgatcagccagtcacccccaagctgacgtcgagggccaccagacgaaagactaatagatcctccgtcaagacaccaaaaccagtcgaacctgccgcctcggatttagagcccttcaccccgactgatcagtcagtgactccagaagcaattgcacagggaggtcagagcaagacactgcgaagtagtaccgtgcgagcgatgccagtgcctacaacacccgagttccagtctcctgttactactgatcagcctatcagccccgagccaattactcagccatcctgcataaagagacagcgggcggctggcaatccaggttctctggcggctccgatcgaccataagccatgctcagcgccactcgaaccaaagtctcaggcctcaagaaatcaaagatggggggccgtccgagccgctgagagcctgactgctatacccgaaccggctagcccccagctactggagacaccaatccacgccagtcagatacagaaggtcgagccagcggggagatcaagattcacaccagaacttcagcccaaggctagtcagtcacgcaaacgcagcttagcgacaatggactcgccgccacaccagaagcagccccaaaggggagaagtgagtcagaagactgtaatcatcaaagaggaagaggaggatacagccgaaaaaccaggcaaggaggaggatgttgtcaccccaaagccaggcaaaaggaaaagagaccaagcagaagaagaacctaaccggatcccttctcgatcactgcggcgcacaaagcttaatcaagaaagtactgcccctaaagtgctattcaccggggttgtggacgctcggggtgaaagagccgtcctcgctttgggcggttcactggcaggaagcgccgctgaagcctcccacctagtgacggatcggatacgaagaaccgtgaagttcctgtgcgcactgggaaggggcatcccaatactttccctcgattggttgcaccaatcccgcaaggccgggttttttctgcctcccgacgaatacgtcgtcactgatccagagcaggagaaaaattttggattttcattgcaagacgctcttagtcgagctagggagagaaggctcctagaaggttatgagatctacgtcacccccggagtccaacccccaccaccgcaaatgggggaaatcatctcctgttgtggtgggacgtacctcccatcaatgccccggagttacaagccacagcgggtggtgattacgtgcccgcaggatttcccacactgctccatcccgttgagggttggcctgcctctactgtcccccgagttccttttaaccggagtgctcaaacaggaggccaaacctgaggctttcgtgttgtcgccactggagatgtccagcacttag

SEQ ID NO: 123749 - DNA, 4968 bp, synthetic construct
  misc_feature 1..4968: note = Description of Artificial Sequence: Synthetic coding sequence
  source 1..4968: mol_type = other DNA
atgtatcataggcttgacgtcagcctcccctttgtttcccgcgggcccttgactgtggaagagaccccccgcgtgcagggagagacccagccccagcgccttctgttagctgaggactccgaggaagaagtcgatttcctgagtgaaagacggatggtaaaaaaaagccggacaactagcagcagtgtgattgtaccggaatcagacgaggaaggtcactctccggttctcggcggcctgggccccccttttgcctttaacctgaactccgatactgacgtggaggaaggccagcagcctgccaccgaagaggcgtcttctgctgcccgacgcggcgctaccgtcgaagctaagcagagcgaagctgaagttgtgaccgaaattcagttggagaaggatcagcctctggtaaaggaacgcgacaacgacaccaaggtgaaacgcggcgccggaaacggcgtcgttcccgcaggagtgattcttgagcgcagccagccccctggagaggactcagacacggatgttgacgacgatagcaggccacccggccgtcctgcagaggtgcacctcgaacgggcccagccattcgggtttatcgacagtgacacagacgccgaggaagagcggatcccagctacgccagtggtgatccccatgaagaagcgtaaaatattccacggtgtcggcaccaggggcccgggcgcccctggacttgcacatctacaggagagccaagcgggctctgacactgacgtggaagagggtaaagcgcctcaggccgtgcctttagaaaagtcgcaagcaagtatggtcattaattctgatacagatgacgaagaggaggtgtcagccgccctgactttggcccaccttaaagagtcacagccagctatatggaacagagatgccgaagaagatatgccccagcgagtggtcttgttacagcggtctcagaccacgactgaaagagattccgacacagacgtcgaggaggaagagctgccggtagagaaccgggaggcagttctgaaggatcacaccaaaatacgcgccttggtgagagcacacagcgaaaaggatcagcccccatttggcgactcggatgactcagtcgaggctgacaagagctcacccggcattcacctggagaggagtcaagccagcacgaccgtcgatatcaatacacaggtggaaaaggaggtgcctccagggtccgcgatcattcacatcaagaagcatcaggtaagcgtcgaaggcactaaccagacggacgtgaaggctgttggcggccctgccaagctattagtggtgtcacttgaagaagcttggccactgcatggcgattgtgagacagacgccgaggaaggcacttctctgacagccagcgtcgtggccgacgtccgcaagagccagctgccagcagagggagatgccggtgccgaatgggctgctgcagtactgaagcaggaacgcgcccacgaggtgggggcacaggggggacctcccgtcgctcaggtagagcaggatcttccgatctcccgcgaaaatctcaccgacctggttgtcgacactgacactctcggcgagagcacccaaccacaacgagaaggagcccaagtgcccactggaagagagagggagcagcatgtggggggtaccaaggactctgaagataattatggcgattcggaggatctggatctgcaggcaacccaatgcttcctggagaatcagggtctggaggtgcagtcgatggaagacgagccgactcaggccttcatgttaactccccctcaggaacttgggccctcccattgctccttccaaactacgggcctcttgaactgcaaaatgccgccggccgagaaggcatcaaggattcgagctgccgagaaagtttcccggggcgaccaggagtcacctgacgcctgcctgcctcctacagtccccgaagctccggcgccccctcagaagcccttaaacagccagtctcagaaacacctggctcccccccccttgctaagtccactcctcccttcaataaagcctacagtcaggaaaacgaggcaagacggatcacaggaagcaccagaagcgccactctctagcgaactggagccatttcatccaaaacctaagatccgtactcgcaagtcctcgaggatgacacctttccccgcgacttccgccgcgccggagcctcacccgagcacatcaacagcccaaccggtgacccccaagccgacttcacaggctactagaagcagaaccaatagaagttccgtgaagaccccggaaccagtggtccctacagcgccagagctccagccttccacctctaccgatcagccagtgacctccgagcccaccagccaggttactcggggtcgcaaatctcggtccagcgttaagacaccagaaaccgtagtcccaacagctctcgaacttcagccctccacctctacggataggccagtgaccagtgagccgacttcccaggccactaggggcagaaaaaatcggtccagtgtaaaaacaccagagcctgtggtgcccaccgcacctgagctgcagccgagtacttcaactgatcaacctgtgacttctgagcctacctatcaggcaactagaggtaggaagaacaggtcttctgtgaaaacaccggagcccgtggtacctactgctcccgaactgagaccttccaccagtactgatcgccccgtgactccaaagccaacttcccggaccacacggtctaggaccaatatgtccagcgtgaaaaatccggagtccactgtgccgattgctccggaattgcctccaagcactagcaccgagcagccagtgacaccggagcccactagccgggctactagaggaagaaagaacagaagtagtggcaagacccccgagacccttgtgccaacagctccgaagctggagccgagcaccagtacagatcagcctgtaacccccgagcctaccagccaggccacccgcggccggaccaacagaagtagcgtgaaaacccccgaaacagtggttcccactgctccagaactccagccaagcacatcaacagaccagccagtgactccagaacccacgagccaggccactcggggccggacagataggagcagcgtaaagactcccgagactgtcgtgcccacagcgcctgaactgcaggcatctgcgagtacggaccagcctgtgacttccgagccaacgtctcggaccacacggggccgcaaaaatcgttccagtgtcaaaacccctgaaactgttgtcccagccgcccccgaactgcagccatcgactagcactgaccagcccgtgacaccggaacctacttccagggccacccggggtcgcacaaatagaagctctgttaaaacacctgaatccattgtgccaattgcaccggagttacagccatccacctcgcgtaaccagctggtgacgccagaaccaaccagcagagccacccgatgcagaacaaatcgatcatctgtgaaaacacctgaacccgttgtgccaactgcacccgaaccacacccaactacctctacggaccagccagttacgcccaaactgacctcccgggcgaccagaaggaaaacaaacagaagtagcgtgaaaactccaaagcctgttgagccagccgcctccgatctggagcctttcacacctactgaccagtcagtgactcctgaggccattgcccagggcggccagtcaaaaaccctgcgctcatccacagtaagggctatgcctgtgcctaccactcccgagttccagtcccccgttactaccgaccagccaatatcacctgaacccattacccagccctcatgcatcaaaagacagcgcgcagctggcaatcctggctctttggccgcccctatcgaccataaaccctgttccgcgcctctcgaaccaaaatctcaggcaagtaggaatcaacggtggggagcagtccgcgctgcagagtcgcttacagcgatccccgagcctgccagtcctcaacttctggaaacccccatacacgctagtcaaatccaaaaagttgagcccgccggtagaagccgattcactcctgagctgcagcctaaagcctcccagtctcgcaaaagatctcttgctactatggacagtcccccccaccaaaagcagcctcagcggggcgaggtgagccaaaagaccgtgattatcaaagaggaagaagaagacactgctgagaaacctggtaaggaggaggacgtcgtcactccgaagccgggcaaaaggaaaagggaccaggccgaggaggaacccaacaggataccatcacgaagtcttcgccgcactaagctcaatcaggagagcactgcacccaaagtgctcttcactggcgttgtggatgctcgaggcgaaagagccgttttggctcttggcggctccctagcaggctcagctgctgaggcatctcacctggtaaccgatcggatccgtcggaccgtgaagtttctgtgcgcattgggtcggggcatcccaattctgtccctggactggctccatcagagtcgcaaggcgggcttttttctgccgcccgatgagtacgtagtcactgacccagagcaagagaagaactttggtttttctctgcaggatgcactgtctcgggccagagaaagacgcttactagagggttacgagatatacgtgacacccggagttcagccacctccccctcagatgggcgaaatcatctcatgctgcgggggtacctatttgccaagcatgccacgttcttacaagccacagagggttgtaatcacctgtccgcaggactttcctcactgctctattcctctcagggtgggtctgccactgctcagcccagagttcttgctcacaggggtcctcaagcaagaagcaaagcctgaagccttcgtcctaagtccactggaaatgtctagcacttag

SEQ ID NO: 123750 - DNA, 4968 bp, synthetic construct
  misc_feature 1..4968: note = Description of Artificial Sequence: Synthetic coding sequence
  source 1..4968: mol_type = other DNA
atgtatcacagactggacgtgagcctcccatttgtcagtcgagggccattgacagtggaggagacacctcgcgttcagggtgagacacagcctcagcgcctgttactcgctgaagacagcgaagaagaagtggacttcttgtcagaaaggaggatggtaaagaagagccgcaccacgtcatctagtgtaatcgtcccggagtccgatgaggagggacactcccctgttctgggcggtctaggaccccccttcgcttttaaccttaattccgataccgacgtggaggaaggccagcagccagctacagaagaagcttcctcggcagcccggcggggagcaaccgttgaagcaaaacaaagcgaagctgaggtggtcactgaaatccagttagagaaagaccagccgctcgtcaaagagagagacaatgacacaaaagtcaagcggggggctggtaatggggtagttcccgctggcgtcatcctggagaggtcacagccaccaggcgaggatagcgatacagacgttgatgatgactccaggccccctggaaggcccgcggaagtccaccttgagcgcgcccagccctttggcttcatcgatagtgacacggacgctgaagaggagcgcatacctgctaccccggttgtgatccccatgaagaaacgcaagatcttccacggggtgggcacacgcggcccaggagcccccggattagcacaccttcaggaaagccaggctggcagcgataccgatgttgaggaaggtaaggccccacaagcagttccgctcgagaagtcacaggcctctatggtgataaacagcgataccgacgatgaggaagaggtaagcgctgcacttacactcgcgcacctgaaggaatcccagcctgcaatctggaatagggatgcggaggaggatatgcctcaacgagtggtcttactacagagatctcagaccacaactgagcgggattccgacacagatgtggaagaagaggaactacccgtggaaaacagggaggcagtgctaaaagaccatacaaagataagggccctcgtgcgcgctcatagtgaaaaggatcaacccccatttggagattctgacgattctgttgaggctgataagagcagccccggaatccacctggagagatcccaggcctccacaacagtggatataaacacacaggtcgagaaggaagtccccccaggaagtgcaatcatccacattaaaaagcatcaggtctctgtggagggcaccaatcagactgacgtaaaggcagtcggagggccggctaagctgctggtcgtgagcctggaagaggcttggccgctgcacggggattgcgagactgacgccgaggaaggtacctccctgaccgcaagcgtcgtcgctgacgtgaggaagtcccaactgccagctgaaggggatgctggcgcggaatgggccgccgccgtgcttaaacaggaacgtgctcatgaggttggggcacagggcggtcctcctgtggcacaggttgagcaagacctgccaatttccagggagaatctgacagacctcgtggtcgacacagataccctgggtgagtcaacacaaccccaaagagagggggcacaagtgccgacaggccgggagcgagagcagcacgtcggcggaaccaaagactcagaggataactatggtgattcggaagacctggatctccaggctactcaatgttttctcgaaaaccaggggctggaggtccagagcatggaggatgagcccacacaagccttcatgctgactcctccccaggagctcgggccgtcgcattgctcctttcagaccactgggctcctaaattgtaagatgccaccagcagagaaagcgagcagaatacgtgcagctgagaaggtgagccggggtgaccaagaatctcccgacgcatgcctgccccccaccgtaccggaggctccagcgccaccacagaaaccgctcaatagtcagtcgcagaagcatttggcccctccccccttactaagcccacttttacctagcatcaaaccgactgtgcggaagacgagacaggatggatcacaagaggcacccgaagctccgctctcgtcagagctggagccgtttcacccgaaaccaaagatccgtacccggaagagttcaaggatgaccccatttccggccacaagcgctgcgcccgagccacacccctccacctctactgcccagcctgttacacctaagcccacctcccaggcaaccagatcccggaccaacaggagtagcgtgaaaaccccagaaccagtggtcccaacagcacccgaactccagccatcaacatcaacagatcagccagttaccagcgagcccacgtcccaggtgacccggggccggaaatccagatccagtgtcaagactcctgaaaccgtggtgccaaccgccttagaactgcagccctccacatccaccgaccgccctgttacatccgaaccgacaagtcaggccacacgcggacggaagaatcgttcatccgtgaaaacacccgagcccgtcgtgcctaccgctccggagttacaaccgtcaacatctacagatcagccggtcactagtgaacccacttaccaggccacccgcggaagaaaaaaccggtcctcggtgaaaacccccgagcccgttgtaccaacagcccccgaacttcggcctagtacgtccacagatcggccagtaacacccaagcccacttctcggactactaggtctaggaccaatatgagttcagtgaagaaccctgaatctacagtgccaatcgcacctgaactcccacctagcacatccaccgagcagcctgtaacacctgaaccaactagtcgcgccacacgtggaagaaagaacaggagttcgggtaaaactccagagactctagtgccaaccgccccaaagctggagccctccacatccacagaccagcctgtgacccctgagcctacatcgcaggccaccagagggagaacaaacagaagcagtgttaaaacacctgagactgtcgtcccgactgcccccgagctgcagccctcaaccagcaccgatcagccagttacccctgaaccaacctctcaggcaacgagagggcgaactgaccgatctagtgtgaagacacctgagaccgtggtgccaaccgcaccagaacttcaagccagcgcctcaacggaccaacctgttaccagcgagcccacatcaagaaccaccagaggtcggaaaaatagaagttcagttaaaaccccggagactgtcgttccggctgcacctgaattacagccatccacttccaccgaccagcccgttacccccgaacctacaagtagagcgacgaggggacgcaccaacaggagcagtgtaaagactccagagagtattgttccgattgccccagaattgcagcctagtacttctcgtaaccagctggtgaccccagaacccacctcccgagccacacgctgtcgcactaaccggtcctccgtaaagacccctgagccggtggtgcctacagcccccgaacctcatccaactacatccaccgatcagcctgtaacccccaaacttaccagccgagccacaagaaggaaaaccaaccgcagctcagttaagacccccaagcctgtggagccagcagcctccgacctggagcctttcacaccgaccgatcaaagcgtgacccctgaagccatcgcccaggggggccagtctaagacactcaggtcttctaccgtgcgggccatgcccgttcctacgactcccgagtttcagagtcctgtaacgaccgaccaaccaatcagcccagagccaatcactcagcccagttgtattaagaggcagagggccgctggtaatccaggcagtctggctgccccaattgaccataagccttgttcggccccactcgagcctaaatcacaggcatcaaggaaccagaggtggggtgcggtgcgggcagctgagtcactcactgccatcccagagccagcctctccacagcttcttgaaacacctatccatgcctcccaaattcagaaagtggaaccagcaggcaggtcaaggttcacaccagagctgcagcccaaggcctcccagtcacggaaacggagtcttgccaccatggattctcctccccatcagaagcaacctcagcgaggggaagtgtctcagaaaacggtgataattaaggaagaggaggaagacactgcagagaagccaggaaaggaagaggacgttgtcacccctaagcccggcaagcgtaaacgggaccaggccgaggaggaaccaaatagaattcctagccggagtctcaggcggactaaactaaaccaggagtcaacagctcctaaggtactattcaccggcgtagtggacgcacgaggcgagcgtgccgttttagccttgggcgggtcccttgctggctccgcagccgaggctagccatctggttactgacaggattagaaggacagtcaagttcttatgcgccttggggcgcggcattcccattctaagtctggactggttgcaccagagccgtaaggccggattcttcctgcccccggacgagtacgtggtcaccgacccagagcaagaaaagaactttggtttcagcctgcaggatgccttgtccagagcacgtgagagaaggctccttgaaggatatgagatatacgtgacccccggggtgcagccccctccgccccagatgggagaaataattagttgctgtggagggacatatctgcctagcatgccccgaagctacaagcctcagcgtgtcgttattacctgccctcaggatttccctcactgctcaattcccctcagggtcggactgcctctcctgtcccccgagtttctcctgacaggcgtgctgaagcaggaggccaaacctgaggcattcgtcctgtcgccgctggagatgagctctacatag

SEQ ID NO: 123751 - DNA, 735 bp, synthetic construct
  misc_feature 1..735: note = Description of Artificial Sequence: Synthetic coding sequence
  source 1..735: mol_type = other DNA
atggaagacactcaggccattgattgggacgtggaggaagaagaagaaacggaacaatcttcagaatctctaagatgtaatgtcgaaccagttggtaggctccacatcttctcgggcgctcatgggccggagaaagattttccccttcatctgggcaagaacgttgtcggcagaatgccagactgctccgtcgccctaccatttccctctatatctaaacagcatgccgaaatcgaaatcctagcatgggataaagcacccatcctgagggactgcggctctctgaacggaactcaaattttgcgacccccaaaggttctgtctccgggcgtaagccaccgactgagggaccaagaactgattctcttcgccgacctcctgtgccaataccatcggttggacgtctcgctgcccttcgtgtcacgaggccctctcacagtggaggaaaccccgagggtccagggcgagacccagccacagcgactcctcttggctgaggattcagaggaggaagtcgatttcttatcagagcgtagaatggtaaagaagtctcgcaccacctcttcttctgtcatcgtgccggaatcagacgaggaagggcatagcccagtacttggtggcctgggccccccctttgcattcaatctcaatagcgacactgatgtcgaggaggggcagcagccacaccgcggcggcctgctttcatgccagaagagatgccactgcagggggtag

SEQ ID NO: 123752 - DNA, 5409 bp, synthetic construct
  misc_feature 1..5409: note = Description of Artificial Sequence: Synthetic coding sequence
  source 1..5409: mol_type = other DNA
atggaagatacacaagccatcgactgggacgtcgaggaagaagaagagacagagcagtcctcggagagtttgaggtgtaatgtggagccagtgggaagactgcatatatttagcggcgcccacgggcctgagaaagactttcctctgcacctcggaaagaacgttgtgggtcggatgcccgattgctccgtggcactgcccttcccatctatttcgaagcagcacgccgagatcgagatcctggcttgggacaaagccccaatacttcgcgactgcggtagtctgaatggaacccaaattcttcgtcctcctaaggtgctctcacctggtgtgagccataggctgcgtgatcaggaactgatcctgttcgcggatctgctttgccaatatcatcggctcgatgtttctttgccttttgtgagcagaggccctctcacagtcgaggagacaccaagggtgcagggtgagactcagccccagcgtctgctcctagcagaggactctgaagaggaggtggatttcctatctgagcggaggatggtgaagaagtctcggaccacttcttcatccgtgattgttccagagtctgatgaggagggccactcgcccgtgttggggggtctcggccctcctttcgcctttaatctgaactccgacaccgacgtggaggagggacagcaacctgctaccgaagaggcatcttctgccgcacggcgtggggccacggtcgaggccaaacagagcgaagcagaagtagttaccgaaattcaactggagaaggaccagcccctggtgaaagagagggacaatgacacaaaagtaaaacgcggcgcaggcaacggcgtggtgccagcaggagtgattctagaacggagccaaccacctggggaggattctgatacggacgtcgatgatgactctcgtcctcctggccgcccagccgaagtccacttggaacgggcccaaccttttggcttcatcgactcggacactgatgccgaagaagaaagaatccctgcgactccagtcgtcatccctatgaaaaagcgtaaaattttccatggtgtcggtactagaggtccaggcgcgcccggactagcacacctgcaggaaagtcaggcaggcagcgatacagatgtggaagaagggaaggccccgcaggccgtgcctctggagaagagtcaggccagcatggttattaattccgacacggatgatgaggaggaggtcagcgccgcacttactctcgcacatcttaaggagagtcagccggccatctggaatagggatgctgaagaggacatgccacagagagtggtcctgttacaacggtctcaaacgactacagagcgggattcagacacagatgtggaagaggaagaactgcctgtggaaaatagagaggctgttctcaaggatcatactaaaattcgggccctcgtgcgcgctcactcagagaaagaccagcccccttttggagattcagacgactctgttgaggcagacaagtcaagtcctgggatccaccttgaaaggtctcaggccagtacaactgtggacataaacacccaagtggagaaagaagtgcctccaggaagtgccatcatacatattaaaaaacaccaggtgtccgtggagggcaccaaccagaccgacgtgaaagcagtaggaggtcctgcaaaactgctggtggtcagtctggaggaagcgtggccactccatggcgattgtgaaaccgacgcagaagagggtacatccctcacagcctcggttgtcgctgatgtccgcaagtctcagctccctgctgaaggtgacgcaggcgcggaatgggctgctgctgttctgaagcaggaacgcgcccacgaggtgggggcacagggggggccccctgttgcacaggtcgaacaggacctgcctatttctcgggagaacctgaccgacctagtggttgacaccgataccctgggggagtccactcagcctcaaagagaaggtgcccaggtgcctactggtagagagcgggagcagcacgtcggaggcactaaagactccgaggataactacggcgactcagaagatttagacttgcaagcaacacagtgctttctggaaaaccaaggccttgaggccgtacagagcatggaggacgaacctacacaagcattcatgctgacacctccccaagaactgggaccaagccactgcagtttccaaacaactggaacactggacgagccctgggaggtactggcgactcaacccttctgcctacgggaatccgaagactcagaaacacagccctttgacacacacttagaagcctacggtccatgtctgtctcccccacgcgcgataccaggtgatcagcaccctgagtcccccgtccacacagaacccatggggatccaaggtcgtgggcggcagaccgtggacaaggtgatgggaatcccaaaggagacagcagagcgggttgggcccgagcgaggtcccctggaaagggaaacggaaaagctccttcccgagcggcagaccgacgtcacaggcgaggaggaacttacaaagggaaagcaggaccgtgaacagaagcaactactcgctagagatacacagagacaggagtctgacaagaatggcgaatcagcttcccctgagagagaccgcgagtcactcaaggtggagatcgagactagcgaggagatccaagagaagcaggtacaaaaacaaaccctgccgtctaaggcgttcgaaagggaggtcgaacgaccagtggcaaaccgggagtgcgatcccgccgagttggaggagaaggtgcccaaggtcatcctggaacgagatactcagcgcggggagcctgaggggggatcccaagaccaaaagggtcaggccagcagccccaccccagaacctggcgtgggggccggggatctgccaggccccacttccgcaccggtgccatcaggcagccaaagcggcgggcgcgggtcaccagtatctcctcgtcggcaccagaaggggttactaaactgtaagatgccacctgcagagaaagccagcaggattcgcgccgcagagaaggtttcgaggggagatcaagagtcgccagacgcgtgtctgccccctaccgtgcccgaagcaccagcccctccgcagaagcctctgaactcccagtcgcaaaaacacttagcacccccacctttgctgtcaccactgctgccctcaattaaacccactgtaagaaaaacgcggcaggatggatctcaagaggcacccgaggcaccgctgtcatcagagcttgaaccgttccatcctaagcctaaaatcaggaccaggaagagctctagaatgactcccttccctgccacgagcgctgcgccaaagctcgagccgtccacaagtacggatcagcctgtcacaccagagcctacgtcacaggcgacccggggcagaacaaatagatccagcgtcaagacccctgaaacggtggtgcctactgcccccgagctccagcccagcacttcgacagaccaaccagtaactccggagccgacaagccaggccaccaggggaagaaccgatagatcttcagtgaaaacccccgaaacagtcgtacccacagctccagagctgcaggccagcgcatctacggatcagcctgtgactagtgaacctactagccgcacgacaaggggcagaaagaataggtcttccgttaaaaccccagagaccgtggtgcctgccgctcctgagttacaaccgagcacatcgaccgaccaaccggtgacccccgaacctacgtcccgcgccacccgcggcaggacgaaccggtcctccgtgaagactcctgaaagcatcgttccaatcgccccagaactgcagccgtctaccagcaggaaccagttggtgaccccagaacccactagtagggcgaccaggtgccgcacaaacaggtcgtccgtcaagactcccgagcctgtggtcccaactgcacccgagccccatcctacgactagcaccgaccagccagttacaccaaaactgacatccagggctacaaggcgcaagaccaacaggtcttcagtgaagacaccaaagccagtggaacccgctgccagcgacctggaaccctttacgcccactgaccagagcgtgactcccgaagccatagcccagggcggccagtccaagacccttcgctcctccaccgtgcgggctatgccggtgcctactactcccgaattccagtctcctgtaactaccgatcaacccatctctccggagcccatcactcagccatcatgtatcaagcgtcagagagctgccggaaacccggggtcactggcagctcccatagaccacaaaccttgtagtgccccactggagccaaaaagccaggcctccagaaaccagaggtggggtgcagtgcgcgccgccgaaagcctcacagctatcccagagcccgcaagcccacagctcctcgagacacccatacacgcttctcagatccagaaggtcgaacctgccggccgatctcgttttacgccagaactgcagcccaaggcctcccaatctcgtaagcgttcgctcgcaaccatggacagccctccacatcagaaacagccgcaacgcggcgaggtttctcaaaaaactgttataataaaagaggaagaagaagatacagccgagaaacctgggaaagaagaagatgtcgtgaccccaaagccgggcaagcggaaaagggatcaggccgaggaggagccgaacagaattccatccaggagcctccgcagaaccaagcttaaccaggagagcacagccccaaaggtgctgtttacaggggtggtcgatgctcgcggagagcgcgccgtgctggcactggggggatccctagccggttctgccgctgaagcaagccacctagtgacggatcgaatcagacggacggttaagtttctgtgcgccttgggacgaggaattcccatcctcagtctagactggctccaccagtcgcgaaaggcaggcttttttctgccgcctgatgaatacgttgttaccgatcccgaacaggagaagaactttggattctctctacaagacgcgctgtccagggctcgagagcgccggctgctcgagggttatgagatctatgtgactccgggggtgcaaccacccccaccccagatgggggagatcatctcttgctgtggtggtacgtacctgccatctatgcccagaagttacaagcctcagagagtggtgatcacatgcccccaagattttccgcattgttctatcccgctgcgcgtgggtttgccactgctgtctcctgagtttttattaacaggcgtgcttaagcaggaggccaagcccgaggccttcgtcttgtctccactcgaaatgtcatcaacctag

SEQ ID NO: 123753 - DNA, 4968 bp, synthetic construct
  misc_feature 1..4968: note = Description of Artificial Sequence: Synthetic coding sequence
  source 1..4968: mol_type = other DNA
atgtatcaccgactcgatgtgagccttcccttcgtctcacggggtccactgacagtggaagagactccccgcgtccagggggagacacagccccagcgccttctcctcgctgaagactctgaagaagaggtagacttcttaagcgaaaggcggatggtgaagaaaagtaggacaaccagcagctccgttatcgtaccggagtccgacgaggaaggccattctcccgtgctaggcggcctgggcccacctttcgcattcaatttgaattctgatactgacgtggaggaagggcagcagccagccactgaggaggcttcttcagcagcacggaggggggccaccgtggaagctaaacaatccgaagcagaggtcgtgactgagatccagctagagaaagatcagcctcttgtgaaggaaagagataacgataccaaggtgaaacgcggggctgggaatggcgtggtgcccgccggtgtgatactagaacgcagccagccaccgggcgaggattccgatactgacgtagatgacgactctcgccctcccgggcggcccgcggaggtgcacctggagcgagcacaaccttttggatttatagacagcgacactgatgcagaagaagaaagaatccctgcaaccccagtcgtgatcccaatgaaaaagcgcaaaatttttcatggcgtgggaactcgaggcccaggtgcaccaggtctcgcacacttacaggaatcccaggctgggtccgatacagatgtcgaggaaggtaaagctcctcaggctgttcccttagagaagagtcaggcaagtatggtgatcaattctgacaccgatgatgaggaagaggtttctgccgcacttaccctggcccacttaaaggagtctcagccagcaatctggaatcgagatgccgaagaggatatgcctcaacgggttgttctgctgcagcgctctcagacaacaactgaaagagatagcgatacagacgtggaggaagaagagctccctgtggagaaccgggaggccgtgcttaaggaccatacaaagatccgagcactggttagggctcactctgaaaaagaccagcctccttttggcgactccgacgactctgtggaggcagataagagctcccctggcatacatctcgagaggtctcaggctagcacgacagtcgacatcaacactcaggttgaaaaggaagtcccacccggaagtgcgattattcatataaagaagcaccaggtgtctgtggagggtaccaatcaaaccgatgtgaaggctgtcggcggccctgctaagctcctcgtcgtgtctctggaagaggcctggccacttcacggcgattgtgagactgacgccgaggaagggacctcgctgactgcatcagtcgtggctgacgtcagaaagtcccagctgcctgcggagggggatgccggggcagagtgggcagctgctgtgctaaaacaagaaagagcccatgaagtcggggcccagggagggcctccagttgctcaagtagagcaggatctcccaatttcacgtgaaaatctgactgacctggtcgtggacaccgatactcttggtgagtccacccagccccaacgtgaaggggcacaggtaccaacaggtagggagagagaacagcatgtgggtgggaccaaagactctgaggataactacggggatagcgaagatctcgacctccaagcaacccagtgtttcctcgagaaccagggactcgaggtacagtcgatggaagatgagcctacccaggcttttatgctgacaccaccccaggaactaggtccgtcacactgttcttttcagacgacaggcctcttgaattgcaaaatgcctcccgccgagaaagcgagccggatacgggccgccgaaaaggtgtcgcgcggtgatcaagaatctcctgatgcatgcctaccccccactgtcccagaggcccctgcaccccctcagaagcctctcaactcgcagtcccaaaagcaccttgccccaccgcctctgttgagccctttgctgcctagtattaagccaactgtgcgaaagactagacaggacggcagtcaggaagcacccgaagcgccactcagttccgagcttgaaccgtttcatcccaagccgaaaattaggacgcgaaagagctcccgcatgaccccgtttccagcaacaagtgccgccccagagccacatccctcaacttctaccgcacaacccgtcacaccaaaacccacctcacaggccactcgtagcaggacaaatagaagttcggtcaagactcccgaacctgtcgtgccgactgccccggagctccaacctagtacatcaacagatcagcccgtgactagcgagcctacgtcacaggttactagaggccggaagtcacgtagcagtgttaagaccccagaaacggttgtgccaacagccctggagctccaaccttcgacttccactgacaggcctgtgacaagcgagcctacgagccaggcaaccaggggtcgtaaaaatcgcagctctgtcaagacgcctgaacctgtcgtccccactgccccagagctgcagccctccactagcacggatcagccagtaacaagtgagccgacataccaagcaacccgcggcagaaagaaccggtctagcgtgaagaccccagaacccgtcgtgcctacggctcccgaattacgccccagcacctccaccgatcgtccagtgacacctaaacccacttctagaaccaccagatccagaaccaacatgagttccgttaaaaacccagagagcacggttcccatagccccggaactgccaccttctacttccaccgagcagcccgtgacacctgaacccacatctagggccactcgagggcggaaaaatcggagttccgggaaaactccagagacattggtgccaacggcacctaagcttgagccgagcacaagcaccgaccagcccgtgacgcccgagcctactagccaggccactaggggtcgtaccaaccggtcaagtgttaagaccccagagacagtagttcctactgcgccggaactccaaccatccacaagtacagaccagccagtgactccagagccgacaagccaagcaacccggggacggacagatcgctcttcggtcaagacacccgagaccgttgtgcccaccgcacctgagttacaagcctctgcatctacagatcagccagttacatccgaaccaacttcgagaacaacccgtggaagaaagaatagaagcagcgtgaaaacacccgagactgttgtgccagccgcgcccgaactgcagccttccacctcaacagaccagccggtaactcccgagcccactagccgcgccacacgcggccgaactaaccggtcttcagtcaaaaccccagaatccattgtgcctatcgctccagaactgcagccctcaacttcaagaaaccagctggtcacacccgagcctacgtcacgtgccacaagatgcagaacgaatagatcttccgtaaagaccccagaacctgtggtccctacagcccccgagcctcaccccacgaccagcaccgaccagccagtaactcccaagctgactagcagagccacacggcgcaaaaccaatagatcgagtgttaaaacccctaagccggtagagcccgccgccagcgatctggagcctttcactcccactgaccagtcggtgacccctgaggctatcgcacagggtggccaatcgaagaccctgcggagcagcactgtcagggccatgcccgtccccaccacaccggagttccagtctccagttaccacggatcaaccaatctcccctgagccaatcactcaaccgtcctgtattaaaaggcaacgcgcagccggtaacccagggagcttagccgcaccaatcgatcacaagccttgttccgctcctctggagcctaaaagccaggcgtctcggaaccagagatggggggcggtgcgtgccgcagaaagtctgacagctataccggagcccgccagcccccagctgctggaaactcccatccatgctagccaaatacaaaaggtcgaaccagccggcaggtctcgcttcacgcccgagctgcaaccgaaagcgtcgcagtcccgcaaaagatccctggctacgatggactcccctccacatcagaaacagccccagagaggagaggtgtctcaaaaaactgtgatcatcaaagaagaggaagaagacaccgccgagaaacccggcaaagaggaggatgtggttacccctaagccagggaaaagaaaacgcgatcaggccgaggaagaacccaaccggataccgtccaggagcctgcggaggactaaactgaatcaagaatcgacagctcccaaggtgctctttacgggcgttgtggacgctcggggagagagggctgtactggctttaggaggttctctggcagggtctgcggcggaagcctctcacctggtgactgatcgcattagaagaacagtaaagttcctttgcgctctgggcaggggcattcccatattaagcctagattggctgcaccagtcccgcaaggcgggttttttcctgccgccagatgaatatgttgtcaccgacccagaacaggagaagaattttggcttttccctgcaagatgcactgtcccgagccagggaacggcggcttctcgaaggctatgaaatttatgtgacaccaggcgtgcaaccgcctccaccgcaaatgggagagattattagttgctgcgggggcacatatctcccctctatgcccaggagctataaacctcaacgggtagttatcacttgcccgcaagactttccacattgctccattccgctccgggtcggtctccccctgctgtcgcccgagttcctgctgacgggtgttctgaagcaggaggcaaagcccgaagcttttgtgcttagtcccctggaaatgagttccacatag

SEQ ID NO: 123754 - DNA, 5409 bp, synthetic construct
  misc_feature 1..5409: note = Description of Artificial Sequence: Synthetic coding sequence
  source 1..5409: mol_type = other DNA
atggaagatacgcaggcgatcgattgggacgtggaagaggaagaggagactgaacagtccagcgagagcctaaggtgtaacgtggagccagtaggccggcttcatatctttagtggtgcccacgggccagaaaaagactttcctctgcatctgggtaagaacgttgtagggcggatgcctgactgcagtgttgccttgccattccccagcatcagtaagcaacacgctgagatcgagatccttgcttgggacaaagctccaatccttcgcgattgtggcagtctcaacggaacgcagatcctgcggccacccaaagtgctgtctcccggagtgtcacaccggttgagggaccaggagctgattctcttcgccgatcttctgtgtcagtatcatcgtctggacgtcagccttccctttgtttcccgggggccactgaccgtagaggagactccacgtgtccagggggagacacagccacaacgactactcctagcagaagacagcgaagaggaggtggatttcttgtccgaacgacgcatggtgaagaagtcacgaaccaccagtagtagtgttatagttcccgaaagtgacgaagaagggcatagccccgtccttgggggactgggtccaccctttgccttcaacctaaacagtgacacagacgtagaggaaggccagcaaccagcaactgaggaggcctcatctgccgctaggagaggagcaaccgttgaggcgaaacagagcgaagctgaagtagtgactgagatccagctggaaaaggaccagccgttagtcaaagaacgtgacaacgacaccaaagttaagagaggcgccggtaatggggtggtaccagctggggtgatcctggaacgctcgcaacccccaggtgaggatagtgatactgacgtggatgacgactctcgccctcccggtaggcccgccgaagtgcacctggaaagagctcaacccttcggtttcatcgattctgatacagacgctgaggaagagcggatcccagccacaccggtcgtgatcccaatgaagaagagaaagatttttcacggggtcggtacacggggacccggtgctcctgggctggctcatctgcaggagtcccaggcaggttcagatacagacgtggaggaaggcaaagcaccccaggccgtgccactcgagaagagtcaggcttctatggtgattaatagtgatactgatgacgaggaggaggtcagtgctgcccttactctggcccaccttaaggagagtcagcccgcaatctggaaccgagacgccgaggaagatatgccgcagcgtgtcgtgctgctacagcgcagccagacaactacagaacgagattctgatactgacgttgaagaagaagaactgcccgtcgaaaatcgcgaagccgtactaaaggatcacaccaagatcagggctctggtcagggctcattcagaaaaagaccagcctccattcggcgattccgatgatagcgtggaagctgataagagctcgcccggtatccacttggagagatcacaggcaagcacaacagttgacatcaatacccaagtggagaaggaggtacctccaggctccgcaattatacacataaaaaaacaccaggtcagcgtggaagggaccaatcaaacagatgtcaaggccgttggtggacctgccaagctcttagtggtcagcctggaggaggcttggcctctgcacggagattgtgaaacggatgctgaagaaggtacgtcgctcaccgcttctgtggtggccgacgtccggaaaagccaactccctgccgagggcgatgcaggagcagagtgggcagctgccgtgctgaagcaggagcgcgcccatgaggtcggcgcacagggaggtcctccagtcgcccaggtcgagcaggatctgcctatatcccgagagaatctgaccgaccttgtcgtcgacaccgacaccctcggggagagtacccagccccaacgagagggcgcccaggtgccaactggccgagagcgagaacagcacgtgggcggcacaaaggatagcgaagacaactacggggactcagaagatctggaccttcaggccacccagtgtttcctggagaatcagggtctggaagccgtacagagtatggaagatgagccgacacaggctttcatgttgacccccccccaggagttgggccctagccactgctcatttcagaccacagggacactggatgagccttgggaggttctcgccacccagccattttgtctgagggagagcgaagattcggagacacagccttttgatacccatctggaggcttatggaccttgtttgtcccctccccgcgctatacctggggaccagcaccccgaatcccctgtacataccgagccaatgggcatacaggggaggggcagacagaccgtggacaaggttatgggtattcccaaagaaacggcagagagggtggggccagagagaggtcctctggagagagagacggaaaaacttctgccagagagacagactgatgtgactggagaggaggaattaaccaagggcaaacaggatagggagcagaaacagctcctcgccagagacacacagcgccaggagagtgacaaaaacggcgagtccgcttctcccgaaagagaccgagagtccctgaaggtggagatcgagacatccgaggaaattcaagagaagcaggtccaaaaacagactctaccatcaaaagctttcgagcgcgaggtggaacggccggtggctaacagggagtgcgatcctgccgagcttgaggagaaggtacccaaggtgattctcgaacgcgatacacaacgtggcgagccggagggtggctctcaggatcagaagggccaggctagtagccctacccctgaacctggtgtaggggccggcgaccttcccggaccaacctctgcacctgtgccttcagggagccaatctggaggacggggctcaccggtatccccccggagacaccagaaaggtcttctgaactgtaagatgcctcccgccgagaaggcctcgagaatcagggccgccgaaaaagtatcccgaggggaccaggagtcacccgatgcttgcctgcctccaactgtcccggaggcaccagctcctccacagaaaccgctaaacagtcagagccagaagcacttagccccacctccactcctaagtccactcctccccagcatcaaaccaactgtgcggaagacgagacaagacggctcgcaggaagcccctgaggcgccactgagttccgaactggagcctttccatcccaagcctaagatcaggacccgaaaaagttctagaatgacccctttccctgctacctctgctgctcctaagctagaaccttccacatcgacagatcagccagtcacccccgaacccacttcccaggcaactcggggtcggaccaacaggtcctccgtgaaaacaccagagacagtggtacctaccgcgcccgaactccagccgtctaccagcacagaccagccggtgacgccggagcctacctcccaggccacgaggggacgcacagacagatcgtcagttaaaactcctgaaactgttgttccaacagcgcccgagctgcaggctagtgcctccacagatcagcccgttacttcggagccgacctcaaggaccacacgcggcagaaagaaccggtcttctgtgaagacgcccgagaccgttgtgccggccgctcccgagttgcagcccagcactagtaccgatcagcccgtcacaccggaacctaccagccgagcaacacgcggacgaactaacaggagcagcgtcaaaacaccggaaagcatcgttcctatagcacctgagctgcagccgagcacatcccgaaatcagctcgtcactccagaacccacaagcagggccactcgctgcagaacgaaccgctcgagcgtaaaaacgccagagccggtcgttccgaccgctcctgaaccccatccaacaaccagcacagatcagccagtcacaccaaaactcacttcacgggctactcgacggaaaaccaatagatcctcagtcaaaacgccgaaacctgtcgagcccgccgccagtgatttggaaccattcacacctactgatcagtccgtgacgcctgaggcaattgcccagggcgggcaaagtaaaacccttaggtcatcaaccgtccgggccatgcccgtgccaaccacaccagaatttcagagccccgtgaccacagatcaacccatatccccagagcctataacacaacctagttgtattaagcggcagcgcgccgcaggcaaccccggatcccttgctgcacctattgaccacaaaccgtgttctgcgcctcttgagccaaaatctcaggcttccagaaaccagcgttggggcgcagtgagggcagccgaaagcctgacagctataccagaacccgcatcaccacagctgctggagacaccaatacacgcatcccagatccagaaggttgaaccagctggcagatcgcgattcacacccgagttacagcctaaggcgtcccagtccagaaagaggtccctcgcgaccatggatagcccgccgcaccagaaacaacctcaacgcggagaggtgagtcagaaaactgtgatcattaaagaggaagaagaggacactgctgaaaagccggggaaggaggaggacgtggtcaccccaaaaccgggaaaacgcaagcgggaccaagcagaggaggagcccaataggatccccagccggtctctcaggcgaacgaagctcaaccaagagtccacagccccgaaggtgctctttacaggagtcgtagacgccaggggcgagagagccgtcctggctctgggcggatctctggcgggatctgctgctgaggcttcacatttggtgacagatcgaatcaggaggactgtcaaattcttgtgtgccttgggaaggggcatccctattcttagcctcgactggctgcaccagagcagaaaagcagggtttttcttgccgccggacgagtacgtagtgaccgatcctgagcaggaaaagaatttcggcttttccctgcaagatgccctatctagagcaagggaacgcagattactggaaggttacgaaatatatgtaacccccggggtccagccacctcccccacagatgggagagattatcagctgctgcggtgggacatacctaccaagcatgccccgttcatacaagccacagcgggtggtgatcacttgtccgcaggattttccgcactgctctattcctctgcgggtcggcctcccattgttgagtccggagtttcttctcactggagtgctgaaacaagaggcgaaacccgaagcctttgtgctcagtccactcgaaatgtcaagcacatag

SEQ ID NO: 123755 - DNA, 666 bp, synthetic construct
  misc_feature 1..666: note = Description of Artificial Sequence: Synthetic coding sequence
  source 1..666: mol_type = other DNA
atggaagatacgcaagcaatcgattgggacgtggaggaggaggaagaaaccgagcagtccagcgaatccctgaggtgcaacgtggaacctgtaggaaggctccatatcttcagtggcgctcatggcccggaaaaagatttccctctgcaccttggtaaaaacgtcgtgggacgcatgcccgattgtagcgtggcactgccatttccctctatatccaagcagcatgcggaaatcgagatcctagcatgggacaaggcacccattctccgcgattgcggaagcctgaacgggactcagatccttagtagctcactgcctcctccgcagactagcttactaccactctcgctccgactgaggttgctgggagaggagcagattgacccgctcagccgcctgctgaagcagctgagtccccagcccctctcatatagacttccccctccccagaccagtctcagcccgctgtccccacatctgggcccactgggcgaggaaaagataggtcccttgtccaggccgctgaagcagctctgtccacagcccctgcggagtagtctcccgccaccacagacgaatttaagtccacttagcccccacctcggcccattgggtgctgggcaaattggacccttgagtcggcctttgaatcaactctccctctag

SEQ ID NO: 123756 - DNA, 666 bp, synthetic construct
  misc_feature 1..666: note = Description of Artificial Sequence: Synthetic coding sequence
  source 1..666: mol_type = other DNA
atggaggacactcaggcgattgactgggacgtggaggaggaggaggagacagaacaatctagcgaaagcctaaggtgcaacgtcgagcctgtggggcgtttacacatcttctctggagcccatggcccagagaaggacttcccgctccacctggggaaaaatgtggtggggcggatgcccgactgctctgtagcccttccctttccctccatatctaagcagcatgccgagatcgaaatacttgcttgggataaggccccaattttacgtgactgcggcagcttaaacggcacccagattctctcttcaagcctacccccaccacagacttccctactaccgctttcactgagactcagactgctgggggaggagcagatcgaccccctctctcggctcctgaagcaactttctccccaacctctgagttacaggctgcccccaccccaaaccagcctcagcccattgtccccgcatttggggcctctaggcgaagagaaaataggcccactgagccgtcccctgaaacaactgtgcccccagccccttagttctagcttgccaccacctcagactaacctgtccccactctcaccacatctgggccctctgggtgccggtcagatcggtcccttgagcaggccactgaaccagctctccctctag

SEQ ID NO: 123757 - DNA, 738 bp, synthetic construct
  misc_feature 1..738: note = Description of Artificial Sequence: Synthetic coding sequence
  source 1..738: mol_type = other DNA
atggaagatactcaggccattgactgggacgtcgaggaagaggaggagactgaacaaagctcagaaagcctgcgatgcaatgtggagcccgtgggtcgattgcatattttcagtggtgcgcacgggccggagaaggattttccacttcacctaggcaaaaacgtggtgggccgcatgcctgattgttctgtcgctctaccattccccagcattagcaagcagcacgccgagatcgaaattctggcttgggataaagcccccatcttgcgcgactgcggcagtctcaacggcacacagattctgagaccccctaaagtgttatcaccgggtgtgagccacaggttaagggaccaagaactaatactgtttgctgaccttctgtgtcaataccatcgcttggacgtcagcctccctttcgtctctaggggcccccttaccgtggaggagacaccccgcgtccagggggaaacgcaaccgcaaaggctcctgctggccgaggatagtgaggaagaggtcgactttctgtcagaacggcggatggttaagaagtctcgtaccacgtcatcatccgttatcgttcccgaatcagatgaggaaggccactcccccgttctgggtggtcttggccccccatttgcttttaacttaaattctgacacagacgtggaagaagggcagcagccggctaccgaagaagcctcttccgccgcccgccgcggagctacggtggaagcttag

SEQ ID NO: 123758 - DNA, 5478 bp, synthetic construct
  misc_feature 1..5478: note = Description of Artificial Sequence: Synthetic coding sequence
  source 1..5478: mol_type = other DNA
atggaggatacccaggcaatcgattgggatgtcgaggaggaggaggaaacagaacagtcttccgagtccctgcggtgtaatgtcgaaccagtgggtaggcttcatattttttccggtgcccacgggccagaaaaagactttcccctgcatcttggaaagaacgttgtgggcagaatgccggattgcagcgtcgccctgcccttcccgagtatatctaaacagcatgctgagatcgaaatcctggcatgggacaaggcccccatcttgcgcgattgtggctccctgaacgggacacaaatccttcgcccaccaaaggtactgagcccgggcgtgtcacacaggcttcgagatcaggaattaattctattcgcggatctactgtgtcagtaccatcggcttgatgtctctttgccttttgtgagtagaggccctctcacggtcgaggaaacgcctcgggtgcaaggagagacgcagccgcagaggctcctcctcgcggaggattctgaggaagaagttgatttcttgagcgagcgccgcatggtgaagaagtcgcgcaccacgagctcctcggtcatcgtgcccgaaagtgatgaggaggggcacagtccagtgttgggaggtctcggccccccgttcgcattcaacttaaatagtgacactgatgtagaagaggggcagcagccagcgacggaggaggcatctagtgcggcccgcagaggagcaactgtcgaagctaagcagtccgaggcagaggtagtgactgagatacagttggaaaaagatcagcctctagtgaaggaacgggacaacgacaccaaggtgaaacgcggagctggtaacggggtcgtaccagccggcgtcattctcgagaggagccagccgcctggagaggatagtgacactgatgtggatgacgactcccgcccccccggccgacctgcagaggtgcacttggagagagcccagccttttggatttattgacagcgacaccgacgcggaagaagagcggatacccgcgactcccgtggtcatacccatgaaaaaaagaaagatcttccacggagtgggtacacgtgggccaggggcaccgggactggcccacctgcaggagagccaggccggctccgataccgacgtcgaagagggcaaggctccacaggcagtgccacttgagaaatctcaggcttctatggtcataaatagcgataccgacgatgaagaagaggtctctgcagccctaactctggcccatctgaaggaaagccagcccgcaatctggaacagggacgcagaagaggatatgccccaacgtgtcgtcctccttcagcgtagccagaccaccacagagcgcgatagcgacaccgacgtagaggaggaggaactgcctgtcgaaaatcgggaggcagtcctgaaagatcacaccaagatcagggccctggtcagagctcactccgaaaaggaccagccgcccttcggcgactccgacgactccgtcgaggctgataaatcctcccccgggatacacctcgagcggtctcaggcaagtacaacagtggacatcaacactcaagtcgagaaggaggtcccccctggctcagcgatcattcacatcaagaaacaccaagtcagcgtcgaagggaccaatcagaccgacgtgaaagctgttggaggcccagctaaacttttggtggtctcactggaggaagcttggccactgcacggagattgtgagaccgatgccgaagagggaacatccctgacagcttctgttgtcgcagacgttagaaagagtcagctgcctgctgagggcgatgccggtgctgaatgggccgctgccgtgctgaaacaggagcgcgcccatgaagtgggcgcccaaggcggcccaccggtcgcgcaggtggagcaggatctgcccattagcagggaaaatctcactgatctggtcgttgatactgacaccctgggggaatccacccagcctcaaagggaaggcgcacaggttcccactggtagagaaagggagcagcacgtgggtggcacaaaggattctgaagataattacggggattcagaagatctggatttgcaggccactcaatgttttttagagaatcaggggcttgaagcagtccagtccatggaggatgagcctactcaggctttcatgctcacccccccacaggagctgggaccaagccactgctcttttcagactacagggttgctcaattgcaagatgccccccgctgagaaagcctcccgcatccgcgccgccgagaaggtgagcagaggcgaccaggagtcacccgacgcctgtcttcccccaaccgtgccagaggcaccagctcctccacagaagccactcaactcgcagtcccagaaacatctcgctccgcccccacttctcagtcctctcctgccttccatcaagcccactgtgaggaaaactcgccaggatggaagtcaggaggcgccagaagctccattatcatctgaactcgaaccgttccacccgaagccaaaaattcggaccaggaaaagctcccgcatgacgccgttcccagcaacatccgccgcccccgaacctcaccctagcacctcaaccgcccagcctgtaacgccaaagccaacctcccaggccactaggtctcgaacaaatagaagttccgtgaagacaccggaacctgtggtgcctacagctcctgagttacagccttctacctccacagatcagccagtgacatccgaacctacttcacaggtcacccgggggaggaaaagccgttccagtgtgaagactccagaaactgtggtccccactgccttggaactacagccctccacctctacagataggcccgtgacatcggagcccacgtcccaggccaccaggggacgcaaaaaccgctcatctgtgaagacgcccgagcccgtggtgccaacagcacctgagctgcagccctctacaagcaccgaccagcctgtgacttctgaaccaacctaccaggccaccagaggtagaaagaaccggtcctctgtcaagacgccagagcccgtggtgccgactgcccctgagctacggccttctacatccaccgatcgtcctgtgacaccaaaacctacatcccggactacacggtctcgcaccaatatgagcagcgttaagaccccggaaactgtcgttcccactgcaccggagttacaaatttctacctccaccgaccaacccgtcacgcctaagcccacctctcggaccacacggtctcgcaccaacatgtcaagtgtgaagaatcccgaatcaacagtgccaatcgccccggagctgcctccgtctacgtctaccgagcaacccgtcacgcctgaacctacgtctagggcgacaagagggcgcaaaaatagaagcagcggcaagacccccgagactcttgtccccacagctcccaaacttgagccaagcactagcactgaccagcctgtgacgcccgagcctacctcgcaggcaactcgcgggaggacgaacaggagctcagtgaaaactccagaaacagtcgtccctaccgccccagaattgcagcctagcacgtctacagaccaacctgtgacacccgaacccacctcccaggcaacccggggacggacagatcgcagcagcgtgaaaacaccagaaactgttgtgccaactgcccccgagctgcaggcgagcgcctcaactgatcaaccagtgacgtccgaaccaaccagccgcacaactcgcggtagaaaaaaccgctcatcagtgaaaactcccgaaacggtagtgcctgccgcccctgaactacagccttcaacctccactgaccagccggtgactcccgaacccacatcccgcgccaccaggggacgcactaaccgatctagtgttaagacccctgagagcatagtacctatcgctccggaattacaaccaagtacctctagaaaccaactagttaccccagagccaaccagcagagccacgagatgtagaacaaaccgctcaagtgttaaaacacccgagcctgtcgtcccaaccgcacctgagcctcatccaacgacttccaccgaccagccagtcacaccgaagctgacttcccgggctacccggcgcaaaacaaatcggtctagtgtaaaaactcctaaacctgtcgagcctgccgctagtgatctggagccattcacacctacagaccaatcagtgacgcccgaagccatcgctcaaggcggccagagtaaaacgctacggagcagcacagtccgcgccatgcctgttcctactacgcctgaattccagtcaccagtaacaaccgaccaacccatctctcctgagccgattacccaaccgtcttgtataaagcgacagagagcagcagggaaccccggaagcctggccgcgcctatcgatcacaaaccttgttcagccccattggagcctaaatcacaggccagcagaaaccagaggtggggcgccgtccgcgcggccgagtcactcacggccatacctgagcccgcttccccccagctgctggagactcctatccacgcatcacagatccagaaggtggagcccgccggccgcagtcgattcactccagaactgcagccaaaggcatcccagagccgaaaaaggagcttggccacaatggattcccctcctcaccagaaacagccgcagaggggcgaagtctctcagaagaccgtgattatcaaggaagaagaggaggatacagccgaaaaacctgggaaagaggaagacgtagtcacccccaaacccgggaagagaaagcgggaccaagcagaagaagaacctaaccgtatacccagccggtccctccggcggactaagctcaaccaggagtcaaccgccccgaaggttctatttactggcgtggtagacgcccggggcgagagggcagtattagcactgggggggagcctggccggttcagcagcagaggcctcccacttagtaaccgatcggatccgccggaccgttaagttcctatgtgcactgggacgcggaatacccatactgtcgctggactggctacaccagtcaaggaaggcagggttctttctgccacccgatgaatatgtggtcaccgaccccgaacaggagaagaattttggattctcactgcaggatgccctgtcccgagccagggagaggagattgcttgagggctacgaaatctacgtaacacccggcgtgcagccgcctcctcctcagatgggcgagatcatatcttgctgcggaggcacgtacctcccctcgatgcctcgctcatataaacctcagagagtggtgataacctgccctcaggacttcccccactgttctattcccctgcgggtgggactgccactgttatcacccgagttcctattgacaggggtactgaaacaagaagccaagcctgaagctttcgtactttcccccctggaaatgagttcaacctag

SEQ ID NO: 123759 - DNA, 735 bp, synthetic construct
  misc_feature 1..735: note = Description of Artificial Sequence: Synthetic coding sequence
  source 1..735: mol_type = other DNA
atggaggacacacaggctatcgactgggacgtggaagaggaagaggaaacagagcagtcctcagaatctcttcgctgcaacgtggaaccggtcggaagattacatatttttagtggcgctcatgggcctgagaaagactttcccttgcatctaggtaaaaacgtagtgggtagaatgccagattgttctgtagccctccctttcccaagtatctcaaagcaacacgcagaaatcgagatcctggcctgggataaagcaccaattctgcgggactgcggatctttgaatggtacccagatcttaaggccccccaaggtgctgagtcccggggtcagccatcggctgagggaccaggaactcattctctttgctgacctgctctgccagtatcacaggcttgatgtatcactcccttttgtgtccaggggcccactcacagtagaagagacccccagggttcaaggtgagacccagccgcaacgtctgctgctggcagaggattcggaggaggaggtcgactttctgagtgaaaggcgcatggtgaagaagtcacgtacaacttcgtctagcgtcatagtacctgagtctgacgaagaagggcactcaccagtgctcgggggcttgggaccaccgttcgcttttaatctcaacagtgacaccgacgtggaggagggacagcaaccgcatcgcggcggattgctgtcttgccaaaaacgttgccattgccgcgggtag

SEQ ID NO: 123760 - DNA, 735 bp, synthetic construct
  misc_feature 1..735: note = Description of Artificial Sequence: Synthetic coding sequence
  source 1..735: mol_type = other DNA
atggaggatacccaggctattgactgggacgtggaggaggaagaggaaactgaacaaagcagcgaaagtcttaggtgtaatgtggagcccgttggacggctacatatcttcagcggagcacacggccctgagaaagattttcctctccacttgggcaagaatgtggtgggcagaatgccagattgctccgttgcactccctttcccatccatctctaagcagcacgccgagattgaaattctagcctgggataaagctccaatactcagagactgtggctccctgaacggaactcagattctccggcccccaaaggtcctaagtcccggcgtgtcccaccggttgagagaccaggaattgatcctattcgctgacctgctatgccagtaccatagactcgacgtgagcttgccctttgtaagtagggggccactcactgtagaggaaacacccagggtccagggggaaacccagccccagcggctgctgctcgccgaggatagtgaggaagaagtggatttcctgagtgagagaaggatggtgaaaaaaagcagaacaacctctagttccgtgatagtccctgagtctgatgaagaaggccactccccagtgttagggggacttgggccaccgtttgccttcaacctcaactcagatactgacgttgaggaaggtcagcagccccaccgcgggggcttattgtcatgccagaaaaggtgccattgtcggggttag

SEQ ID NO: 123761 - DNA, 666 bp, synthetic construct
  misc_feature 1..666: note = Description of Artificial Sequence: Synthetic coding sequence
  source 1..666: mol_type = other DNA
atggaggacacacaggcgatcgactgggacgttgaggaggaggaggagacagagcagagctctgagtcacttaggtgtaatgtcgaacctgtcggacgtcttcacatattttcaggcgcacatgggccagaaaaagacttcccattgcatctaggaaaaaacgttgtgggccgcatgcctgattgttctgtcgcactgcccttcccgagcatttcaaagcagcacgccgagatagaaatcttggcttgggacaaagccccgatcttgagagattgtggctccctcaatggtacacagatcctgtcttcaagcctccccccccctcagacgagcctgctgccactctctcttagactcagactgcttggtgaggagcagatcgatccattgtctagactccttaagcaactgtccccacagcctctgtcatatcggctgcccccccctcagacctcattgagtccgttatctccccacctcggtcctctcggagaggagaagatcggccctctctctagacccctgaagcaactgtgcccccagccattatcctccagcttaccgccaccacagactaatctgtccccgctgtcgccacatctgggccctctcggtgccgggcaaataggccccttatctaggcccctgaaccagctgtctttatag

SEQ ID NO: 123762 - DNA, 666 bp, synthetic construct
  misc_feature 1..666: note = Description of Artificial Sequence: Synthetic coding sequence
  source 1..666: mol_type = other DNA
atggaggatactcaggccattgattgggacgttgaagaggaggaagagacagagcaatcaagcgagtcgctgcgctgtaacgtggagcccgtgggcagactgcatattttctctggagcacatggccctgagaaggacttccctctccacctaggaaaaaacgtcgttggacgtatgccagattgttccgtggcgctgccgttcccctctatcagcaagcagcatgctgaaattgagattcttgcctgggataaagctccaatactacgtgattgcggttcgttgaacggtactcaaattctctcctctagtctcccccctccccagactagcttgcttcccttgagcctgaggctgcgcttattaggcgaagaacagatcgatcctctctctaggttgttaaagcaactgagccctcagccactttcgtacagattgcctcctcctcaaacgtcccttagccctctttctccacacctgggtcccctcggtgaagaaaagatcggaccactctcacgacccctcaagcaactctgccctcaaccgttatcttcctccctgccgcccccccaaacgaacttgagtccactctcaccccacctggggccactgggcgcaggccaaatcggtcccctgtccaggcccctgaatcagcttagcctgtag

SEQ ID NO: 123763 - DNA, 5478 bp, synthetic construct
  misc_feature 1..5478: note = Description of Artificial Sequence: Synthetic coding sequence
  source 1..5478: mol_type = other DNA
atggaggacacccaagccatcgactgggatgtagaggaggaggaggaaaccgaacagtccagcgagagcctgcggtgtaatgtggagcctgtgggacgattacacatcttctctggagcccatgggccagaaaaggacttcccactgcatctaggcaagaatgtggtcggacgaatgccagactgcagcgtggctctaccattcccatctattagcaagcagcacgcggaaatcgaaatactggcttgggacaaggcccccattctgagggattgtggctcactaaatggcacacaaatcctgcggcctccgaaggtcttgtctcctggggtgtctcatcgcctcagggaccaggaactgatcctcttcgccgacttgttatgtcaataccatcggttggacgtaagcttacctttcgtctccaggggcccactgaccgttgaagagaccccccgggtgcagggagaaacccagcctcagaggctgcttttggctgaagacagcgaagaggaagtagactttctgtccgaacgacgcatggtcaagaagtctaggaccacctccagcagtgtgattgtgcccgagtctgatgaggaaggccattcaccggtgctcggcgggctgggaccgccgttcgctttcaacctgaactctgacacggacgtcgaggaaggtcagcagcctgcgaccgaagaggcatcaagtgctgcacgcaggggcgctaccgtcgaggcaaaacagagcgaagcggaagtggtgacagaaattcaacttgagaaggaccagccgctggtcaaagaaagggacaacgacacaaaagtaaagcggggagcggggaacggggtggttccggctggggtaatcttggaacgaagtcagcctccaggcgaggatagcgatactgatgtggatgacgatagtaggccccccggtcgacctgccgaggtgcacttggaaagagctcagccttttggttttatcgactctgacacagacgccgaagaagaaaggatacccgccacaccagtggttatcccgatgaagaaaagaaaaattttccacggcgtcgggacacggggcccaggggcaccagggttggcccacctgcaagagagtcaggccgggtctgataccgacgtggaagaggggaaggcgccccaagccgttccactggaaaagtctcaggcttctatggtaataaactctgacactgacgacgaggaagaagtctccgccgccttgactctagctcacttgaaagagtctcagcccgccatctggaaccgcgatgccgaagaagatatgccccagcgtgtcgtcttgctgcaacggagccagacaaccaccgagagagattccgacaccgatgtggaggaggaggagctgccagttgagaatcgggaagctgtgctcaaagatcatactaagattagggctcttgtgcgcgcgcattcagaaaaggatcagcccccatttggggatagtgacgactctgtggaggccgacaagagcagccctggtatacacctcgagcgtagtcaagccagcacgacagtggacatcaatactcaagttgagaaggaagtgccaccaggcagcgcaataatccacattaagaagcaccaggtgtccgtggaggggacgaaccagaccgatgtgaaagctgtgggcggaccagcaaagttgctagtggtaagtcttgaggaggcctggcctctgcacggagattgtgaaactgacgcagaagaggggacctcacttacagctagcgtagttgccgacgtgaggaaatcacagttgcctgctgagggggacgccggcgctgagtgggctgccgctgtattgaagcaagagcgggcccatgaggttggcgcccaaggtggtccacccgtggcacaggttgagcaggatctcccgatctcccgagaaaacctgaccgatctcgttgtggacaccgatactctgggtgagtctacccagccccagagggaaggcgctcaagtgcccaccggtcgtgagagggaacagcacgttgggggtaccaaagattcggaggacaactacggagactctgaggatctggatctgcaggccacccagtgtttcctggagaaccaagggctggaagccgttcagagtatggaagacgaacccactcaggcctttatgctcactccaccgcaggaacttgggccttcacactgttcattccagacaacaggtctgttgaactgcaaaatgccacccgctgagaaagccagcagaatcagagctgctgagaaggttagcaggggagatcaggagtccccggatgcatgtctcccacccactgtacctgaagctccagctccgcctcagaagcccttgaatagccagagccagaaacaccttgcccctcctcccttgctcagcccactcctgccttcgatcaagccaaccgtgaggaagacccgccaagatggtagccaggaggcccctgaggcccctctctctagcgagctcgaaccctttcatccaaagccaaagatcagaactaggaagtcatcccggatgacacctttcccagcgacttccgccgccccggaaccacatccgagcactagtacagctcaacctgtcacccccaaacctacgtctcaggcgaccaggagtcgcactaatagaagcagtgtcaaaacgcctgagcccgttgtgcctaccgcgcccgaattacagcccagtacctccacagaccaaccggtgacctccgagccaacctcccaggtgacgcggggtcggaagagccgaagtagtgttaagaccccagagactgtcgttccaacagcgcttgaactgcagccatcaacctccacagatcgacccgtcacgagcgagcccacatcacaggctactagaggaaggaaaaaccgatcctccgtcaaaacacccgagcccgtcgtcccaacggccccagaattacagccgtccacgagtaccgaccagcccgtgaccagcgaaccgacataccaggccacgaggggcagaaagaatcgaagctcggtaaagacgccagagcccgtggtgcccacagcacctgagctgcgccccagcacgtcaacagataggccggtgacgcccaaacccactagtagaacaactaggtccaggacaaatatgtcaagcgttaaaacacctgaaaccgtcgtgccgactgctccggaattacagatttcaaccagtacagatcagccagtgacgcctaaacctacctcaaggaccacaagatcacgcaccaatatgtcctccgtgaaaaaccctgagagcactgtgccaatcgccccagagctccccccgtctacctcaaccgaacaaccagtcactccggagcccactagtagagctacacgcggccggaagaaccgttcaagcgggaagacccccgagacattggtccctactgccccaaagctggaaccgagcaccagcaccgaccaacctgtaactccagaacctaccagccaggctacaaggggtcgaactaaccgatcaagcgtgaaaactcctgagaccgtggttccaaccgcaccagagctccaaccaagtacttccacagaccagccagtgactcctgaaccgactagtcaggcaactcggggacgcacagataggtccagcgtaaagacccctgaaacagtagtccccactgcgcccgaacttcaggcatcagctagcaccgatcaaccagtgacttctgagcctacctctagaaccacgagaggcaggaagaatagatcaagcgttaagacccctgaaaccgtagtgcccgccgcgcctgaactgcagccatcgacctctaccgaccagccagtcacccctgagcccacgtcgagagctacgcgcggacggaccaaccgctcctcagtgaagacccctgagtctatcgttcccatcgcccctgaactgcagccttcaacgagccgcaaccagctggtgactcctgaacctactagccgcgcgacacggtgcagaaccaatcgctcgagtgtaaaaacgcctgagcctgtcgtgcccactgcaccggaaccccaccctacaacatccactgatcagccggtgacaccaaagctgacaagccgagcaacgaggcgaaaaacgaaccgatccagcgtcaagaccccaaagccagttgaaccagctgcctctgacctggaaccgtttactcccacggaccaaagtgtgacgccagaagccatagcgcaggggggtcagtcgaagacactgcgaagctctacagttagggctatgcctgtgccaaccacgcccgaatttcagtccccagtaacaacggatcaacctatttcccccgaaccaatcacgcagccatcttgcatcaaacgccaaagggccgctggtaaccctggttcactcgctgccccaattgaccacaagccatgttctgcgccgctggaaccaaagtctcaggcctctaggaatcaacgctggggtgccgtcagagctgctgagagtctgacggcaatccctgaacctgcatcaccccagctattggagacacctattcatgcctcccagattcaaaaggtcgaacctgcaggccgtagtcgctttactcccgagctacagccgaaggcctcgcagtctcgcaagaggagcctggctacaatggacagcccacctcaccagaagcaacctcagagaggggaagtgtctcaaaaaactgttatcataaaagaagaggaggaggataccgctgagaagccgggcaaggaggaagatgtcgtcactccaaaacctggtaagaggaaacgcgatcaggcagaagaggaacccaaccggattccaagtaggagtcttagacgcacaaagctgaatcaggaaagcaccgccccaaaggtcttgtttaccggcgtagtagatgcccgcggggaacgagcagttttggccctggggggcagcttggccggctccgctgctgaagcaagccacctggtgaccgaccgcatacgacgcaccgtgaagttcctgtgtgcccttggcagaggaatccccatcctcagcctggactggctgcatcaaagcagaaaagccgggttctttctgcctccggacgagtacgttgtgactgatcctgagcaggagaagaacttcgggttctctctgcaggacgcactttcaagagcccgggaacgccgactactcgaaggatacgaaatatacgtgacacccggcgtacaaccgcctccaccccaaatgggggagatcatctcctgctgcggaggaacttatctgccgagcatgcctagaagctacaagcctcagcgtgtcgtgataacctgcccccaggacttcccccactgctctataccactgcgtgtaggtttacctctgctgtctccggaattcttgttgaccggtgtcctcaaacaggaagctaagcccgaagccttcgtcctgagccccctcgagatgagctccacttag

SEQ ID NO: 123764 - DNA, 738 bp, synthetic construct
  misc_feature 1..738: note = Description of Artificial Sequence: Synthetic coding sequence
  source 1..738: mol_type = other DNA
atggaggacacacaagccatcgactgggacgtggaggaagaggaagagacagagcagtcctcggaatctctccggtgcaacgttgagccagtgggtagactgcacattttttccggcgctcatggaccagagaaagactttcccctgcatctgggtaaaaacgtcgtggggagaatgcccgactgtagcgtagctctgccatttcctagtattagcaagcaacatgcggaaattgaaatcttagcatgggataaggccccaatcctgagggactgcggaagtctgaatggcacacaaattctccgccctccgaaagttctgtcacctggggttagccatcgattgcgggaccaggaactgatcttatttgctgatctgctgtgtcaatatcataggctggatgtctcattgccttttgtatcacgcggaccacttaccgtggaagagacccctcgggtccaaggcgagacacaaccacagcgattattgttggctgaggactctgaggaagaggttgacttcctgagcgagcggaggatggttaagaagagcagaactacgtcttccagcgttatagtgcctgaatcggatgaggagggacacagccccgttttgggtgggctgggccccccgtttgccttcaatcttaatagcgatacggacgtggaggagggccagcagcccgctaccgaggaggcttccagcgccgccaggaggggtgccactgtggaggcttag

SEQ ID NO: 123765 - DNA, 2238 bp, synthetic construct
  misc_feature 1..2238: note = Description of Artificial Sequence: Synthetic coding sequence
  source 1..2238: mol_type = other DNA
atggcgtgtagacagagaggggggagctggtccccaagcgggtggttcaatgccggatggagcacttatagatctatctccctatttttcgcactggtcaccagtggaaacagcatagatgtgagccaactcgtgaacccggcatttcctgggactgtgacctgcgacgagcgagagatcacggtagagttcccgtcctctcctggaacaaagaagtggcacgctagtgtggtagatccgctcggcttggacatgcccaactgcacgtacatcctggaccccgagaagctcaccttgagggctacatacgacaattgcactagaagggttcatggcgggcaccaaatgaccatacgggttatgaacaactcagctgccctccggcacggggcggtgatgtatcagttcttctgccccgccatgcaggtggaggaaacacagggcctgagtgctagtaccatctgccaaaaagacttcatgtcttttagcctgccacgtgtgtttagcggccttgccgacgattctaaaggtacaaaggtgcaaatgggctggagcattgaggtaggtgacggcgcacgggcaaagaccctgactctacccgaagcaatgaaggaggggttcagtctgctgatcgacaaccatcggatgaccttccacgtgccctttaacgccaccggcgtgactcattatgtgcaggggaattcacacctgtatatggtctcattgaagctgacttttatctctcccgggcagaaggttatcttttcttctcaagcaatctgcgcccctgatcctgtgacttgtaatgccacacacatgactctcaccataccggaatttccagggaaactgaagtctgtgtcctttgagaaccaaaatatcgacgtaagccaattacacgataacgggattgatttagaagcaactaacgggatgaaactccatttctccaaaacacttttgaagactaagttatccgagaagtgtctcctccaccagttctatctggccagcttgaagttaacctttctgttaagaccggaaacagtttcaatggtgatttaccctgagtgcttgtgtgagtccccggtttctatcgtcaccggcgagctgtgcacacaagatggcttcatggatgtcgaagtctactcttatcagactcagcccgcgctcgacttaggaaccttgcgggtcgggaattcttcctgccagcccgttttcgaggcccaaagccagggtttggtcagattccacatcccactgaacggttgcggcacgaggtataaatttgaagatgataaagtcgtgtacgagaatgaaattcacgcactgtggactgattttccgccttctaagatatcacgagatagtgaattccgtatgacagtaaagtgtagttatagtcgcaacgatatgttgctaaatattaatgtagaatctcttacgccccccgtggccagtgtgaaattggggcccttcacgctgatcttgcagtcctatcccgacaattcttatcaacaaccttacggagagaatgaatatccactggtgcgctttctccgccagcccatctacatggaggttcgggtgctcaaccgggatgaccctaacatcaagctcgtgctggacgactgttgggccacctcaaccatggaccctgattccttcccgcagtggaatgtagtggttgatggctgtgcctatgatctcgataactaccagaccacctttcaccctgttggaagttccgtgacgcatcctgatcactaccaaagattcgacatgaaggcgttcgcttttgtgagcgaggcccatgttctttcttcccttgtctatttccattgcagcgccttaatttgcaaccggctgagcccagactctccattgtgctccgtgacatgtccagtcagcagccggcaccgcagggctacaggagctacagaggctgaaaaaatgactgtcagtctccccggccctatcctgctcctgagtgatgacagtagtttcagaggcgttggctccagtgacctgaaagcctccggatcttctggggaaaagtcacggtccgagaccggggaggaagtgggctccaggggagccatggatacaaaaggccacaagaccgccggcgacgtgggaagtaaagctgtcgcagcggtggcagcctttgccggagtagtggctacactaggtttcatttattacctctatgaaaaacgcacggtttctaaccactag

SEQ ID NO: 123766 - DNA, 1806 bp, synthetic construct
  misc_feature 1..1806: note = Description of Artificial Sequence: Synthetic coding sequence
  source 1..1806: mol_type = other DNA
atggctaagacaccctctgaccacctgttaagcacactggaggagctggtcccttatgactttgagaagtttaaattcaaactacagaacacatccgtccaaaaagaacactccaggattccaaggtctcagatacaacgggcccgccctgtaaaaatggcgacactgttggtgacctactatggcgaggagtacgcggttcagttaaccttgcaagtccttagggccatcaaccagcggctgctggctgaggaactacaccgggcggctatccaggatatggggagttgctatgtggcacaggtgggactggagttactcatctcgaacaatccacctatcttcgcaagtgagaccgccggcattaccggccgaccaccagacacagcggcctccccccggtgtcatgcccaggaaggcgatcccgtagacgggacctgtgtgcgggattcctgtagctttcccgaggccgtctcaggccacccccaggctagcgggagtcgctccccggggtgccccagatgtcaggattcccacgagaggaagtccccagggagtctgagtccccagcctctcccccagtgtaagaggcatttaaaacaggtccaacttctattctgcgaggatcatgacgagccgatctgtttgatctgctctcttagccaggagcaccagggacatagggtccgccccatagaagaagtagctctggagcacaaaaagaagattcagaagcagctggagcatctcaaaaagctgcggaagtcgggcgaggagcaacgctcctacggcgaagagaaggctgtgtcctttctcaaacagaccgaggcattgaaacagcgcgtccagcggaagttagagcaagtttattacttcctggaacaacaggagcattttttcgtggcaagcctggaagacgtggggcagatggtgggtcagatacgtaaagcatatgacacgagagtgtcgcaggatattgcactgctcgacgctctgattggtgagctcgaagccaaagaatgccaaagcgagtgggaactcttacaggatataggagacatacttcacagagctaagacggtgcctgttccagaaaagtggacgactccccaggagataaaacagaagattcagctgctacaccagaagtcagaatttgtggagaagtcaaccaaatattttagtgagacactccgttcagaaatggaaatgttcaatgtacctgagttgataggcgcccaagctcacgccgtcaacgtaatcctggatgctgaaaccgcatacccgaatctcatcttcagcgacgacctgaagtcggttcggcttggtaataaatgggaacgcctgcccgacggccctcagcgcttcgacagctgcatcattgtgttgggttctccttccttcctctctggtcgccgctattgggaagtggaggtcggggacaaaaccgcttggattcttggcgcatgcaagactagcattagtcggaaggggaatatgaccctgagccctgagaatggctattgggttgtcatcatgatgaaagaaaacgagtaccaggcatcatccgtgccaccaacccgacttctcataaaggaaccccctaaacgcgtggggatttttgtcgactacagggtaggatccatcagcttttataacgtcaccgcccgttctcacatttatacatttgctagctgtagctttagcggcccgttacagcctattttttctcccggcaccagggatggcggaaagaacactgcacctctcacaatttgtccagtggggggtcaaggcccggactag

SEQ ID NO: 123767 - DNA, 1239 bp, synthetic construct
  misc_feature 1..1239: note = Description of Artificial Sequence: Synthetic coding sequence
  source 1..1239: mol_type = other DNA
atggcaaaaactccttctgaccacctcctgtctaccctggaagagttagttccctacgactttgaaaagtttaaatttaagctgcagaatacatcggtgcagaaagagcactcccggattcctaggagtcaaatacagcgcgcacgaccagtcaaaatggccacactgcttgtaacttactatggagaggagtatgctgtgcagctgacactacaggttttgcgcgccatcaatcaaaggctgttggccgaggagctccaccgggccgcgatccaagggagacctcccgataccgcagcatctcctcggtgccacgcccaggagggtgatccagtcgatggcacctgcgtcagagattcttgttccttccccgaggcagtgagcggacacccgcaggcttctggaagtcgcagtcccggctgcccacgttgtcaggatagtcacgaaagaaaatccccgggcagtctgtctccccaacccttgccacaatgcaaacggcacctgaagcaggttcagctgttattttgcgaagatcacgatgaacccatctgtcttatctgttccctttcacaggaacatcagggacaccgggtgaggccaatcgaggaagttgcactggagcataaaaagaagatccaaaagcaactggaacatctgaagaagttaagaaagtcgggcgaggagcagcggagctatggcgaagaaaaggcagtctcattcttgaaacaaacagaggctctgaagcagcgggtacaacgtaagcttgagcaggtgtattactttctcgagcaacaggagcactttttcgtggcaagtcttgaggacgtaggccagatggtcggtcagattcggaaagcctatgatactagagtttcacaggacatcgccctgctggatgctctaattggcgagctcgaggctaaggaatgccaaagcgaatgggagctcctgcaggacatcggtgatatactgcaccgagcaaagaccgttccagtacctgagaagtggacaacgccccaggaaatcaaacagaaaatacaattactccaccagaaaagcgagtttgtggagaagagcacaaaatacttttccgaaacccttaggtctgagatggagatgtttaatgatcatagtccgcaacatggcctgggtagctgggaagaaagggattacacacagcactccatgcaggggcccaagcaaggagtaccctgttttctggtggtccggaccgtatag

SEQ ID NO: 123768 - DNA, 1713 bp, synthetic construct
  misc_feature 1..1713: note = Description of Artificial Sequence: Synthetic coding sequence
  source 1..1713: mol_type = other DNA
atggccaaaactccttcggatcatctgttgagcaccctcgaagagctggttccatacgacttcgaaaagttcaaatttaagctccaaaatacatccgtccagaaggaacactctcggatcccccgcagccagatacaacgggcccggcccgtgaaaatggctactctgctggttacttactacggagaggaatatgctgtccagctaacactccaggtcctgagagctatcaatcagcggttgttggccgaggagctgcaccgggcagccatccaggggcggccaccagataccgctgcttcccctcgctgtcacgcacaggagggtgatccagtggacggaacttgtgtgagagactcttgtagctttcccgaggccgtaagtggccacccgcaggctagcgggtctagatccccaggctgtcctaggtgccaggactcccacgaacggaaaagccctggcagtctatcaccccagcccctcccacaatgtaagcgtcatctgaagcaggttcagcttctattttgcgaggaccatgatgaacccatttgccttatctgctctctgagccaggaacaccagggtcaccgcgtgaggcctatagaggaggtggcactcgagcacaagaagaagatccagaaacagttggagcaccttaaaaaactgcgaaagtctggcgaggaacagagaagctatggcgaagaaaaagccgtttctttcttaaaacagaccgaagccctgaaacagagggtgcagaggaagttggagcaagtctactattttctggagcaacaggagcacttttttgttgcttccctggaagacgtcggccaaatggttgggcagattcgcaaggcctatgacactagagtcagccaagatatcgcgctattggatgctctaataggcgaacttgaggccaaggagtgccagagcgagtgggaattacttcaggacattggtgacattttgcatcgggcgaaaacggtgccagtgcccgaaaaatggactacaccccaggaaatcaagcaaaaaattcagttactgcatcagaagagcgagtttgtagagaagtcaacaaagtattttagtgaaaccttgagatctgaaatggaaatgtttaacgttcccgaactgattggagcacaggcccatgcagtcaacgtgattctggatgccgagactgcttatcctaatctaatcttctcagacgatttaaagagcgtgcgtctaggtaacaaatgggagcgtctgcctgacggtccccaaaggtttgattcctgtattatcgttctcggtagtccgtcctttttgtctggcagacgatactgggaggtggaggtgggtgataagactgcttggatactgggcgcgtgcaagacctctatctctaggaagggtaatatgacactcagtccagagaatggatactgggtagtcataatgatgaaagagaacgaatatcaggcgagtagcgtccctcctacaaggcttcttatcaaggagccaccaaagcgcgtaggcattttcgtggactatcgcgtggggagtatcagcttttacaatgtgaccgcacggtcgcacatttataccttcgcctcctgcagtttcagcggccctctgcagcctatttttagtcctgggacgcgcgacggtgggaaaaacacggctccactcaccatatgtcccgtgggcggccagggccccgactag

SEQ ID NO: 123769 - DNA, 1209 bp, synthetic construct
  misc_feature 1..1209: note = Description of Artificial Sequence: Synthetic coding sequence
  source 1..1209: mol_type = other DNA
atggccaagacgccatccgaccacctcctcagtacactcgaggagctggtgccatatgactttgaaaaatttaaattcaagctacagaacacatccgttcagaaggaacactctagaattccaaggtctcagatccaacgggcacgtccagtgaaaatggctacactactggttacatattatggagaagagtacgctgtgcagttgaccctgcaggtccttcgagcgattaaccagcggttactggcagaagagctgcaccgggctgcaatacagggtcggccacccgataccgctgccagccctagatgccacgctcaggagggagacccagtcgatggtacctgtgtccgcgactcatgcagcttcccagaggccgtcagcggacatccgcaggcttccggttcccggtcaccagggtgtccacggtgccaggactctcacgaacgaaaatccccgggcagtctctctccccaacccttaccccagtgtaagcggcatttaaagcaggtccagctgctgttttgcgaagaccacgatgagcccatatgcttgatttgcagtttatcacaggaacatcagggccatcgggtacgacccatcgaggaagtagccctcgagcataaaaagaagatccagaaacagttagaacatctcaaaaagctcagaaaatcaggagaggagcagagatcgtacggagaagaaaaggccgtatctttcctgaaacagaccgaagcattgaaacagcgagttcagagaaaactcgagcaggtgtattactttctggaacagcaggagcacttcttcgtagcttcactggaagacgttggacagatggtgggtcagatcaggaaagcatatgatactcgagtcagccaagacatcgctctcctggacgctctcataggagaattggaagcaaaggaatgtcagtcagaatgggaactactgcaggatatcggtgatattcttcatagagctaagacggtcccggttccagaaaaatggaccactccccaagaaatcaagcaaaaaattcagctgttacatcagaaatcggaatttgtggagaaatcaaccaagtacttcagtgaaactttaaggtcagagatggaaatgtttaatggagagtcaagtggcaatggggtctgttggcccggagtggttgcagtgtttccttgtgcggtggaccttcggggtcctatatag

SEQ ID NO: 123770 - DNA, 1338 bp, synthetic construct
  misc_feature 1..1338: note = Description of Artificial Sequence: Synthetic coding sequence
  source 1..1338: mol_type = other DNA
atggccaagactccttctgatcacctcctgagcacccttgaagagctggtgccttacgatttcgaaaagttcaaatttaaactgcaaaacactagtgttcagaaagaacattccaggattccaaggtcccaaatacagcgagcccgtcctgtgaaaatggctacactgcttgtcacctattacggagaagaatatgcagtgcagctgacactgcaggtccttcgggcaattaaccaacgtctgctcgctgaggagctgcacagagcggcgattcagggacgacctcccgataccgccgcatccccaagatgtcatgctcaggaaggcgatccggtggacgggacctgtgtaagagacagctgtagtttccccgaagctgtctctggccaccctcaagcatctggtagtcgctctcccgggtgtcctcggtgccaggacagtcatgagaggaaaagtcccggatccctttcacctcagcccctgccacagtgtaaaaggcaccttaaacaggttcagctactgttctgcgaagatcacgacgagccaatctgtcttatttgttctctgagccaggagcatcagggccatcgggtccgcccgatagaggaagtggcgcttgagcataaaaagaagatccaaaagcagctggagcatctgaaaaagctcaggaaaagcggagaggagcagaggagctacggagaggaaaaagctgtgtccttcctcaaacagactgaggctcttaagcaacgcgttcagagaaagctggagcaggtgtattattttttagagcagcaggaacattttttcgtcgcgagtctggaagatgtcggacaaatggtaggccaaattagaaaggcttatgacacaagagtctcccaagatatcgcactcctggatgccctcatcggcgagctcgaggccaaggagtgtcaaagcgaatgggaactgcttcaggatataggagacattttacatagagccaaaaccgtgccggtaccagagaagtggaccacaccacaggaaatcaagcagaaaatccagttactgcatcagaaaagcgaatttgtcgagaagtctacgaagtacttttctgagaccctgcggtccgagatggaaatgttcaacgatcacagtccacagcacggactaggaagctgggaagagagagattatacccagcactctatgcagggcccgaagcagggggtcccctgtctatcccttctgtccggacagtgcaacctggcacccctgaatgctaatgcccaggacttctttccttatctgatctttttaagaagctccggcgccgactggagatccggtacttgctgctag

SEQ ID NO: 123771 - DNA, 2067 bp, synthetic construct
  misc_feature 1..2067: note = Description of Artificial Sequence: Synthetic coding sequence
  source 1..2067: mol_type = other DNA
atggcaaaaacaccctcagatcacctacttagcaccttggaagaacttgtgccatacgactttgagaagtttaagtttaaactgcagaataccagcgtgcaaaaagaacattcacggattccaaggagtcaaatccagagggctcggcctgtcaaaatggccactctactcgtgacctactacggagaagagtacgcagtgcagttgacattgcaggtactccgggcaatcaatcagcggctgctggctgaagagctgcaccgtgctgcgatccaggaatattcgactcaggagaatgggaccgacgatagtgcagctagctcttcacttggagagaacaagccacgctcgctgaaaacccccgaccaccccgaaggaaatgaagggaatggtcctaggccctatggaggtggggcagcatctttgaggtgttcccagcctgaagccgggaggggcctctctcgcaaaccgttgtctaagagacgtgaaaaggcaagtgagggacttgatgcccagggaaagccgaggacccgcagcccagctcttcccggcggacgatcaccaggtccgtgtagggcactcgaaggaggccaggccgaagtccggttgagacggaacgctagcagtgccggcaggcttcagggtctggccggaggcgccccagggcagaaagagtgccgaccatttgaagtctacctaccctccgggaagatgcgccctcggtccttagaagtcacaatctccactggtgaaaaggcccccgctaatcctgagatactcctcaccctcgaagaaaagactgccgccaaccttgacagcgctaccgagcctcgggccagacccaccccagacggcggggcctcagcagacctgaaggagggcccaggaaatccggagcacagtgtgactgggcgcccacccgacaccgccgctagtcccagatgccacgcccaggagggcgatcccgtcgatgggacctgcgttcgcgactcctgttcctttcccgaagccgtgtctggacatcctcaggccagtggctctcgcagccccggctgcccaaggtgtcaggactctcacgagaggaagtccccaggctctctgagcccacagccactcccccaatgtaagagacacttgaaacaagtccagcttttattttgtgaagatcatgatgagccgatctgtcttatatgctccttgtcccaagaacatcagggccatcgcgtgcgtcccattgaggaggtggctctggagcacaagaaaaaaattcagaagcagctggagcacctgaagaaactgagaaaaagtggcgaagagcagcggagctacggcgaagaaaaggcagtatccttcctgaagcagacagaagcattgaaacagcgagtgcaaagaaaacttgaacaggtttactatttcctggaacagcaggaacatttttttgtggcttcacttgaggacgtcggacaaatggttggacagatacggaaagcttacgatacacgtgtgtcgcaggacattgcattgctcgacgccctcatcggcgaactggaagccaaggagtgccagagtgaatgggaattgctacaagatatcggagacatactgcaccgtgcaaagacagtgccagtgcccgagaagtggacaaccccccaggagataaaacagaagatccagctgctccaccagaaatccgagtttgtcgaaaaatctaccaagtacttttccgagaccctgaggtcagaaatggaaatgtttaatgtgcctgaactcattggcgcccaggctcacgccgtcaacgtgatcctcgacgccgaaactgcctatcctaacctgatcttttcggacgacctgaaaagcgtgcggctgggaaataaatgggagaggctccccgatggtcctcaacggtttgattcctgcattatcgtcctggggtcaccatccttcctgtccggccgtcgatattgggaagtagaagtgggggataaaaggttttcctgcctgagcctcagaagttcatgggactacagaagaccacccccttgccctgctaattttcttcatttctag

SEQ ID NO: 123772 - DNA, 2796 bp, synthetic construct
  misc_feature 1..2796: note = Description of Artificial Sequence: Synthetic coding sequence
  source 1..2796: mol_type = other DNA
atgcccccattgaagagtcctgccgcttttcatgaacagagaaggtcactcgagagggcgaggacagaggattacttgaagagaaaaatccgctcgaggccagagcgttcagagctggtcagaatgcacatcctggaggagacgtccgcggagccttcgctgcaggctaaacaactgaagctgaagcgtgccagactcgccgacgacctaaatgagaaaatcgctcagaggcccggacctatggaactggtcgagaaaaatatcctacctgttgaatcaagtctgaaagaagcaattatagtgggccaagtgaattaccccaaagtcgcggacagttcgtcatttgatgaggactctagcgacgcactaagcccagagcagccagccagccacgagagccagggtagcgttccctcccccctagaggcccgggttagtgagcccctgttgtctgcaacatcagcctcccccacccaggtcgtgtcgcaactcccaatgggccgggatagccgggagatgctttttctggccgagcaaccgcctctccccccccctcctctgctgccaccgtcccttaccaatggcacaactatcccaaccgccaagtcaactcctactttaattaagcagagtcagccaaaatctgcttctgagaaatcccagcgctcaaagaaagcgaaggaattaaagcccaaggtgaagaagttaaaataccaccagtatattcctcctgaccagaagcaggatcggggggcccccccgatggattcgtcctacgcgaagatattacaacaacagcagttatttttgcagctgcagatcctcaaccagcagcaacaacaacatcataattaccaggccattctgcctgcgcctccgaagagtgctggagaggctctggggagttcagggactccacctgtgcgcagtttgtctaccacgaattcctcctcatcaagtggagcacctggaccctgcggcttggctcgccagaacagtacttcactcaccggcaaacccggtgctttgccagctaacctggacgatatgaaagttgctgagttgaagcaggaactgaagttacggtccctgccggtgagcgggacaaagacggaacttatcgagcggctcagagcataccaggaccaaatctctccggtgcctggagctcctaaagctccagccgcaacttccatacttcataaggccggtgaggtggtcgtcgccttccccgcagctcgtctgagtacagggcccgccctagtagcagccggactggctcctgctgaggtagttgtcgccacagtggcatcaagtggcgttgtcaagttcgggagcaccggatcgacgccgcccgtttctccgaccccttctgaacgatcactgctatcaactggagatgaaaattcgactcctggggacacgtttggagagatggtgacttccccgctgacccagcttacgctccaggcttctccattacaaattctggtcaaagaagaagggcctcgcgccggttcctgttgcctttctccaggggggcgggcagaactagaaggccgcgataaagaccagatgctccaagaaaaggacaaacagatcgaggcattgacccggatgctacgacagaagcagcaattagtggaacgactgaagttacagctagaacaggaaaaacgggcccaacagcccgcccccgcacccgctccactgggcaccccagtaaagcaggaaaactcctttagcagctgccagttgagccaacaacctctaggcccagcccacccgttcaatccgagcttggccgcaccagcaaccaatcacatcgatccttgtgcagttgcacctggtcctcccagtgtagtggtgaagcaggaggctttacagcccgagcccgaacccgtccctgcaccgcagctgcttctcggtccacagggaccatccctgatcaaaggtgtcgcaccacctacactgatcacagattcaacgggcactcatctggtcctgacagtcaccaataagaatgccgattcgccaggcctatcatcagggagcccccagcagccgtccagtcagccaggatctcctgcccccgcccccagtgcccaaatggatctggagcatcctctgcagcctctctttgggacaccaacaagcctgctcaagaaggaacctcccgggtatgaggaggcgatgtcacaacagcctaaacagcaggaaaatggctcatcttctcagcaaatggatgacctgttcgatatcctcatccagtctggcgagatttctgccgacttcaaagagcctcctagtttgccaggcaaggagaaaccatcccctaagaccgtatgtggttcccccttagccgcacagccttccccaagtgcggaattgccacaggcagcgccccctcctcccggatcaccatctctgcctggaagactcgaagattttctggaaagctccactggactgccgcttctcacaagtgggcacgatggacccgaaccactgagcctgattgatgatttgcattctcagatgctgtcgtcaacagcaatcctcgaccatccaccatcacccatggacacaagtgagctgcacttcgtccccgagccctcatccactatgggtcttgacttggcggatggccatctagatagtatggactggctggaactgtccagcggggggcccgttctcagcctggccccgctgtccacaacggcaccctctctcttttctaccgatttcctggacgggcacgatcttcagttgcattgggactcttgtctgtag

SEQ ID NO: 123773 - DNA, 2397 bp, synthetic construct
  misc_feature 1..2397: note = Description of Artificial Sequence: Synthetic coding sequence
  source 1..2397: mol_type = other DNA
atgcctcccctgaagtcccctgctgctttccacgagcagcgccgtagtctggaaagagccagaacagaagactatctcaaaaggaagattcggtcccgccctgaaagaagcgagctcgtacgaatgcacattttggaggagacaagcgccgagccaagcctccaggccaaacaacttaaactgaaacgcgcacggctggcagacgacctgaatgagaagatcgctcagcggccaggaccgatggagttggtggagaagaacatcttacctgtggagagttctcttaaagaggccataattgtcggacaggttaattaccctaaggtggctgattcctcctcattcgatgaggactccagtgacgcactttcgccagaacaacccgccagccacgaaagccagggaagcgtgccgtcccctctggaggcccgggtatccgagccgctcctgtcggctacgtcagcctcaccaacccaggtggtgtcacagctgccaatggggcgagactcaagagagatgctctttctggctgaacagcctccactgccacccccgccacttctgcctccaagtcttacaaatggtacaacaatacctaccgcaaagagtacaccaacactgattaagcagtcccagcccaaatctgcctccgaaaaatcccagaggagtaaaaaagcaaaagaactgaagccaaaagtgaaaaagttgaaataccaccagtatattccccctgatcagaaacaagaccgtggtgctcccccgatggattctagctacgctaagattctacagcagcaacagttattcctgcagctgcaaatcctgaaccagcaacagcagcagcaccataattaccaggcgattttacctgccccacccaagtcagctggtgaagcgctagggtccagtgggacaccacctgtgcggtcactcagtaccaccaactcctcctcaagctccggtgcgcctggcccctgcgggctggcacgccaaaactccacctccctgacaggaaagcccggcgccctaccagccaacctggacgacatgaaggtcgccgaacttaagcaagagctaaaacttcgcagcctgccagttagtggcacaaaaaccgagttgatcgaacgattgcgtgcgtaccaggaccagatctcccctgtccctggagcccctaaagcgcctgcagccactagcatcctgcacaaagccggagaagtcgttgtcgcgttcccagcggcccgtctgtctacagggcccgctctagttgcggccggacttgcccctgcggaagtggtggtggccaccgttgcaagctcgggtgtggtcaaattcggatctaccggctctaccccccctgttagccccacaccttctgagcggagcctcctgagcaccggtgacgagaattccacacctggagatacgtttggtgagatggttacctctcccttaacccagctcacactgcaggcttccccgttgcagatcctggtcaaggaggaaggcccgcgggctggtagctgctgtctaagccctggcggcagggccgaactggagggccgtgataaggaccagatgctgcaagagaaagacaagcagatcgaggccttaacaaggatgttacgacagaagcagcagttggtcgagcgactcaagctgcagttggagcaggagaagcgggcgcaacagcccgcacctgcccccgcccctctggggactcctgtcaaacaagaaaattcgttctcttcctgccagctgagccaacagccgctgggtcctgcgcatcccttcaatccaagccttgctgcgcccgctactaaccacattgatccctgtgctgtggctcctggaccacccagtgtggtcgtaaagcaggaggccctgcaaccagagccagaacctgtccctgctccacaactgcttcttggaccacagggaccaagtctcatcaagggcgtggctcccccaaccctgatcacagacagcactggaacccatctggtgttgaccgtgactaacaagaacgctgattcgcctggcttgtctagtggttctccgcagcaaccctccagccaacctggaagtccggccccagcgccgtccgcacagatggacttggagcacccgctccaaccactctttggtacccctaccagcttgttgaagaaagagcctcccggatatgaggaagcgatgagtcagcagcccaaacagcaagaaaatggctcaagttcacaacagatggatgatctctttgacattttgatccagtcgggcgggaacccacgaaacttttcccgcttccaaggcgctgccattccagcacgtgaaggcgaggcaatcccagaggattccctgtgggtccctcccgggtcaactgctataactttctgttag

SEQ ID NO: 123774 - DNA, 2646 bp, synthetic construct
  misc_feature 1..2646: note = Description of Artificial Sequence: Synthetic coding sequence
  source 1..2646: mol_type = other DNA
atgccaccactaaagtctcccgctgcattccacgagcagagacgatcacttgagagggcacggaccgaggactacctgaaacgcaagatacgctcacgtcccgagagatctgagctggtgcgtatgcatatcctggaagagacgagcgccgaaccaagtctccaggctaaacagctaaaactgaaaagagctaggttagcggacgacctaaatgagaaaattgctcagaggccaggaccgatggagctggtggagaagaacatattacctgtggagtcctctcttaaagaggcaatcattgttggccaggtgaactaccctaaggtagctgatagttcgagctttgatgaggattcaagtgatgcgcttagccctgagcagccagcctctcacgagtcacagggtagcgtgccctctcctctagaagctcgcgtatcagagccactgctaagcgctacttccgccagccctacacagcagagccagcccaaatcggcctcagaaaagtctcaacgaagcaaaaaagccaaggaactgaagccaaaagtgaaaaaacttaaataccatcagtacattccgcctgaccagaagcaggataggggcgcgcctccaatggacagctcgtacgcgaagatactgcagcagcagcaactctttctacaactgcagatcttgaaccagcagcagcagcaacaccacaattatcaggcgatcctgcccgctcctccaaagtccgcgggcgaggccttgggatcttcgggaacaccccccgttcgctccctgagtactactaattccagttcttcctccggtgcgccaggcccatgtggcctagctcgacagaactccacctctttgaccggcaaacctggtgccttgccagcaaacctggacgacatgaaggtggctgagcttaaacaggaactaaagctgaggagcctgcctgtcagtggtaccaagaccgaactgattgagcggctgcgggcctaccaggatcaaatcagtcccgtacctggggcaccaaaagcacccgctgccacatcaatccttcataaggccggcgaagtagtggtggccttcccagcggcccgactctcaacaggcccggctctcgtggcagccgggttggctcccgctgaggtcgtggtggctaccgtagcttcatctggtgtcgtgaaattcggctctactggctcaaccccccccgtgagtccgacaccttcagagagatcactgctgagcactggcgacgagaattccacccctggcgacacctttggggaaatggtcacgtccccgttaacacaactgaccctacaggcatcacctcttcagatcttagtgaaggaagagggaccacgggccggatcctgttgcctgtcacctgggggccgagccgagctggaggggagagacaaggaccagatgcttcaggagaaggacaagcagatcgaagccctcactcgcatgctgcgacagaaacagcagctagtagaacggctgaaactgcagctcgagcaagagaagagagcccaacagccagctcccgcacctgcacccctgggtacaccagtcaagcaagagaactcgtttagctcctgccagctgtcacagcagccactcggtcctgcccacccattcaatccaagtcttgccgccccagcaacaaatcatatcgacccttgcgctgtggcgcccggtccccccagcgtggtggtgaaacaagaggcccttcagcccgagcctgaaccggttcccgctccacagttgctgctaggcccacagggtcctagtctcattaagggcgttgccccccctaccttgatcacagattctaccggcacccatctcgttcttacagttacaaacaaaaacgctgacagtccaggcttgagcagcggcagcccacaacagccgagctcccaacctggaagccccgcccctgcgcctagcgctcagatggacctggagcaccccctccagccactgttcgggacaccaacttccttgctaaagaaggaaccacccggctacgaggaggcgatgtctcagcaaccaaaacagcaggagaatggatctagctcccagcaaatggacgacctgttcgacattctgatccaaagcggcgaaatctccgccgatttcaaggaacccccctcacttccgggtaaggaaaagcccagcccaaagaccgtttgcggatctcctttggcagctcagccatctcccagcgcagaattgcctcaggcagcccctcctcctcccgggagtccgagtctgcccggacgcctcgaggacttcctcgagtcttctaccgggctcccccttttaaccagcggccatgacggccccgagccactgtctctgatagacgatttacacagccagatgttatcctcgacagcaattcttgaccatcctccaagcccaatggacacctcagagctgcattttgtccctgaacccagttccacaatggggctggatctagcggatggacacctagatagcatggattggctcgagctcagcagcggcggccctgttctgagcttagcacccttgagcactaccgctccttcgttattctctacagatttcttggacggtcatgatctgcagttacactgggatagctgtctttag

SEQ ID NO: 123775 - DNA, 2796 bp, synthetic construct
  misc_feature 1..2796: note = Description of Artificial Sequence: Synthetic coding sequence
  source 1..2796: mol_type = other DNA
atgccccccctcaagtcacctgcggcctttcacgaacagagaagaagtctggaacgcgcacgtactgaagattacctcaagcgaaagatcaggtcccgacccgaacggagcgaactcgtgagaatgcacattctcgaggagacctctgcggagccttccctacaagcgaagcagttgaagctgaaaagagctcgactcgccgatgatctgaacgaaaagatcgctcagagacccggccccatggaacttgttgagaagaatattctgcccgtcgaaagctcccttaaggaagccataatcgtcggacaggttaactaccccaaagtggcggactcttcgagtttcgacgaggattcgtccgacgccctctcgccagaacagccagcaagtcatgagagccaaggttccgtgccctctccacttgaggccagagtaagtgagcctttgctgagtgcgacctctgccagtccgacccaagtggtatcccagctgcccatgggccgcgattcgcgcgaaatgctcttcctggccgagcagccacccctgccgcctccccctctgcttcccccaagtttgactaatggaaccactattcccacagcaaagagcacaccaacactgattaaacagagtcaaccgaaaagcgcctccgaaaagtctcaaagatccaaaaaagctaaggagcttaagccgaaggtcaagaaactcaagtaccaccagtacattccacccgaccagaagcaggaccgaggtgctccccctatggactcctcctacgccaagattttgcagcaacagcaactctttctccagctgcagatactcaaccaacagcagcagcagcaccacaactatcaggccattctaccagctccacccaaatccgccggcgaagcactaggatcgagcggcaccccgccagtaagatctttatctacaaccaattcttccagcagcagcggagcacccgggccatgcggcctcgctcgccagaattcaactagcctgactggtaagccaggggcactccctgcaaatctcgatgatatgaaagttgcagagctcaaacaggaactcaaattgcggagcttgcccgtaagtgggaccaagaccgaactcatagagaggttgcgcgcatatcaggatcagatttcgcctgttccaggcgcccctaaagctcctgcagcgacttcaatcttacataaagccggtgaggtcgtggttgcattcccagcagccaggcttagtaccgggcccgcactggtggctgcaggactggctccggccgaggttgttgtggctaccgtagcatcctctggggtcgtgaagtttgggtcgactggatctaccccgcctgtatcaccgacaccatctgaacggtcactgctatctactggcgatgaaaatagtacgcctggggacacattcggcgagatggtgacttcgcccttgactcagctgacgttgcaggcaagcccattgcagatcttagtgaaggaggaaggtccacgggccgggtcctgttgtctctcgccggggggaagggcagagctggagggtagggataaggatcaaatgttgcaagagaaagataagcagattgaagccctcacgaggatgctgcggcagaagcagcagctggttgaaagactgaagttacagctcgaacaagagaaaagggcacagcagcccgctccagctcccgcccccctgggcacccctgttaaacaggagaacagcttttcatcatgccaattatctcagcaaccactaggccccgcgcatccgtttaatccaagtctggccgcccccgcgaccaatcacatcgatccctgtgccgtggcaccgggaccaccttccgtagtggtcaaacaagaggctttgcagccagagccagagcccgtgccggcaccccaactgttactaggcccacaaggcccaagcttgatcaagggtgttgctccaccaactctcattaccgatagcaccggaacccacctggttcttactgtcacaaacaagaatgctgattctcccggcctctcgtccggaagtccccagcaaccctcatctcagcccggaagtcctgcccccgccccttcagcgcagatggatctggaacacccactgcagcctttgttcgggactcctacttccctgctgaagaaagaaccaccggggtacgaggaagccatgtctcagcagcctaagcagcaggaaaatggctcttcctctcaacagatggatgacctctttgatatactcatacaaagtggggagatctcggccgattttaaagagcccccaagtctgcccggcaaggagaaaccatctcccaagactgtgtgcggctctccattggccgcacaaccctcaccctctgccgagcttccgcaggccgctccaccccctcccggttccccaagcttacctgggcgtctggaagatttcttagaaagctccaccgggttgccactgctgacctcaggacatgatggcccagaacctctttccctaattgatgaccttcactctcagatgttgtccagcaccgccattcttgatcaccccccctcaccaatggatactagtgaactccatttcgtgcctgaacctagctcgactatgggcctcgacttagcagatggccatcttgactccatggactggttggagctgtcgtctggggggcccgtgctgtcattggctccgcttagtaccaccgcacccagtctgttcagcaccgacttcttggatggccatgatctgcagctgcactgggactcatgcctatag

SEQ ID NO: 123776 - DNA, 258 bp, synthetic construct
  misc_feature 1..258: note = Description of Artificial Sequence: Synthetic coding sequence
  source 1..258: mol_type = other DNA
atgttgtcaagtacagccatattggaccacccaccctcccccatggacacatccgagctgcacttcgttccagaaccgagctcgaccatgggacttgacctggccgacggccacctggactcaatggactggctagagttgagctctggtggtccggtcctcagtctcgctcccctttctacgacagcaccatccctgtttagtacagacttcctggacgggcacgacctacaactccactgggattcatgcctgtag

SEQ ID NO: 123777 - DNA, 1524 bp, synthetic construct
  misc_feature 1..1524: note = Description of Artificial Sequence: Synthetic coding sequence
  source 1..1524: mol_type = other DNA
atggctggcaggggttccctagtgtcatggagagcttttcacggttgcgactccgcagaggagctccccagggttagtcccagattcctgcgagcctggcacccaccacccgtctccgcaagaatgccgactagacgttgggctcccggaacgcagtgtatcacaaaatgtgaacacacaagacccaagccgggagagttggcgtttagaaaaggcgacgtcgtgactattttagaagcgtgcgaaaataagtcatggtatcgggtcaagcaccatacctcaggccaggaaggtctactggcggctggggccttacgggaaagagaagcacttagtgcagaccccaaactcagtctaatgccttggtttcacggcaaaatcagcggacaagaggcggtgcagcaattacagccacccgaggacggactctttttggtgcgagagagtgcccgccaccctggagactacgtgttgtgcgtgtcttttggaagggacgtcatacactacagagtgctacaccgagatggccatctgacaattgatgaggccgtcttcttttgtaacctgatggatatggttgagcactactcaaaagacaaaggggccatttgcacaaagttggtccgcccgaagcggaaacacgggacaaaatcggcagaggaggaactggcccgcgcaggttggctgctgaacctccaacacctcaccctgggcgctcagattggggagggggaatttggcgcggtactccagggagagtaccttgggcaaaaggtcgctgttaagaacattaaatgcgatgtcaccgcccaggccttccttgacgagacagctgtaatgactaagatgcagcacgaaaacctggtacgcctgctgggcgtgatccttcatcaggggctctatatagtgatggagcacgtcagcaaagggaacctcgtgaattttctccggacacgcggcagggccttagtgaataccgcccaactcctgcagttttccttacacgtggccgagggtatggaatatctggagagtaaaaaacttgtgcaccgcgacttagcagctcgaaacattttggtgtccgaagacctggtggccaaggtgagtgattttggtttagctaaggcagaaagaaaaggcctcgactctagtagactgcctgttaagtggacggctcctgaagcactgaaacatgggaaattcacctctaaatccgacgtgtggtccttcggagtcctgctgtgggaggtcttttcttacggtcgcgccccctaccccaagatgtcactgaaggaagtgtccgaggctgtggagaagggttatcgcatggagccgcctgagggctgcccaggtcccgtccatgtgctcatgtcctcgtgttgggaggcagaacccgcgaggcgaccccctttcagaaagctggctgagaaacttgccagggagctgagaagcgccggggctccagcgtccgtgtccggtcaagacgcagatggctccacctccccccggtcacaggagccatag

SEQ ID NO: 123778 - DNA, 1401 bp, synthetic construct
  misc_feature 1..1401: note = Description of Artificial Sequence: Synthetic coding sequence
  source 1..1401: mol_type = other DNA
atgcccacaaggcgctgggcgcctgggacccagtgcattactaaatgcgaacacacaagaccaaaaccgggagagctggcattccgcaagggcgatgtcgtgacgatcctcgaagcctgtgagaacaaatcctggtatcgcgtgaaacaccataccagcggccaggagggactgctagcagctggcgccctccgagagcgagaagctctctccgccgatcccaaactgtccctgatgccatggtttcatgggaaaatttctggacaagaggccgtgcagcaattgcagccacctgaggacggactattcttggtgcgcgagagcgcccgccatcccggcgactacgtgctgtgcgtaagctttggaagggatgtgatacactatcgggtgctgcatcgggacggacacctcacgatcgacgaggccgtttttttctgtaacttgatggatatggttgaacactatagcaaggataagggcgccatctgcaccaaactggtgcgtcccaaacgtaagcacggcactaaatcagccgaagaggaattggcccgagcagggtggctgctgaatctgcagcacttaaccctgggcgctcagattggtgagggcgaattcggtgccgtgcttcagggagaataccttgggcagaaggtggctgttaaaaatatcaagtgcgatgtaaccgcacaggcatttctggatgagaccgctgtcatgacaaagatgcagcacgagaacctggtgcggctgcttggcgttattctgcaccaaggcttgtacattgttatggaacatgtatccaaagggaacctcgttaattttctgagaacacgaggccgtgccctagtcaataccgcccagctcttgcagttttctttacatgtggccgagggcatggaatacctggagtcaaagaaactcgtgcatcgggacctcgcagcacgcaatatcctcgtctcagaggatctggtcgcgaaggtctctgactttggcctcgcgaaggctgagagaaaggggttggactcctcgcggctgcctgtgaaatggacggcccctgaagcacttaagcatggcaaattcacatcaaagtctgatgtttggtcatttggcgtgttactgtgggaggtattttcttacggtagagccccttaccctaaaatgagcctgaaggaagtatctgaggccgtggagaagggctaccgcatggagccaccggaaggatgtcctggaccagttcacgtgctgatgagtagctgctgggaggcagaaccggcaaggagaccccctttcaggaagctggctgagaaattggcccgggaactgcgctcagccggcgctcctgcttccgtaagcggacaagatgccgacggctcgacctcacctagatctcaggaaccatag

SEQ ID NO: 123779 - DNA, 1527 bp, synthetic construct
  misc_feature 1..1527: note = Description of Artificial Sequence: Synthetic coding sequence
  source 1..1527: mol_type = other DNA
atgcaggggcatttccctgcggagcgacgagaaggtcggcctaggcgggggacccggggccagcagcaacttctggtttcccctcgtttcctgcgggcttggcatcccccccccgtctccgctagaatgcccacccgcagatgggcccctggaacccaatgtatcaccaaatgtgaacatacccgtcctaagccgggcgagttagccttcagaaaaggagatgtcgtgaccatactggaggcctgcgagaacaagtcctggtatcgggtaaagcatcacacttcaggccaggaggggcttctcgccgcaggggccctaagagagagggaggcactgtccgccgaccccaagctgagtttgatgccttggtttcacggtaaaatttccggacaggaggccgtgcagcagttgcagcccccggaggacggactgtttctggtccgcgagtctgctcgacaccccggggactacgttctgtgcgttagctttggacgcgacgttatccactaccgcgtgctgcatagggacggacatctgaccattgacgaggccgtattcttctgtaacttgatggacatggtcgaacactactcgaaggataagggggctatttgcactaaacttgtacggcccaaacgcaagcatggcaccaagagtgcggaggaagaactcgctagagcgggatggctcctcaacctgcaacacctgactctaggggcacaaattggagagggggaatttggagcggtgctgcagggcgaatatctgggacagaaggtcgccgtcaagaatatcaagtgcgatgtaaccgcccaggccttccttgatgaaactgccgtgatgacaaagatgcagcatgagaatctggtacgcttgctcggagtcatcctgcaccaaggactatatatcgttatggagcatgtttcgaaagggaatttggtgaactttttacggactagaggcagagccctcgtcaacacagcccaactgctccaattttctctgcacgtggctgagggtatggagtatcttgagtctaaaaagttggtccacagagatctcgctgcacgcaatattttggtgagcgaggatctcgtagccaaggtctctgactttggcttggctaaggccgagcgtaagggcttggactccagtcgactgcccgtcaaatggacagcacccgaggccctaaaacatggaaaattcacgtccaagtctgacgtctggtctttcggcgtgcttctgtgggaagtgtttagttatggtcgtgccccctatccaaagatgtcactgaaggaggtttcagaggcagtggagaagggctataggatggagccacctgaaggctgtcctggccctgtgcatgtattaatgtcttcatgttgggaagctgagcccgccagaagaccaccatttcggaaactggcagagaaactggcccgcgaacttaggtccgcaggtgcccccgcctccgtatcaggtcaggacgcggacggatccactagccctcgatcacaagagccttag

SEQ ID NO: 123780 - DNA, 1134 bp, synthetic construct
  misc_feature 1..1134: note = Description of Artificial Sequence: Synthetic coding sequence
  source 1..1134: mol_type = other DNA
atgactcaggaaccttttagggaagaattggcatacgatcggatgccgaccttggagcgtggtcggcaagaccccgcctcttacgctcccgatgctaaaccaagcgacctgcagctatcaaaacggctccccccttgcttttcgcacaaaacatgggtgttcagcgttcttatgggctcttgccttctcgttacgtccgggttctctctctatcttggaaatgttttcccagcggagatggattacctcaggtgcgccgccgggtcctgcatcccctccgccattgtgtcctttacagtttctcggaggaatgctaatgtgatcccaaacttccagattctctttgtgtctacattcgcagtaaccacgacatgtcttatttggttcggatgtaagttggtgctgaatccctcagctattaacatcaacttcaacctgattctgctgctgctgctcgaacttctcatggcagccactgtgatcatagccgcaagaagctctgaggaggattgcaagaagaaaaagggctcgatgtcagattcggccaatattttagatgaggtgccctttcccgctagggttctcaaatcttatagcgtcgtcgaggtgatcgctggcataagtgccgtgcttggtggcattatcgccctgaatgtggacgattcagtttctggtcctcatctgtccgttacctttttctggattctggtcgcatgttttccctccgcaattgccagccatgtggcagccgaatgcccaagcaagtgccttgttgaggtgctcattgccatttcatcactcaccagccctctgcttttcaccgccagcggctacctctcattttctatcatgcggattgtggagatgttcaaagactatccgccagcaataaaaccgtcttatgacgtgctgctccttctgctcttgttagttttacttttgcaagccggtctgaacactgggactgcaatacagtgcgtgcgttttaaggtgtctgctaggctccagggggccagctgggacacccagaacggccctcaggagcgcctggccggcgaggtcgctcgatccccactgaaagagtttgacaaagagaaagcgtggagggcggtggtggtgcagatggctcaatag

SEQ ID NO: 123781 - DNA, 1134 bp, synthetic construct
  misc_feature 1..1134: note = Description of Artificial Sequence: Synthetic coding sequence
  source 1..1134: mol_type = other DNA
atgacccaggagccttttcgggaagaactggcctacgatcgaatgcctaccctcgaacgcggtaggcaggatcctgcttcgtacgcaccagatgccaagcccagtgatttgcaactaagcaagaggttgcccccttgcttttcgcataaaacctgggtattcagcgtgctcatgggatcttgccttctcgtcacaagcggtttctccctctacctggggaacgtctttcccgccgagatggattatcttagatgcgcggccggaagctgcatacctagtgctatcgtctcgttcaccgtaagtagaagaaacgccaatgtgattccaaactttcagatactgttcgtgtccacgttcgcagtgacaactacttgtcttatatggttcggctgtaagttggtcttaaacccgagcgccatcaacattaatttcaacctgatactgctcctcctgctggaattgttaatggctgctactgtgatcatagctgcgcgttccagtgaggaagactgtaaaaagaagaagggatcgatgtccgattcagcaaacatcctcgatgaggttcccttcccagcgcgagtcctcaaatcatactccgtcgtggaggtgatcgcaggcatcagcgcagtgctagggggcataatagccctgaacgtcgatgactcagtctccggaccccacctctctgtgaccttcttctggatcctggtcgcctgcttcccttctgcaattgcttctcatgtcgccgccgagtgccctagtaagtgtcttgtggaggtgctcattgctataagcagcctgaccagcccacttctattcaccgctagcggctatctctctttctctatcatgcggatagtggaaatgtttaaggactatccccctgcgatcaaaccaagctacgacgtactgcttctgctccttttgctggtgcttctccttcaagcgggcctcaacacaggaaccgcaatacagtgtgtgcggttcaaggtcagcgcccgtcttcagggagccagttgggacacacagaacggcccccaggaacgcctagccggtgaggtggccaggtcacccctgaaagagtttgacaaggagaaagcttggcgcgccgtggtcgtacagatggcccagtag

SEQ ID NO: 123782 - DNA, 1044 bp, synthetic construct
  misc_feature 1..1044: note = Description of Artificial Sequence: Synthetic coding sequence
  source 1..1044: mol_type = other DNA
atgacccaagagccattccgcgaggagcttgcctatgacagaatgccaacgctggaaagaggtcggcaagatcccgcttcatacgcaccagacgccaagcccagcgatctgcagttgtcgaaaaggctacccccatgcttctcccacaagacgtgggtgttctcagttcttatgggctgcattcctagtgccatagtgagcttcacagtctcacgtagaaacgcaaacgtgattcccaactttcagattctcttcgtatccacattcgcagtcaccaccacttgtcttatttggtttggttgcaaactcgtccttaatccatcagcaatcaatataaactttaacttaatcctgctgttactcttagagctcctcatggctgctactgtcatcatcgcagcaaggagcagtgaggaggactgtaaaaagaagaagggaagtatgtccgactctgcaaacattctcgacgaggtgccattccccgcgcgggtcctaaagtcttactccgtagtcgaggttatagccggaatctccgctgtgctcggcggaataatagctctgaatgtggacgattccgtgagcgggccccacctgtcggtcaccttcttttggatactggtggcatgttttccaagcgctatcgcatcgcatgtggccgcagaatgcccaagcaagtgtctggtggaggtgctgatagccatttcttccctcacctcgcctctgctgtttaccgcttctgggtatctgagctttagtattatgcgcatcgtggaaatgtttaaggactacccacctgctatcaagccctcatacgatgtactgctgttgttgctactcttggttctgctgctgcaggctggcctgaacaccggcactgcaatccagtgcgtgcggttcaaagtatcggcgagattgcagggtgccagctgggacacccaaaatggcccacaggaacgcttagccggagaagtcgcacgttctccattaaaggagttcgataaggaaaaagcctggcgcgccgtcgtggtgcagatggcccaatag

SEQ ID NO: 123783 - DNA, 672 bp, synthetic construct
  misc_feature 1..672: note = Description of Artificial Sequence: Synthetic coding sequence
  source 1..672: mol_type = other DNA
atgacccaagagccgttccgcgaagagttggcgtacgaccggatgcctaccctggaaagaggtcgacaggatcctgccagttatgcaccagacgccaagccgagcgacctccagctatcaaaaaggctgcccccgtgcttcagccataaaacgtgggttttcagcgtgctcatgggatgcattccttccgccatcgtgagtttcaccgtgtcacggcgcaatgcaaacgtaattccaaattttcagattctctttgtgtccacctttgccgtgaccacgacttgtctgatctggttcgggtgtaagcttgtcctgaacccgtctgcaatcaatataaacttcaacctcattctgctgttgctgctggagttgcttatggctgcaacggtcataatagcagcacgaagcagtgaagaggattgtaaaaagaaaaaagggtcgatgagcgacagcgccaacattctcgacgaagtgcctttcccagccagagtactgaagagttatagcgtggtcgaggtgatcgccggaatttccgctgtgttaggtggcatcatcgccttgaatgtggatgattccgtgagtgggccacatctttccgtgacgttcttctggattctggttgcctgctttccatccgccatagcatcccatgttgctgccgaatgtccttag

SEQ ID NO: 123784 - DNA, 978 bp, synthetic construct
  misc_feature 1..978: note = Description of Artificial Sequence: Synthetic coding sequence
  source 1..978: mol_type = other DNA
atgacccaggaaccgtttagagaggaactcgcttacgatcggatgcctacccttgaacgtggccgccaggatcctgcctcatacgcccccgacgctaagcccagcgacctccaactgagcaaaaggctgccaccctgcttttctcacaagacgtgggtgttctcagtgctaatggggtcttgtctgttagttacaagcggtttctcgctgtacctggggaacgtgttcccagctgaaatggactatttaaggtgcgccgccgggtcaatcaatttcaatctaatcttactgctgctgctggaactgctgatggcggccactgtgatcattgcggcaaggagcagcgaggaggattgtaaaaagaaaaagggttctatgtccgactccgctaacatactcgacgaggtaccatttcccgccagggtgctgaagtcttattcagtagtcgaggtgattgctggaatctcagcagtactcggagggattatagctctgaatgtagatgatagtgtaagtggccctcacctgtcggttacattcttttggattctggttgcttgcttcccgtccgccatagcctctcatgtagctgccgaatgtccaagtaagtgcctggtggaggtgttgattgctatttctagtttgaccagtccactgctttttacggcatccgggtacctgagtttctccattatgcggattgtcgaaatgttcaaggactaccctcccgccatcaaaccctcttatgacgtccttttgctgctcctccttctcgtattgcttttgcaggccggcttaaacaccgggacggcaatccaatgtgttcgcttcaaagtcagtgcccgcctccaaggggcctcttgggacactcagaacgggcctcaggagcgtctcgccggcgaggtcgcaaggagtccgctgaaggagtttgataaggagaaggcctggcgcgccgtggtcgtccagatggcccagtag

SEQ ID NO: 123785 - DNA, 897 bp, synthetic construct
  misc_feature 1..897: note = Description of Artificial Sequence: Synthetic coding sequence
  source 1..897: mol_type = other DNA
atggactacttgaggtgcgccgccgggagttgcattccttccgctatcgtgtcatttacagtgagccggcggaacgctaacgtgataccaaacttccagattctttttgtttccactttcgcagtcacaaccacatgcctgatatggtttggctgcaaactcgtgcttaacccttccgcaatcaatattaatttcaacttaatccttcttttactgctcgagctgttaatggctgccaccgtaataatcgccgccaggtcatctgaggaggattgtaaaaagaaaaaggggtcaatgtccgacagcgccaatattctcgacgaggtgcctttccctgcaagagttctcaagagctatagcgttgtcgaagtgatagccgggatctccgctgtccttggaggaataatagcccttaacgtggacgactcagtgtccggacctcacctgagcgtgacattcttctggattcttgtcgcttgcttccccagcgctattgcttcacacgtggccgctgagtgccccagtaagtgcctcgtggaagtgttgatcgcaattagcagtttaaccagcccacttctcttcaccgcctcagggtacctgtctttcagtattatgaggatcgtagagatgttcaaggattatccgccagcgattaagccatcctacgatgtgctgttactgctgctgcttctggtgttgctgttgcaagcaggtctgaacacaggcacagccatccagtgtgtccgcttcaaggtgagtgcccgacttcagggagctagctgggacacacagaacgggccccaagagcgattagcaggcgaagtggcccgcagtcctctgaaggaattcgacaaagagaaagcatggagagccgtagtggtccagatggcccagtag

SEQ ID NO: 123786 - DNA, 1032 bp, synthetic construct
  misc_feature 1..1032: note = Description of Artificial Sequence: Synthetic coding sequence
  source 1..1032: mol_type = other DNA
atgacgcaggaaccttttcgggaagagcttgcttacgatcgaatgcctaccttagaaagaggcaggcaggacccagcctcttacgccccagacgccaaacctagcgatttgcaattgagtaagagactaccaccctgcttcagtcacaagacttgggtattcagtgttctaatgggcagttgtctcctagtaacgtctggttttagcctatacttgggaaacgtcttcccggcagaaatggactatctgcgctgtgccgcggggtcctgcatcccaagtgctatcgttagctttaccgtctccaggcggaacgctaacgtgataaacttcaacttgatcctcttgctccttctggaactcttaatggcagcaacagtgattatcgccgcgcggtcatccgaggaggactgcaaaaaaaagaagggtagtatgtccgacagcgccaacattttggacgaagtgccttttccagcacgcgtgttaaaaagttactccgtggtggaggtgattgctggcattagcgcggtgttaggtggcattattgcactgaacgtagacgattcggtctcgggcccccaccttagtgttacattcttttggatcctggtcgcctgcttcccgtcagctatagcgtcccatgtcgccgctgagtgcccatccaagtgtctcgtagaggtactgatcgccatttctagcttgacatccccgctgctcttcacagcctcaggctatctgtctttcagtattatgcggattgtcgagatgttcaaagactatccacctgctatcaagccatcctacgatgtcctcctcctccttctcctcttggtgcttctgctgcaggcagggctgaacaccggaacggccatccaatgtgtgcgatttaaggtgtccgcaagactgcagggcgcatcatgggatacccaaaatggaccgcaggagagactggccggggaagtcgcaagatcccctcttaaggagttcgataaggagaaagcctggcgtgccgtcgttgtgcaaatggcgcaatag

SEQ ID NO: 123787 - DNA, 267 bp, synthetic construct
  misc_feature 1..267: note = Description of Artificial Sequence: Synthetic coding sequence
  source 1..267: mol_type = other DNA
atggcctcaagcgatgtgaaaccaaaatcagtctcccatgccaaaaaatggagcgaggaaatcgaaaacctttataggtttcaacaggctgggtatagggatgaaactgagtaccgccaggtgaaacaggtcagtatggtcgatcggtggcccgagactgggtacgtcaagaaacttcagagacgagataatacattctattattacaataaacagagggagtgtgatgataaggaagttcacaaagtgaaaatttacgcatattag

SEQ ID NO: 123788 - DNA, 267 bp, synthetic construct
  misc_feature 1..267: note = Description of Artificial Sequence: Synthetic coding sequence
  source 1..267: mol_type = other DNA
atggcttcttctgacgttaaacccaaatctgtgagccacgcgaagaagtggtccgaggaaatagagaacctttatcggttccaacaggccggatacagggacgaaacggagtacagacaggtaaagcaggtcagcatggtcgatcggtggccagaaacaggttacgtcaaaaagctgcagaggagggacaataccttttactactataacaagcagcgtgaatgtgatgataaagaggtccacaaggtgaaaatctatgcttattag

SEQ ID NO: 123789 - DNA, 1488 bp, synthetic construct
  misc_feature 1..1488: note = Description of Artificial Sequence: Synthetic coding sequence
  source 1..1488: mol_type = other DNA
atgggctccaagaggcggaacctgagttgcagtgaaagacaccagaaactggttgacgaaaattattgtaagaaactgcacgtccaggccctgaaaaatgttaattctcaaatacgcaatcaaatggtacagaacgagaatgacaacagagtccagcggaagcagttcctgaggctgctgcagaacgagcagtttgagctggatatggaggaagccatacagaaagcggaggagaacaagcggctgaaagaactccagttgaaacaggaagagaaactcgccatggaactagctaaattgaagcatgagagtttgaaggatgagaaaatgcgtcagcaggtgcgagaaaattccatcgaactgcgcgaactggagaagaagctaaaggcggcatacatgaataaggagagagcagcccagatagccgaaaaggatgccattaagtatgaacagatgaagcgggatgctgagattgcaaaaactatgatggaagagcacaagcgcataatcaaggaagagaacgcagcagaagataaacggaacaaagccaaggcacagtattatctcgatcttgagaaacagcttgaggagcaagaaaaaaaaaaacaggaggcctacgagcagctgctcaaggagaagctgatgatagacgaaatagtaagaaagatctacgaagaagatcagctggaaaagcaacagaagttggagaagatgaacgccatgcgcagatatatcgaggaatttcagaaagagcaggctctctggagaaaaaagaagcgtgaagagatggaggaagagaataggaaaattatcgaattcgctaacatgcagcagcagagagaagaagatcgaatggccaaggtccaggagaatgaagagaaacggctccagctgcaaaacgccttgacgcagaagctggaggagatgttgcgacagagagaggatctggagcaggtcagacaagaactgtaccaggaggaacaggctgagatctacaagtccaaactaaaggaagaagcagaaaagaagctgaggaaacagaaagaaatgaagcaggatttcgaagagcaaatggctctcaaagaactggttctgcaggccgcaaaagaggaagaagagaatttccgtaagacaatgctggccaaattcgccgaagatgaccgtattgagctcatgaacgctcagaagcagcgcatgaagcaactggagcataggagggctgtcgaaaaactgattgaagagcggagacagcagtttctggcagacaagcagagggagctggaggagtggcagctccagcagaggcggcaggggttcatcaatgctataatcgaagaggagagactcaagctcctcaaagagcatgctaccaacctcctgggttacttgcctaagggcgtttttaaaaaggaggacgacattgacctcttgggggaggaatttaggaaagtgtatcaacagcggtcagaaatatgtgaggagaaatag

SEQ ID NO: 123790 - DNA, 1173 bp, synthetic construct
  misc_feature 1..1173: note = Description of Artificial Sequence: Synthetic coding sequence
  source 1..1173: mol_type = other DNA
atggcccaaagatatgacgacctgcctcattatgggggaatggacggcgtgggcatcccatcgactatgtacggcgatccccatgctgctcggtcaatgcagcccgtgcatcacttgaaccatggacctcccttgcattcccatcagtatccacacaccgcccacaccaacgccatggccccgtcgatgggctcttccgttaacgatgccttgaagcgcgataaagatgcaatctatgggcacccgctgtttccactgctggcactgattttcgagaaatgtgaactcgcaacctgcacgccccgcgagccaggtgtagccggcggggatgtgtgctctagcgagagtttcaacgaagatatcgccgtgttcgcaaaacagatcagagccgagaaaccgctcttctccagcaacccggagctcgacaatctcatgattcaggccatacaagtgctccggtttcacctcctagagcttgagaaagttcacgaactctgtgataacttctgccacagatatatctcctgtcttaagggaaagatgcccatcgaccttgtaatagatgatagagagggcggtagcaaatccgacagcgaagatatcaccagatctgcaaatctcaccgaccaaccctcttggaatcgcgatcacgacgacacagcctccacccgaagcgggggcacacccgggccgtcaagcggcggacacacttcacacagcggcgataattcgtctgagcaaggagatggtcttgacaactctgtagccagtccgtcaactggggacgatgacgatccggataaagataagaagaggcataaaaagcgcggcatctttccaaaggtggcaactaatattatgagggcgtggctcttccaacacctaactcatccatatcctagtgaagaacagaagaagcagttggcccaggataccggactgaccattttgcaggtgaacaactggtttattaacgctcggaggaggattgtccaaccaatgatcgatcagtctaaccgagccgtgagccagggcaccccatataacccagatggacagcccatgggtgggtttgtgatggatgggcagcaacacatgggcatcagagcccctggaccgatgagtggcatgggtatgaatatggggatggaggggcaatggcattatatgtag

SEQ ID NO: 123791 - DNA, 1392 bp, synthetic construct
  misc_feature 1..1392: note = Description of Artificial Sequence: Synthetic coding sequence
  source 1..1392: mol_type = other DNA
atgcaatacgatgacctgccacattatgggggtatggacggagtcggaatcccttctaccatgtacggcgatccccacgccgcaaggagtatgcagccagtgcatcatctgaaccatggcccaccccttcacagccatcagtaccctcacacggcccacacgaacgctatggcccccagcatgggctcaagcgtcaacgacgccctgaagagagacaaagatgcaatttatgggcatccattgtttcccctgttagccttaatttttgagaaatgcgagttagcgacctgcacccctcgcgaaccaggggtggccggaggtgacgtctgcagctccgagtccttcaatgaagatatcgcggtgtttgccaagcagatacgggccgaaaagcctctgttttcatccaacccggagttggacaacctcatgattcaggccatccaggttttacgattccatttgctcgagctagagaaagtgcacgaactgtgcgacaatttctgccatcgttacatttcatgtctcaaaggcaaaatgccgatcgatttagttatcgatgatcgtgagggcggatctaaatctgacagcgaggacatcacgcgctcagccaacctcacggaccaaccctcctggaacagggaccacgacgatacggcctccactcgtagcggcggtactcctgggcccagttccggcggccacacatcccacagtggcgacaatagttccgagcagggcgacggattagataacagtgtcgcctcaccttctacaggggacgatgacgatcctgacaaagacaaaaaacgtcacaaaaaacgcggtatcttcccaaaggtggcgaccaacattatgcgggcctggctgtttcagcaccttacacacccgtaccctagtgaggagcagaagaagcaactggcgcaagataccggactgacaatcctgcaggtaaacaattggtttattaacgcgcgccgaaggattgttcagcctatgattgatcaaagtaaccgggccgtctcacagggtacaccgtataatcctgacggacagcctatggggggctttgtgatggacggacagcagcacatggggattagagctccaggacttcagtctatgccgggggaatacgtggcccggggtggcccaatgggcgtcagcatgggccaaccaagttacacccagccccaaatgccaccccaccccgctcaactgcgccacggccctcctatgcacacctatattccaggccacccccatcatcctacagtaatgatgcacgggggcccaccacaccctggcatgcctatgagcgcttcttctccaactgtactaaacaccggcgatcccacaatgtccggacaggtcatggacatccacgcccagtag

SEQ ID NO: 123792 - DNA, 762 bp, synthetic construct
  misc_feature 1..762: note = Description of Artificial Sequence: Synthetic coding sequence
  source 1..762: mol_type = other DNA
atgattcaggcgattcaagtgctgcggttccatctgctggagctcgagaaagtacatgagctgtgtgataacttctgccataggtatatttcatgcttaaaaggcaagatgccgatagacttggtgatagacgaccgcgagggaggcagcaaatctgacagtgaggatatcaccagatccgcaaatctgacggaccagccctcgtggaatcgggaccatgacgacaccgcctccacccgctctggtggcactcccgggcctagctccggaggccacacaagccactctggcgataatagttctgagcagggcgacggtttggacaattctgtagcatctccgagcacgggcgacgatgacgaccctgataaagataagaagcgccataaaaaacgcgggatttttcctaaagtcgcaacaaatataatgcgcgcatggctgttccagcatctgacccacccatatccatctgaggaacaaaaaaaacaactggcccaggataccggtctgactatactgcaggtgaataattggttcataaacgcccgccgccgtattgttcaacctatgattgatcaatctaatagagccgttagtcaaggaacaccttataaccctgacgggcagcctatgggaggattcgtcatggacggccaacagcacatgggtattagagcacccggtcccatgagtggaatgggtatgaatatggggccgccgtgtatacgaactttcctggatacattaactactcaacaatag

SEQ ID NO: 123793 - DNA, 1398 bp, synthetic construct
  misc_feature 1..1398: note = Description of Artificial Sequence: Synthetic coding sequence
  source 1..1398: mol_type = other DNA
atggcgcagcgctacgacgatctgccacactatggggggatggacggagtgggcatcccttcaactatgtacggtgatccccacgcagctaggtccatgcagccagttcatcatctcaaccatggccctcctcttcattcccaccagtaccctcacacagcccacacaaatgctatggccccatccatgggctcaagcgtgaatgatgccttgaaacgagacaaggacgctatctacggacaccccctgtttcctctgttggccctcatcttcgaaaagtgcgagctcgctacatgcaccccccgcgagccgggagtagcaggtggagatgtttgcagttcagaaagtttcaacgaggacatcgccgtgttcgctaaacagattcgggcagagaagcctctgttctccagcaatcctgagctggataacctgatgattcaggctatccaggtcctgaggttccacctcctggagttggaaaaagtccacgagttatgtgacaatttctgccataggtatataagctgtcttaagggaaaaatgcctatcgacttggtaatcgatgacagggaaggtggcagcaagtccgattcagaagacattactcggagtgcaaaccttacagatcagccatcttggaaccgtgaccacgacgatactgcatcgacccgcagcggcggaacaccaggtccatcctcaggaggccatactagtcattcaggggataacagctctgaacagggcgacggattagataactccgtcgcgagcccttctaccggggacgatgatgatcctgataaagacaaaaagcggcataagaagcgcggcatttttcccaaggtcgcaactaatattatgcgagcttggctattccagcatctcacacacccgtacccttccgaggagcaaaagaagcagttggcgcaagatactggattaaccatcttgcaggtaaataactggttcattaacgctcgccgacggattgtgcagcctatgattgatcagtcgaacagagcagtctctcaaggaacgccctataaccctgacggtcagccaatgggaggtttcgtgatggacggacagcagcatatgggcattagggcacctggcctccagtcaatgccgggggagtatgtggcccggggcgggcccatgggcgtttccatggggcagccgtcctatactcagccgcagatgccgccccaccctgcacaactccggcacggaccccctatgcacacctatatccctggtcatccccaccatccaaccgtgatgatgcatgggggacctccgcaccccgggatgcctatgagcgcttccagtcctactgtgcttaataccggtgatcccaccatgtctgggcaagttatggacatacatgcccagtag

SEQ ID NO: 123794 - DNA, 423 bp, synthetic construct
  misc_feature 1..423: note = Description of Artificial Sequence: Synthetic coding sequence
  source 1..423: mol_type = other DNA
atgaaaaaaaatggggacgaaaaatcccctttgggtacggagattatgatgacacgccatcttctggttcaagaagagccccaagcgctccccgctgtggcgacacggcataccgttgggaccacggctgtcagcaagcatccttacccaagtgaggaacagaagaagcagttggcccaagataccggactcaccatccttcaagttaataattggttcattaatgccaggaggagaattgtccagcctatgatcgatcagagcaatagggccgtgagccagggtaccccctataatcccgatggacagccaatgggaggatttgtcatggatggccagcagcatatgggaatcagagcgcctggcccaatgtccggaatgggaatgaatatgggcatggagggacaatggcactatatgtag

SEQ ID NO: 123795 - DNA, 663 bp, synthetic construct
  misc_feature 1..663: note = Description of Artificial Sequence: Synthetic coding sequence
  source 1..663: mol_type = other DNA
atgcagcccgtccatcacctgaatcacggaccacctctgcatagtcatcaatacccgcataccgcccacacaaacgctatggcacccagcatgggatcttccgtgaacgatgctcttaagagagacaaggacgccatctatgggcaccccctttttcccctcctggctctgatcttcgaaaagtgcgaactggcaacctgtacacccagggagccaggagtagccggtggcgatgtatgtagctccgagagctttaacgaggacattgcggtgttcgctaagcagatcagggccgaaaaacccttattcagttctaacccagaactagataatctcatgattcaagctattcaggtcctccgctttcacctgttagagctggagaaagtgcacgaactgtgcgataacttttgccatcgctatattagttgtctgaaaggcaaaatgcctatcgacctcgtgattgatgaccgagagggtgggagcaaatctgactctgaggacatcacccgctctgcaaaccttactgatcaaccctcctggaacagggaccacgacgatacagcctccacacgaagtggcggaaccccgggcccttcctctggagggcacacttcacattccggggataatagttccgagcaggcccccctgcctttctag

SEQ ID NO: 123796 - DNA, 540 bp, synthetic construct
  misc_feature 1..540: note = Description of Artificial Sequence: Synthetic coding sequence
  source 1..540: mol_type = other DNA
atgaaaagcctactcaccttttacaagtgcgggtctgaactgttgcctgcagccgtgtggtccgccgggggctcaccatccttgtttagcgacctcaaatccaagaagggaaagaagtttagcagggaccatattgaggtgacaattagcaactgcggtgtgaatgggaatgcaaaaggggacggcttggacaacagcgtggcctcacccagcacaggcgatgacgacgatcctgacaaggacaagaagcgccacaaaaagagagggatctttcccaaggtagccacaaacattatgcgggcttggctctttcaacatctaactcacccatatccctcagaggagcagaaaaaacagcttgcacaggataccggactcactattctacaagtaaataactggttcattaacgcccgcaggcggatcgtccagcccatgattgatcaaagtaatcgagccgtgtctcagggcacgccctataatccagacggccaaccaatgggcggctttgttatggacgggcaacagcatatggggtag

SEQ ID NO: 123797 - DNA, 978 bp, synthetic construct
  misc_feature 1..978: note = Description of Artificial Sequence: Synthetic coding sequence
  source 1..978: mol_type = other DNA
atggcccaggggctgcgtctgcaaggctcccgccgcaaagggcgacacccgctctttccactgctggcactgatcttcgaaaagtgcgagctcgctacatgtactccccgcgaaccgggcgtggccgggggcgatgtttgctccagtgaaagctttaatgaggacatagctgttttcgctaaacagatcagggctgaaaagccgctatttagcagcaacccagagctggacaacctcatgatccaggcgatccaggtgctgaggtttcatctactcgaactcgagaaggtgcacgagttgtgcgacaacttttgccatcgatacatcagctgcctgaagggcaagatgcctattgatctggtgatcgacgatcgagaaggcggaagtaagtccgactcggaggatatcacacgtagcgcaaatcttaccgaccaaccctcctggaatagagaccacgacgacacagcaagtactcggagcggcgggacccccggaccctcatcaggagggcatacttcacactcgggggacaactcaagtgaacaaggcgatggcctggacaatagcgtggcgtctccatccaccggggacgatgacgatcctgataaagacaaaaagcgccacaaaaaaagaggaatcttccccaaggtggccacaaatatcatgcgcgcttggttattccaacacttgacacatccataccccagcgaagagcaaaagaaacagcttgcacaggacactggcctgacaatcttacaggtgaacaactggttcattaatgcaagacgccgtatcgtgcagcctatgattgatcaatctaacagggccgtatcccagggcaccccctacaatccggacggccagccaatggggggcttcgtaatggacggtcagcagcacatgggcatcagggcccctggtcctatgtctggcatgggtatgaacatggggatggagggccaatggcactatatgtag

SEQ ID NO: 123798 - DNA, 1113 bp, synthetic construct
  misc_feature 1..1113: note = Description of Artificial Sequence: Synthetic coding sequence
  source 1..1113: mol_type = other DNA
atggctcagcgctacgacgacctgccgcattatggcgggatggacggggtgggcattccaagtaccatgtacggggacccacacgcagcaagatccatgcaacccgtgcaccacctcaaccatgggccacccctgcatagccaccagtaccctcacacagctcataccaatgccatggctccctcaatgggctcgagtgtgaacgatgccctgaagcgcgataaggacgcgatctatggtcacccattattccccctgcttgccctgatttttgaaaaatgcgagttagcaacttgcacaccacgcgagccaggcgtcgcgggtggcgacgtgtgctcctccgagagctttaatgaggatattgcagtctttgctaagcagattagggctgaaaagccgctattctctagcaatcctgagttagataacctaatgatacaagcaattcaagttctaaggtttcacctactcgagttggagaaagtccacgaactgtgcgataacttctgccataggtacatcagttgtttgaaagggaagatgccaatagatcttgtcattgacgaccgtgaaggaggctccaaatctgattccgaggatatcacgaggagcgctaacttgacagatcaaccgagttggaatcgggatcacgacgataccgccagtacaagatccggcggcacacctggtcccagttccggtgggcatacttctcacagcggagacaatagcagcgagcagggggatggcctcgataattcagtggccagccccagtacaggtgatgacgacgaccccgataaggacaaaaaacggcacaagaaaagaggcatattccctaaggtagccactaacattatgagggcgtggctgttccagcatctgactcacccctatccttcagaggaacagaagaaacaactggcacaggacacggggctgaccatactgcaggtcaataattggtttattaatgccaggcggcgtattgtgcagccgatgattgatcagagtaaccgcgcaggaaagtcccctatcgtgaccgtctttaagtccaggaaacggaagccatcctcctcacattcacctggcggaccactgccaggcaagtag

SEQ ID NO: 123799 - DNA, 2259 bp, synthetic construct
  misc_feature 1..2259: note = Description of Artificial Sequence: Synthetic coding sequence
  source 1..2259: mol_type = other DNA
acaactgctatggcacataggaagctcgagtccgtgggctccggaatgctagatcacagagttcgccccgggcccgtaccacacagtcaagagcccgaatctgaagatatggagctgcctctggaaggatatgtcccagaggggttagagctcgccgccctccgacctgaaagcccagcacccgaagagcaggagtgccacaaccattctccagacggcgattcctcctcggactatgtgaataatacaagtgaggaggaggactatgacgaggggcttccagaagaagaggagggcataacctattacattcgctactgcccagaggacgattcatatttagagggcatggactgcaacggagaggaatacctagctcatagtgctcacccagtggatacagatgagtgtcaagaagccgtcgaagaatggacagatagcgccggccctcaccctcacggccacgaagcggagggcagccaggactatcctgatggacagttacctatccccgaggatgagccctccgtgctcgaggcccatgaccaggaggaggatggccattactgtgcttcaaaggaagggtatcaagactactatccagaggaagctaatggaaacactggcgccagcccttaccgtctgcggagaggggacggggatttagaggaccaagaggaagacattgatcaaatcgtggccgaaatcaagatgtctctgtctatgacaagcatcacgagcgcctctgaagccagcccagaacatgggcccgagccaggcccggaggactccgtcgaagcctgcccacctattaaggccagttgctcaccctctaggcacgaggcaagacctaagagcctgaacctgctgcctgaagcgaagcacccaggagaccctcaacgcgggttcaagcccaagacacgcactcccgaggaaaggctcaaatggcctcacgagcaagtctgcaatggccttgagcagccccggaagcaacagaggtccgaccttaatgggcccgttgataacaataacattcctgaaactaaaaaagttgcatcttttccctccttcgtggcagttccgggaccctgcgagcccgaggatctcatagatggaattatatttgcagccaattatctggggtccacccagttacttagcgagcggaacccatccaagaacatccgcatgatgcaggcacaggaggctgtgtctagagtgaagcgaatgcagaaggctgccaaaatcaagaaaaaggctaatagtgaaggagacgctcagaccttgaccgaagttgatctttttatctccacccagcggattaaagtgctgaacgccgacacccaggaaacaatgatggaccacgcactccggactatatcgtacatcgccgacataggcaacatcgtcgtgttgatggctaggcggaggatgccccgaagtgcctctcaggactgtatcgaaaccacacccggagcccaagaaggaaagaaacagtacaagatgatttgtcatgtgtttgaaagcgaggacgctcagctgatcgcccagtcgatcggccaagctttctcggtggcctatcaggagttcctaagagccaacggcattaatcccgaggacctatcccagaaggaatatagtgatattatcaacactcaggaaatgtataacgatgacctgatacacttcagtaacagcgaaaattgcaaggagctgcaactggaaaaacataaaggagagattcttggagtggtggtagtggagtccggctggggatctatcttgcctacagtgatcttggcaaatatgatgaatgggggtcctgctgcccgctccggcaagttatcaatcggtgatcaaataatgtctataaatggaactagcttggtgggactgcctctcgctacttgtcaaggaattatcaagggtttgaagaaccagacccaggtgaagcttaatattgtctcttgcccaccagtgacaacagtcttgataaagagacccgacctgaagtatcaactcgggttttccgtccagaatggcatcatctgttctcttatgcgcggtggcatagccgagcgcgggggagtcagagttgggcatagaattatagagattaacgggcagtccgtagtggccacggctcacgagaagatcgtgcaggccctttcaaactcagttggcgaaattcatatgaaaactatgccagcggcaatgttccgtttgcttaccgggcaagagacccccctgtatatttag

SEQ ID NO: 123800 - DNA, 1413 bp, synthetic construct
  misc_feature 1..1413: note = Description of Artificial Sequence: Synthetic coding sequence
  source 1..1413: mol_type = other DNA
atggcacagaggtacgacgagttgcctcactacgggggcatggatggtgtcggtgttccggcatcaatgtacggggaccctcacgctcctcggcccattccaccagtgcaccacctaaatcacggccccccgctgcacgccacacaacattatggtgcccatgctccacacccaaatgtgatgcctgcctcaatgggatcagctgttaatgatgccctcaagcgcgacaaggacgctatctatggccacccgctgttccctctgctggcacttgtgttcgaaaagtgtgagttagcaacatgcaccccaagggaacctggtgtggcaggtggcgacgtgtgctcgtccgactcctttaatgaggatatagcagtgttcgcgaaacaagtgagagccgaaaagcccctgtttagttccaaccctgagctcgataaccttatgattcaggccatccaggtgctgcggttccacttgcttgagctggagaaggtgcacgagctctgcgacaatttttgccatagatatatcagttgcctgaaaggcaagatgccgattgatctggtgatcgacgaacgcgacggcagttctaagagcgaccatgaggagctcagcgggagcagtactaatttagccgatcacaacccatcttcgtggcgcgaccatgatgacgccacgagtacacacagtgccggcacgccaggcccctccagtggggggcatgcttctcagtccggcgataattcctctgagcagggcgatggccttgataacagtgtggcctctccgggaacaggcgacgacgatgacccggacaaagacaaaaagcgccagaaaaagaggggcatattcccaaaggtcgccaccaacattatgcgggcctggctgtttcagcatctcacacacccttacccaagcgaggagcagaagaagcaactagctcaagacaccggcttgacgatcctccaggtcaataactggtttatcaacgcccgcaggagaattgtccagcctatgattgaccagagtaatcgtgccgtgtctcagggcgccgcttacagtccagaaggtcagccaatgggttcgttcgttctggatggtcagcagcatatgggtattagaccggcaggcctacagagtatgccaggagattatgtgtcacagggcggtcccatgggtatgagtatggctcagcctagttatactccaccgcagatgactccccaccccacccagctccgccacggccctccaatgcacagttatcttcctagtcatccccaccaccccgccatgatgatgcacgggggccctccaactcaccccggcatgaccatgtcagcacagagtccaactatgctgaacagcgttgatccgaatgttgggggacaggtgatggacatccatgcccaatag

SEQ ID NO: 123801 - DNA, 1146 bp, synthetic construct
  misc_feature 1..1146: note = Description of Artificial Sequence: Synthetic coding sequence
  source 1..1146: mol_type = other DNA
atggacggagtgggggtgcctgctagcatgtacggcgaccctcatgccccgagacccattcccccagtccaccacctgaaccacgggcccccactccatgcaacacagcattatggggctcacgctccccaccccaatgtgatgcccgcgagtatgggttccgctgtaaatgatgccttgaaacgcgataaagacgcgatctacggtcaccctctgtttcctctgctggccctcgtgttcgaaaagtgcgaacttgctacttgtacaccccgggaacccggagtagccggaggagatgtgtgctccagcgatagctttaacgaagacattgccgtcttcgccaagcaggttagggccgaaaagcccttgttcagtagtaacccagagctggacaacctgatgatccaggctattcaagtgcttcggtttcatctgctcgagctggagaaggtgcacgagttatgcgacaacttttgtcataggtatatctcatgtcttaaagggaagatgcccatcgacctggtgatcgacgaaagggatggcagttcgaaatcggaccatgaagaactgtctggttcaagtacgaacttggctgaccacaaccccagttcatggagggatcatgacgacgctacttcaacccactcagccgggaccccggggccatcttcgggtggacacgcctcccaaagtggcgacaattcgagcgagcaaggggatggcctggataactcggtcgcgtcacctggaaccggcgacgatgacgacccagacaaggacaaaaaacggcagaaaaagcgaggcatcttcccaaaggtcgccaccaatattatgcgcgcatggctctttcaacacctgactcatccctacccaagcgaggagcaaaaaaagcagctagcacaggatacgggactgactattctgcaggtaaacaactggttcattaacgcaaggcgccggatcgttcagccaatgatagatcaaagtaaccgagctgtcagccagggcgccgcatatagtcccgaagggcagcccatggggagtttcgtcctcgatgggcagcagcatatgggcatccggcccgcaggccctatgtccggcatgggcatgaatatgggcatggatgggcagtggcattacatgtag

SEQ ID NO: 123802 - DNA, 1413 bp, synthetic construct
  misc_feature 1..1413: note = Description of Artificial Sequence: Synthetic coding sequence
  source 1..1413: mol_type = other DNA
atggctcaaaggtacgacgaactaccccactatggaggaatggatggggtcggtgtgcccgcgtccatgtacggtgatccgcatgccccccgcccaattcctccagtccatcacttgaatcacggccctccactccacgcaacacaacactacggcgctcatgctccgcaccctaacgtgatgccagcctccatggggtctgctgtcaacgatgcattaaagcgggacaaagacgccatctatgggcaccctctgtttcccctcctggctctggtattcgagaaatgcgaattggctacctgcacaccacgcgagccaggagtcgctgggggggacgtgtgcagtagtgactccttcaatgaggatatcgcagtctttgccaaacaggtgcgtgctgaaaagcctttgtttagtagtaaccccgagctggataatctgatgatacaggccattcaggtactgcgctttcacttgcttgagctggaaaaggtccatgaactatgtgacaacttttgccaccgatacatctcctgcttaaaaggaaaaatgcctattgacctagtaatagacgagagagatggaagctcaaaatccgaccatgaggagctgagcgggagcagtaccaacctggccgaccataacccttcatcctggcgagatcatgacgacgcgacttctactcactccgctggcactcccggaccatccagtggtggacatgcatcacagtctggggataacagtagcgagcaaggcgacggtctggacaatagtgtggcttcgcctggcacaggcgacgacgatgacccagataaggataaaaaaagacaaaagaagaggggtatctttcccaaggtcgccacaaatatcatgcgcgcatggctgttccagcaccttacccacccttacccttcagaagaacaaaagaaacagctggcccaggacaccggcttgaccatcttgcaggtcaataactggtttataaatgcccgcaggcgcatagtgcagcccatgatcgaccagagtaatagagcagtgtctcagggcgccgcatattcaccagagggccagcccatgggctcctttgttctcgacggacagcagcacatgggcatcaggccggccggcttgcagtcaatgcccggagattatgtgagccagggaggaccaatgggcatgtcaatggcccagccctcttacactccgccacaaatgaccccccatccaacacagctgagacatggaccaccaatgcattcttacctcccttctcatcctcatcatcccgccatgatgatgcacggagggcctcctacacaccctggaatgactatgtccgcacaaagcccaactatgttgaactccgtggacccaaacgtcgggggccaagtgatggacattcatgcgcagtag

SEQ ID NO: 123803 - DNA, 921 bp, synthetic construct
  misc_feature 1..921: note = Description of Artificial Sequence: Synthetic coding sequence
  source 1..921: mol_type = other DNA
atggctctagttttcgaaaagtgtgagctggccacttgtacacccagggaacctggtgtagctggtggcgatgtctgcagctctgatagctttaacgaagatatcgcggtctttgcaaagcaggtgcgagccgaaaagcctctgttcagctctaatccagaactggataacctcatgattcaagctatacaagtgctgcggttccatctgttagagctagagaaggtgcatgaactgtgtgacaacttctgccatcgctacattagctgtctcaagggcaagatgcccattgacctggtgatcgacgaacgagacggcagctctaagtctgatcacgaggagctctccggcagttcgaccaacctcgccgaccacaatcccagcagttggagagatcatgacgatgccactagcacacactcagccgggactcctggcccgtcttccggcgggcacgccagccagtcaggggataactcctcagaacagggcgacggcctcgacaatagcgtggcgagcccgggaaccggtgatgacgatgatccagacaaagacaagaaaagacagaaaaaacgcggtattttcccaaaggtagcaacgaatattatgagagcctggttattccaacacctaacccacccatacccttcagaggaacagaagaaacagctagcccaggacactggtttgactatcctgcaggtgaacaactggttcatcaacgctcgccgacgaatagttcagccgatgatcgaccagagcaacagagcagtatcccagggggctgcctacagtccagaaggtcaacccatgggcagtttcgtgctagacggtcagcaacatatgggaattagaccagccggacccatgtccggaatggggatgaacatgggcatggatggtcagtggcactacatgtag

SEQ ID NO: 123804 - DNA, 921 bp, synthetic construct
  misc_feature 1..921: note = Description of Artificial Sequence: Synthetic coding sequence
  source 1..921: mol_type = other DNA
atggccctcgtgttcgaaaagtgtgagctggcgacctgtactccccgagagcccggtgtcgctgggggggatgtgtgcagctctgactccttcaatgaagatatcgccgtgtttgcgaagcaagttcgcgccgaaaaacctttgttcagctccaaccctgagctggacaatctgatgatacaggccatccaggttctgcgtttccatttgctggagctggaaaaagttcatgagctttgcgataatttctgccatcgatacatttcctgtctcaaaggcaagatgccaatcgacctggtcatcgacgagcgggatggaagcagcaaatctgaccacgaagagctgagcggcagctcaacaaatctcgcggaccacaacccgtccagctggcgcgaccatgatgatgcaacctcaacccactcagccggcaccccaggtccaagcagtggaggccatgcctcacagtctggggataatagctctgaacagggggatgggctagataactcagtggcaagccctgggactggcgacgatgacgatcctgataaggacaagaagcgccagaagaagagaggtatttttccaaaagtcgccacaaatatcatgagagcttggctgttccaacatctcactcatccatatccctccgaagaacagaagaagcagttagcacaggacaccggcctcaccatacttcaagtcaataattggtttatcaatgcccggaggcgaatagtgcagcctatgattgaccagtctaacagagctgtctcgcaaggagccgcgtacagtccagaaggacaaccgatgggctccttcgtgctggacggacagcagcatatggggatacgccccgccggaccgatgagcgggatgggaatgaatatgggaatggacgggcagtggcactacatgtag

SEQ ID NO: 123805 - DNA, 1206 bp, synthetic construct
  misc_feature 1..1206: note = Description of Artificial Sequence: Synthetic coding sequence
  source 1..1206: mol_type = other DNA
atggctcagaggtatgatgagctgccacactacggaggaatggacggggtgggcgtcccagcttccatgtatggggatccgcacgcgcccagacctatacctccagtgcatcacttaaatcacggcccccctttgcacgcaactcagcactacggagcccatgctccacaccctaatgtgatgccagcttcaatgggtagcgctgttaatgacgcgttaaaacgggacaaggacgctatctatggccatccactgtttcccctcctcgccctagtcttcgagaaatgcgagctcgccacttgcacccctcgcgaaccaggcgtggccggaggggatgtgtgctcatctgattcttttaatgaggatattgccgtgtttgcaaagcaagtgcgggcagaaaagccgcttttctcctcaaaccccgaactggataacctgatgattcaggccatccaagtcctccgttttcatcttctggagctggaaaaggtccacgaactttgtgacaacttttgccataggtacatttcttgcctcaaaggaaagatgccaatcgacctggtgatcgatgaacgtgatggctccagcaaaagcgatcacgaagaactttccggcagttcaacaaacctggcagaccataatcctagctcttggcgggatcatgacgacgccacttccacacacagcgcaggcacacctgggccatcaagcggaggccatgctagccaaagcggagacaacagttctgagcaaggcgatggcctggataacagtgtggccagcccaggcaccggcgacgatgacgatcccgacaaggacaaaaaaaggcagaaaaagcgggggatatttcctaaagtcgctaccaatataatgagggcctggctctttcaacatctcacccacccatatcctagtgaagaacagaagaagcagctggcacaggatactgggctgaccatcctgcaagtgaataactggttcattaacgctcggcgccggatcgtgcagcccatgatcgaccagtccaaccgcgccggcttcttgctcgatccttcagtcagtcagggcgcagcctactcgccggaaggacagcctatgggatctttcgtgctggatggccagcagcacatgggcattaggcccgctggacccatgtcaggtatgggcatgaacatgggaatggacgggcaatggcactacatgtag

SEQ ID NO: 123806 - DNA, 1185 bp, synthetic construct
  misc_feature 1..1185: note = Description of Artificial Sequence: Synthetic coding sequence
  source 1..1185: mol_type = other DNA
atggcccagcgatacgacgagctccctcactatggcgggatggatggagtgggcgttccagcctccatgtacggcgatccacacgcaccacggcccatccctcccgtccaccatcttaaccatggaccgcctctgcatgcaacacaacattacggggcccatgctccacatcctaatgtgatgcctgcctctatgggcagtgcggtcaacgatgccttaaagcgtgataaggatgctatttatgggcatcctctcttcccgctcctggcgcttgtgttcgagaagtgcgagttggccacctgcacacccagggaacccggggtggccgggggagatgtttgcagttccgacagctttaatgaggacatcgccgtgtttgccaagcaggtaagagccgagaaaccccttttcagttctaatcccgaactcgacaacctcatgattcaggcaattcaggtgctgaggtttcacctgttggagctcgagaaagtgcacgaactttgcgacaatttctgtcatagatatatttcctgtctcaaagggaagatgcctattgaccttgtcatcgacgagagagacggatcaagtaaatcagatcatgaggagctgagcgggtcttctacgaaccttgccgatcataacccaagttcctggagagaccatgatgacgcaacttcgacccacagcgctggaacccccggtcccagcagcggaggacacgcgagccagtccggcgacaattccagcgaacagggggatggactggacaactctgtggccagtcctgggactggtgatgacgacgatcctgacaaagataagaagagacagaaaaagcgcggcatctttcctaaggtggccacaaacatcatgcgtgcatggcttttccaacacctgactcacccctacccctcagaggaacaaaaaaagcagctcgctcaagatacagggctgaccatcctacaggtcaacaactggtttattaacgctagacgccggatagtacagccaatgatcgatcaatctaatagagcagtcagtcagggtgctgcatacagccctgaagggcagcccatggggtcttttgtgctcgatggacagcagcacatggggatacgcccagcgggccccatgtccgggatgggaatgaatatgggcatggacgggcagtggcactatatgtag

SEQ ID NO: 123807 - DNA, 717 bp, synthetic construct
  misc_feature 1..717: note = Description of Artificial Sequence: Synthetic coding sequence
  source 1..717: mol_type = other DNA
atggatggcgtgggggtaccggcctcaatgtacggagatcctcacgctcctcggcctattccaccggtgcatcacttgaaccacggccccccattacatgccacacagcattatggggctcacgcaccacatccgaatgtgatgcctgcatctatggggtcggccgtgaatgatgccctcaagcgcgataaggacgccatctacggacatcctctcttccccttactggcgctggtgttcgagaagtgtgagctggccacatgtactcctcgcgaacccggagtggctggaggtgatgtttgctcatccgacagcttcaacgaagatattgccgtttttgccaaacaggtgcgggcggagaagccgctgttctcttccaaccctgagctggacaatctaatgattcaggcaattcaggtcctgagatttcacctgcttgaattggaaaaggtgcatgagctttgcgataacttctgccacaggtatatcagttgtctcaagggaaagatgcccatcgaccttgtgatcgacgagcgagacgggagctccaagtcagaccatgaggaactgagcgggagcagtacaaacttggcagatcataatcccagctcatggagggaccatgacgatgctacctccactcacagtgccggaacccctggaccctcatccggcggacacgcatcccaatcaggagacaactcatctgagcagtag

SEQ ID NO: 123808 - DNA, 240 bp, synthetic construct
  misc_feature 1..240: note = Description of Artificial Sequence: Synthetic coding sequence
  source 1..240: mol_type = other DNA
atggctctggtctttgaaaagtgtgagctagccacttgtacaccacgggagcctggggtagcaggcggcgatgtatgcagctccgattcgttcaacgaggatatcgcagtgttcgccaagcaggtaagggccgagaagcccttgttcagttccaatccggagctagacaacctgatgatccaggcaatccaggtgctgcggtttcatcttttagagctagagaaagtgagcaggaagtag

SEQ ID NO: 123809 - DNA, 1167 bp, synthetic construct
  misc_feature 1..1167: note = Description of Artificial Sequence: Synthetic coding sequence
  source 1..1167: mol_type = other DNA
atggacggagtgggagttcccgcatctatgtacggcgatccgcatgcccctagacccatccccccagttcaccatttgaatcacggcccccctctgcacgcaactcaacattacggcgcccacgctccccaccccaatgtgatgcccgctagcatgggtagcgccgtaaacgatgcacttaagagagataaagacgcaatttatggacatccgctattccctttactcgcactggtattcgaaaaatgtgagctagccacttgcaccccacgtgagcctggagtggccggcggcgatgtatgcagcagcgacagcttcaatgaggatatcgccgtattcgctaaacaggtccgtgccgagaagcctctcttcagcagtaatcctgaactggataatttaatgatccaggcaattcaggtcctgagatttcatctactggaactggagaaggtccacgagttatgtgacaatttctgccacagatacatctcttgcctcaaaggtaagatgcctatcgatttggtgatcgatgagagagacggctcaagtaaatctgaccacgaggaactttctgggtccagcactaacctagccgatcacaacccttcatcttggagggaccacgacgatgcgacctcaacgcattcagcgggcacacctgggccctcctccggagggcacgcaagtcaaagcggcgacaactccagtgagcagggtgacgggctcgataactctgtagctagccccgggaccggagacgacgacgacccagataaggataagaagcgtcagaagaaaagaggaatttttcctaaggtcgctaccaacattatgcgtgcctggctattccaacaccttacccacccctatccctccgaggagcaaaagaagcaacttgctcaagacactgggttgacgattctccaagtcaacaactggtttatcaacgctagacgccgtattgtgcagcccatgattgaccagtctaaccgtgcaggtttcctcttagaccctagcgtgtcacagggagccgcgtatagtcccgaaggccagcccatggggtcctttgtccttgacggtcaacagcacatgggtattagacccgcaggccctatgagtggcatgggcatgaacatgggtatggacggccagtggcactacatgtag

SEQ ID NO: 123810 - DNA, 1185 bp, synthetic construct
  misc_feature 1..1185: note = Description of Artificial Sequence: Synthetic coding sequence
  source 1..1185: mol_type = other DNA
atggcccagaggtacgatgagctgcctcactatggaggcatggacggggtgggagtgcctgcatccatgtacggcgacccacatgctccacggcccatcccaccagtgcaccacctgaatcatggccctccgttacacgccacacagcactacggagctcacgcaccccatcctaacgtaatgccagcaagtatgggcagcgccgtcaacgatgccctcaagagggataaagatgctatttatggacaccctctgttccccctcctggccctggtcttcgaaaagtgtgagttggcaacatgtaccccccgagagcccggagtagccggcggagatgtctgctcatcagacagcttcaatgaggatattgccgttttcgcaaagcaggtgcgcgccgagaaacccctcttctcgtcgaatccagagctcgacaacctgatgatccaggcgattcaggttctccgattccatctcctggaactggaaaaagtacacgaactgtgcgataacttctgtcacaggtacattagctgcctgaaaggcaagatgcccattgacttggtaatagacgagagggacggtagcagcaagagcgatcacgaagagctgagtgggagctcaacaaatcttgcagaccacaacccgtcttcatggcgcgaccatgacgatgcaaccagcacgcactctgccggcacacctggtccctcctccggcgggcatgcctcacagtccggagacaactcatctgaacaaggcgacgggctggataattccgttgccagccctggaactggcgacgacgacgatccggacaaggataaaaaaagacagaaaaaacgtgggattttcccaaaagtcgcgaccaatatcatgagagcttggctctttcagcatctgacacacccttacccctcagaagaacagaaaaaacaactggcccaggacactgggctgacgattttgcaagtcaacaactggttcatcaacgccagaagaagaatcgtgcagcctatgattgaccaatcaaacagggcagttagccagggagccgcatacagtcctgaaggacagcctatgggatcgttcgtgctggacggccagcagcacatggggatccggccagccggtccaatgtccggtatggggatgaacatgggcatggatggccaatggcactatatgtag

SEQ ID NO: 123811 - DNA, 1434 bp, synthetic construct
  misc_feature 1..1434: note = Description of Artificial Sequence: Synthetic coding sequence
  source 1..1434: mol_type = other DNA
atggcgcagcggtacgatgaactgccccactatggtggcatggatggcgtcggagtgcctgctagtatgtacggcgatccgcatgccccacggcctataccccccgtgcaccatctaaaccacggacctccgctacatgccactcagcattatggcgcccatgctcctcatccaaatgtgatgcccgcctccatgggaagcgctgtgaatgacgccctcaaacgggataaagatgctatctacgggcatcctttattccccttgcttgcgctagtcttcgaaaaatgcgagctggcaacctgcaccccccgggagccaggtgttgctggaggcgatgtgtgttcctcagactcttttaatgaagacatagccgttttcgccaagcaggttcgggccgagaaaccactgtttagttctaaccccgaactggataatctgatgatccaagccatccaggttctgcgctttcacctcctcgaacttgagaaggtgcacgagctttgcgacaatttctgccacaggtatatttcttgcctcaaaggcaaaatgccaatcgatctggtcatcgatgaacgagatggttcatctaagtcagatcatgaggaactgtccggttccagtacgaatctggctgaccacaacccttcaagctggcgcgatcacgatgatgcaacttccactcactccgccgggaccccaggtcccagctctggaggccacgcatcacagagcggggacaattcttccgagcagggtgatgggctcgataatagcgtcgcttctcccggcacaggggacgatgacgacccagataaggacaaaaaacgccaaaaaaaaagagggatctttcctaaggtcgccactaacattatgagagcctggctctttcagcacctgacacatccgtatccatcagaagagcagaaaaaacagctcgctcaggatacgggtcttaccatcctgcaggtaaataattggttcataaatgcaagaaggcgcatcgtacagcctatgatcgaccagagcaatcgcgccggcttccttttggacccctccgtgtcccagggtgcagcttactcgcccgaggggcagccgatgggaagcttcgttctggacggtcagcaacacatgggtattagacccgcggggcttcagagtatgcctggggactatgtgagccaaggaggccctatgggcatgagcatggcccagcccagttacacgcctccacagatgacgcctcaccctacacagctcagacacggcccacccatgcactcttatttgccatcacatccgcaccatcctgctatgatgatgcatggcgggccccccacccatcccggcatgaccatgtccgcacagtctcctaccatgctcaactccgtggaccctaacgtgggcggccaggtcatggacattcacgcccagtag

SEQ ID NO: 123812 - DNA, 1434 bp, synthetic construct
  misc_feature 1..1434: note = Description of Artificial Sequence: Synthetic coding sequence
  source 1..1434: mol_type = other DNA
atggcccaaagatatgatgaactgccacattacgggggtatggatggggtaggcgtgcccgcgtccatgtacggggacccgcacgctccgcggccaatccccccagttcatcacttgaaccacggcccccctttgcatgcaactcaacattacggcgctcacgcaccgcaccctaacgttatgcccgcgtcaatggggagcgctgtgaatgacgctctaaagagggataaggatgccatatacgggcaccctctgttcccactgttggcccttgtattcgagaagtgcgaactggctacctgcacccccagggaaccaggcgtggctggcggagatgtatgttctagcgactctttcaatgaagacatcgccgtgtttgcgaaacaagtgagggccgagaagcctctgttctcctctaatcctgaattggataatctcatgatacaagctatacaggtcttgcgcttccacctgctggagctcgagaaagtgcatgaactatgcgacaatttctgccatagatatatctcttgcttgaaggggaagatgcccatagacctggtcattgacgagagagacgggagcagtaaatccgatcatgaagagctgtccggctccagcaccaacttggctgaccacaaccctagctcttggcgcgatcacgacgatgctactagtacccatagcgcgggtacccctggtcccagcagcggcgggcacgctagccagagcggggacaattcaagcgaacagggggatggtctggacaatagcgtggcttctccagggacaggagatgacgacgaccctgataaagataagaagcgccagaagaaaagaggtatctttcccaaggtggcaactaatattatgcgggcctggcttttccagcacctcacacacccttacccctccgaagaacaaaaaaagcagctcgcccaggacaccggcttgactatcctgcaggtcaacaattggtttattaatgctaggaggagaatcgtgcagccaatgattgaccaaagcaatagggctggatttttgcttgacccctctgtgtcccaaggtgctgcttactcacccgagggccaacccatggggtctttcgtgctggacggccagcagcatatgggcatccgacccgcagggctgcagtccatgcccggagactacgtctcccagggagggccaatgggaatgtccatggcgcagccaagctatacccctccacagatgaccccacatcccactcagctgcgtcacggacccccgatgcactcctacttgccaagtcacccccatcatcctgccatgatgatgcacgggggccctccaactcatcctggaatgactatgtcggctcaatcccctactatgctcaattcggtggatcctaatgtaggtggccaggtaatggatattcacgcccagtag

SEQ ID NO: 123813 - DNA, 357 bp, synthetic construct
  misc_feature 1..357: note = Description of Artificial Sequence: Synthetic coding sequence
  source 1..357: mol_type = other DNA
atgccccgtgaggacgcgcactttatttacggttatcccaaaaagggacatggtcactcttacacaaccgccgaggaggccgccggtattggcatccttaccgtcattctgggcgtgctactgctgataggctgttggtactgccgcagacgcaatggatatcgggccctgatggacaagtctctccacgttgggactcagtgtgccctgacccgcaggtgccctcaggaaggcttcgatcaccgggacagtaaagtatccttgcaagaaaagaattgtgagcccgtcgtcccaaacgcccctccagcttacgagaaacttagtgccgaacagagtcctccaccatactccccctag

SEQ ID NO: 123814 - DNA, 357 bp, synthetic construct
  misc_feature 1..357: note = Description of Artificial Sequence: Synthetic coding sequence
  source 1..357: mol_type = other DNA
atgcccagagaagatgcccactttatctatgggtatcccaagaaaggccatggccacagctacacaaccgctgaagaggcggctgggatcggaatcttgactgtaattttaggcgttctgctgctgattggatgctggtattgtaggcgccgcaacggctatcgcgcactcatggataaatccctgcatgtgggaacccagtgtgccctgaccagacgatgtccccaggagggattcgaccacagagattcaaaggtaagccttcaagaaaagaactgcgaacccgtggtgccaaatgctcctcctgcctacgagaagctgtcagctgagcagtctccgccaccatatagcccctag

SEQ ID NO: 123815 - DNA, 357 bp, synthetic construct
  misc_feature 1..357: note = Description of Artificial Sequence: Synthetic coding sequence
  source 1..357: mol_type = other DNA
atgccccgagaggacgcccattttatctacggatatcctaagaaggggcatgggcactcctatactacagcggaggaggcggcaggcatcggaatcctgacggtgattctgggagtgctccttttaatcggctgttggtactgtcgaagaagaaatgggtatcgagctctgatggacaagagcctccacgtgggaactcaatgcgccctgactaggcgttgtccgcaggagggctttgatcaccgagacagcaaagtcagtctgcaggaaaagaattgtgaaccagtcgtgcctaatgcacctcctgcctacgagaagctgagcgcagagcagagcccccccccttacagcccctag

SEQ ID NO: 123816 - DNA, 1269 bp, synthetic construct
  misc_feature 1..1269: note = Description of Artificial Sequence: Synthetic coding sequence
  source 1..1269: mol_type = other DNA
atgagcgtgggtgccatgaaaaagggcgtcggaagagctgtaggcctcggggggggcagcggctgccaggctactgaggaggaccctctccccaactgtggcgcttgcgcccccggacagggcggtaggcgatggaggctcccccagccagcttgggtggaaggatcctctgctcggctgtgggaacaagccacaggtactgggtggatggacctggaagcctcccttctgcccaccgggccaaacgccagtaacacatccgatggtccggacaacctcactagcgccggaagcccacctaggactggcagtattagttatatcaacatcatcatgccatcagtgtttggaactatctgcctgctgggtatcatcggcaatagcactgtgatttttgcggtggtgaaaaaatcaaaactacactggtgtaataatgtgccagacatcttcatcattaatctgagcgttgtagacctgcttttcctgctgggcatgcctttcatgattcaccagctgatggggaacggggtatggcactttggcgaaacaatgtgcaccttgataacagccatggatgctaatagccaatttacgtccacttacatactcacagccatggccatagaccgttatctggccacggtgcatccgattagcagtacaaagttcaggaagccctcggtagccaccctggtgatctgcctcctgtgggctctttcctttatatctattacccctgtctggctctatgctaggttgataccttttccaggtggtgccgtgggctgtggcattaggctccccaatccagacacggatttgtattggtttacactgtatcagttctttctggccttcgctttacccttcgtcgtgattactgccgcttatgtacggatccttcagagaatgactagcagcgtggccccagccagccaaaggtcaattaggttgaggaccaagagggtgaccaggacagccatcgcaatctgtcttgtgttttttgtatgttgggctccctactacgtgcttcaactgacgcagctgtccatttccagacccactctgacatttgtgtatctttataacgcagctatcagcctcggatacgcgaactcctgcctgaatcccttcgtgtacattgtactctgcgaaacattcagaaagaggttagttctttcagtgaagcccgctgcccagggacaactacgagctgtgtccaatgcccagaccgcagatgaggaacgtacggagtccaagggaacatag

SEQ ID NO: 123817 - DNA, 891 bp, synthetic construct
  misc_feature 1..891: note = Description of Artificial Sequence: Synthetic coding sequence
  source 1..891: mol_type = other DNA
atgagcgttggggccatgaaaaaaggagtcggacgagcagtaggcttaggaggggggagtggctgccaggctacagaggaggatccactcccaaattgtggggcatgcgcaccaggccaaggagggagaagatggaggttaccacagccagcctgggtggagggctcaagcgcgcggttgtgggagcaggctaccggtaccggttggatggatttggaagccagcctgctccccacaggtcctaatgctagtaacacttctgacgggcctgataatctgacgtccgccggctctccacccaggaccggatctataagctacatcaacataattatgcctagcgtgttcggtacaatctgcctgctggggatcattgggaactctaccgtgatcttcgcagtcgtcaagaaatctaagctgcactggtgtaacaatgtaccagatatcttcatcatcaatctgagctttttccttgcatttgccctaccatttgttgtgataaccgctgcttacgtgcggatcttacagcggatgacaagttcagtggcgcccgcaagtcagaggagcatcagactgagaaccaaacgggttacacgaaccgctatcgcaatctgcctggtgttttttgtctgttgggccccatactatgtactgcagttgacacagctcagtatctcccgccctaccttgacctttgtgtatctctataacgctgctatttctctgggctatgcaaattcctgtctgaaccctttcgtgtacatcgtactgtgcgaaacatttcggaagaggttagttctctctgtgaagcctgccgcgcaggggcaattgcgtgcggtttcaaatgctcagacagccgacgaggagcgcacggagagcaaggggacttag

SEQ ID NO: 123818 - DNA, 1023 bp, synthetic construct
  misc_feature 1..1023: note = Description of Artificial Sequence: Synthetic coding sequence
  source 1..1023: mol_type = other DNA
atgaatcctttccacgcgtcttgctggaacacatccgctgagctgctaaacaagtcatggaataaggaattcgcctaccagacggcatcggtggtggacacagtgatcctgccttctatgatcgggatcatatgtagcacaggcctggtcggaaacattttgatagtttttacaattatccgcagccgcaagaaaacagtccctgacatctatatatgcaacttggcagtggcagaccttgtgcacatcgttggcatgccttttctcattcatcaatgggcccggggcggagaatgggttttcggcggccctctgtgcaccataatcacctctttagatacctgcaaccagttcgcctgttctgccatcatgactgtgatgtctgtggaccgttactttgcactggttcaaccctttcggctcacccgatggaggacaagatacaagacaattagaatcaatttgggactgtgggctgcctccttcatcctcgcactccctgtgtgggtatactcaaaagtgatcaagttcaaggacggcgtggagtcctgcgcatttgacctgacctctcccgacgacgtactctggtacaccctgtaccttactattactaccttttttttccctcttcccttaatcttggtgtgttacatcctgatactgtgttacacatgggagatgtaccagcagaataaggatgcccgttgctgtaatccatccgtgcctaagcagagagtcatgaaattgaccaagatggttcttgtgctggtagtggtgtttatactttctgcagctccctaccacgtcattcaactagtcaatctgcaaatggagcagccgacattggcgttctatgtcggctactacctgagtatttgcttatcatacgcctcttcaagcattaaccccttcttgtacattctactgagtggtaacttccagaagaggctgccccagatccagcgtagagcaacagagaaagagataaacaatatgggcaatacactcaaatcccacttttag

SEQ ID NO: 123819 - DNA, 1023 bp, synthetic construct
  misc_feature 1..1023: note = Description of Artificial Sequence: Synthetic coding sequence
  source 1..1023: mol_type = other DNA
atgaacccctttcacgcaagttgttggaacaccagcgctgagctactaaataaaagctggaataaagagttcgcttaccagacagcttctgtggtggataccgtgatcctgccatcaatgattggcattatatgttccactggtctggtaggaaatattcttatcgtatttaccatcattcgctctcgaaaaaagactgtgcccgacatctatatttgtaacctcgcagtggcagacctggtgcacatcgtggggatgccttttcttatccatcagtgggcccgcggcggggagtgggtatttggagggccgctgtgcacaattatcacatctcttgatacatgtaatcagttcgcatgctccgctattatgaccgtgatgagcgtggacaggtatttcgccttggtgcaaccgttcaggttgacaaggtggagaactagatataaaactattcggatcaacttagggctgtgggctgcgtcattcatcctcgccctgccagtctgggtatacagtaaggtcattaagttcaaagatggagtggaaagctgcgccttcgacctgactagccccgatgacgtattgtggtatacgctgtatctcaccatcacaacgttcttcttccccctgcccttaatccttgtgtgctatatcttgattctctgttacacctgggaaatgtatcagcaaaataaggatgccagatgttgtaatccctcagtcccaaagcaacgcgtcatgaaacttaccaagatggtattggtcttggttgtggtgttcattctttccgcggcgccctaccacgttatccagcttgtgaacttgcagatggaacagcctacacttgcgttttacgtaggctattacctgtcaatatgtttgtcgtacgcaagcagctcgatcaacccattcctttacatcctgctgtcaggcaattttcaaaagcggctgcctcaaatccaaaggagggctactgagaaagagatcaacaacatgggtaatacactgaagtctcatttctag

SEQ ID NO: 123820 - DNA, 1023 bp, synthetic construct
  misc_feature 1..1023: note = Description of Artificial Sequence: Synthetic coding sequence
  source 1..1023: mol_type = other DNA
atgaacccatttcatgctagctgttggaacacctccgcagaactgctgaataagagttggaacaaagagttcgcataccaaactgccagcgtggtagataccgtcatacttccctccatgatcggtattatctgcagcaccgggctggtgggcaatatccttatagtattcaccataatcagaagtcggaaaaaaaccgtgcctgatatttacatttgcaatctggctgtcgcggacctggtgcatatcgtgggaatgcccttccttattcatcagtgggcacgaggcggtgagtgggtgtttggaggcccgctgtgtaccattattacttccctggacacatgcaaccagttcgcttgtagtgccataatgaccgtcatgagtgtggataggtacttcgcacttgtgcagcctttcagactaacgagatggcgaaccagatacaagacaatcaggattaacctggggctatgggcggcaagtttcatcctcgcattgcccgtttgggtttactccaaggtcatcaaattcaaggacggagtcgaaagctgcgcttttgacttgacaagcccagatgacgtgctgtggtatacgttgtacctgaccatcaccaccttcttttttccgctcccccttattctcgtctgttatatcctgatactatgttatacatgggagatgtaccagcagaacaaggacgccaggtgttgcaacccttcagtgccaaagcagcgggtgatgaaactgactaagatggttcttgttttggtcgtggtgtttatcctatctgcagcaccttatcatgtgatccagctggtgaatttgcagatggagcagcccaccttagccttttatgtcggctactatctgtctatctgcctgtcgtatgcatctagttccattaatcccttcctttatatcctcctatcgggcaacttccaaaaaagactaccccaaattcagcggcgtgctacagaaaaagagataaacaacatggggaatactctgaagagccacttctag

SEQ ID NO: 123821 - DNA, 519 bp, synthetic construct
  misc_feature 1..519: note = Description of Artificial Sequence: Synthetic coding sequence
  source 1..519: mol_type = other DNA
atggctaacggcactaacgcatccgccccttactacagttatgaatattatttagactacctcgatctaatccctgtggacgagaagaagctcaaggctcacaagcatagcatcgtgatcgctttttgggtttccctcgccgcatttgtggtactactattcctgatactgctctatatgtcctggagtgcaagcccacagatgaggaactcaccaaagcaccaccagacctgtccctggtctcatggcctcaatctgcatctgtgcattcagaagtgtctgccatgccacagggaaccgcttgcaacatcgcaggcgcaggcctccagcgtggagcctgggtctcgtaccggaccagatcagccgctccggcaggaatccagctccacactgccgctgggtggatttcagacccacccaactctgctgtgggaattgaccctcaacgggggcccactggtcaggagcaaaccatctgaaccaccacccggcgataggacttcacagttgcaatcctag

SEQ ID NO: 123822 - DNA, 309 bp, synthetic construct
  misc_feature 1..309: note = Description of Artificial Sequence: Synthetic coding sequence
  source 1..309: mol_type = other DNA
atggctaacggcaccaatgcaagtgccccctactatagctatgaatattacctggattatctggacctgatccctgtggacgaaaaaaaattgaaagcacataaacatagcatcgtgattgcgttctgggtttccctcgcggcctttgtggtgctcctcttcctgatcctgctgtacatgtcctggtccgcaagcccacagatgtccttcaacactgatgaatcccttttgcattccgaggtgcttccccagacacgcgccatttcctgtgatgagctccaagccccccgggaggagggagccgcatag

SEQ ID NO: 123823 - DNA, 519 bp, synthetic construct
  misc_feature 1..519: note = Description of Artificial Sequence: Synthetic coding sequence
  source 1..519: mol_type = other DNA
atggccaatgggactaatgctagtgccccctactattcatatgaatactacctcgattatctggacctgatccccgttgacgagaaaaagctgaaggcccacaaacactctattgtgattgcattttgggtgagtcttgctgcttttgtggttttactgtttctgatcctactgtatatgagctggtcagctagtccccaaatgcggaactctccgaaacaccatcaaacgtgcccttggagccacggactgaacttgcatctctgcattcagaagtgtctaccttgccaccgggagcctctggccacgtcacaagcacaggcatctagcgtcgagcctggatcaagaaccgggccagaccagcctctgaggcaggagtccagctcgaccctacctctgggggggtttcagacgcaccccacactgctgtgggagttgaccctgaacggaggcccactggtgagatcgaagccatctgagcctcctccgggagaccgaacaagccaactgcagtcctag

SEQ ID NO: 123824 - DNA, 309 bp, synthetic construct
  misc_feature 1..309: note = Description of Artificial Sequence: Synthetic coding sequence
  source 1..309: mol_type = other DNA
atggcgaatgggacaaacgcctccgcgccgtattattcctatgagtattacctagattacctagacctgatcccggtggacgagaagaaacttaaggcccacaagcactcaattgtgatcgcgttctgggtgtcactggccgcgtttgtggtcctcctattcctgatcctcttgtatatgagttggtccgcaagtccacagatgtcctttaatactgatgagtcactcctacattctgaagtgctgccccaaaccagagccatcagttgcgacgagcttcaggcccctcgagaggagggcgctgcttag

SEQ ID NO: 123825 - DNA, 1110 bp, synthetic construct
  misc_feature 1..1110: note = Description of Artificial Sequence: Synthetic coding sequence
  source 1..1110: mol_type = other DNA
atgccgcgagctccgaaaaggcagaggtgtatgcccgaggaggatctgcagtcgcaaagcgagacacagggcctagaaggcgcccaggcaccattggccgtcgaggaagacgcctcatcctccacttctacatcctcttcctttccgtcatcatttccatcctccagttcgtcctcttctagctcttgttatcctctcattccgtccaccccggaagaagtttctgctgatgatgaaacacccaatccaccacagtcagcccagatcgcttgctcctcaccctccgtggttgcgagtctgcctctggatcagtctgacgaaggtagctcttcccagaaggaggagtcaccaagcaccttgcaggtcttacctgactctgagtccctgccccgctcagaaattgatgagaaagtcaccgatctggtgcagttcctgctattcaaataccagatgaaggaaccaattacaaaagccgagattttagaatccgttatcagaaactatgaagaccacttccccctattattttctgaggcatcagagtgcatgttgctggtgttcggaatcgacgttaaggaagttgatcctacagggcatagctttgtcttggtgacgagcctgggccttacttacgacggaatgctttccgatgtccaatcgatgccaaaaaccgggattcttattttgattctgtcaatcgtgtttatagagggatactgcacaccagaggaggtcatctgggaggcgcttaacatgatggggctctatgatggcatggagcatttgatttatggcgaaccgcgcaaactcctgacacaggattgggtgcaggagaattacctcgaataccgccaagtaccaggcagtgaccctgcccggtacgagttcctttggggccccagagcccacgccgaaatacggaagatgagtttactgaagttcctggccaaggtcaatggttcagatcctcgcagttttccattatggtatgaagaggcattgaaagatgaagaggagagggcgcaggatcgtattgctactactgatgacaccacggccatggcctcagcgtcttctagcgcaaccggttcgttctcctatcctgagtag

SEQ ID NO: 123826 - DNA, 1110 bp, synthetic construct
  misc_feature 1..1110: note = Description of Artificial Sequence: Synthetic coding sequence
  source 1..1110: mol_type = other DNA
atgcctcgcgccccgaagcggcagaggtgtatgccagaggaggatttacaaagtcaatccgaaacgcaggggctggaaggggcccaggcccccttagccgtggaggaggacgcatcttctagcaccagtacaagtagctcatttcccagcagtttcccctcaagcagcagcagtagctcttccagttgctaccccctgatcccctcaactcccgaggaggtctcagccgatgatgagacacccaatccaccacaatccgcccaaattgcatgctcgtctccttccgtggtggcaagtctccctttggatcaaagcgacgagggttcctcttctcagaaggaagagagtcctagtactctgcaagtccttcccgactccgagtcactgcctcgctcagaaatcgatgagaaggttacagatttggtgcagtttctgctttttaagtatcagatgaaagaacctataaccaaagccgagatcctggagtcagtcatccgcaattacgaggatcactttcctcttctgttctccgaagcaagtgagtgtatgctgcttgtgttcggaatcgatgtgaaagaggtcgaccctacaggccacagcttcgtactcgtaacatccttgggcctcacatacgatggaatgctgagcgatgtgcagagcatgcctaaaaccgggattctgattcttatcctgtccatagtcttcatcgaggggtactgtacacccgaggaggttatttgggaggccctgaatatgatgggtctctacgacggtatggagcacttgatctacggcgagccacgaaagctactcactcaggactgggtgcaggagaattacctggagtacagacaagttcccggctcagacccagctagatacgagttcctctggggccctagggcccatgccgagattcgcaaaatgtctctcctgaaatttctggctaaggtcaatgggtctgaccctcggtcttttccattatggtatgaagaggcccttaaagatgaagaggagagagcacaggacagaattgccactaccgacgatacgaccgccatggcaagtgcatcctccagcgccacaggctccttttcctaccctgaatag

SEQ ID NO: 123827 - DNA, 486 bp, synthetic construct
  misc_feature 1..486: note = Description of Artificial Sequence: Synthetic coding sequence
  source 1..486: mol_type = other DNA
atgcccagggcccctaagaggcaaaggtgcatgccagaagaagaccttcagagtcagagcgagacccaggggctcgagggcgcccaagccccattggcagtggaggaggatgcgtcctcatctacgagtacatcctccagctttccttccagcttcccttcctcctcttcctccagctctagttcctgctatccgctgattccgagcacacccgaggaagtttcagcggacgatgaaactccaaacccaccccagagcgcccagattgcctgttccagcccatcagtcgtggcttcactgccactggatcagagcgacgaaggaagcagcagccagaaagaagagagtccgagcacgctgcaggtgctgcctgactctgagtccctgccacgcagtgaaattgatgagaaagtgaccgatctcgtgcagttcctcttgttcaagtatcagatgaaagaaccaattacaaaagcggagattctttag

SEQ ID NO: 123828 - DNA, 573 bp, synthetic construct
  misc_feature 1..573: note = Description of Artificial Sequence: Synthetic coding sequence
  source 1..573: mol_type = other DNA
atgccacgagcgcccaaacgccagaggtgtatgcccgaggaggatctccagtcccagagcgagacacagggattggaaggggcacaggccccactcgctgttgaagaggatgccagctccagtacaagcacctcctcaagcttccccagcagcttcccttcatcttcatcgtcgagtagcagctcttgctaccctttaatcccttccacgcccgaggaagtgtccgccgatgacgaaacccccaacccaccccagagcgcacaaatcgcttgtagctcacccagtgtcgttgcctcactccccttagaccagtcagatgagggctcctcaagccaaaaggaggaaagcccaagcacccttcaggttctcccagactcagagagtttgcctaggtccgagattgacgaaaaagtcacagacctggtgcaattcctgctcttcaagtatcagatgaaagaaccgatcacaaaggccgagattctggagagtgtaatcagaaattacgaagatcattttcccctccttttttccgaggcttcggagtgcatgctccttgtgttcggaattgactag

SEQ ID NO: 123829 - DNA, 1203 bp, synthetic construct
  misc_feature 1..1203: note = Description of Artificial Sequence: Synthetic coding sequence
  source 1..1203: mol_type = other DNA
atgtctaaggttagcactatgttttccgaggacgatttccagtctacagaacgggccccttacggccctcagttacaatggagccaggacctacccagagtccaggttttcagggaacaggccaatttagaagacagatcaccccgcaggactcagagaattacaggtggggagcaggtactctggggacctatcacacagatcttccctaccgtgagaccagcagatctgaccagggtgatcatgcccctcgagcaaagatctcagcattgcaaacccgaagaggggctgcaagcccaggaagaggatctgggactcgttggggcccaggcattacaggccgaggaacaggaggccgcattcttcagctcaacccttaacgtcggaacccttgaagaattgccagcagccgagtcaccctctccgccccagagtccccaggaggagtcattttcccccactgctatggacgccatattcgggtctttatctgacgagggatccgggtcccaagagaaagaagggcctagcacatccccagacttaattgacccagaatcttttagccaagacattctccatgacaaaatcatagacctggtgcatctacttctcaggaagtaccgggttaaggggctcatcacaaaagcagagatgctcggaagtgtgatcaaaaactatgaggactacttcccggaaatcttccgtgaggcctcagtgtgcatgcaactcttgttcgggatcgacgtcaaggaggtggatcccactagccattcctatgtcctggttaccagcctgaacctgtcttacgatgggattcaatgcaatgaacagagtatgcctaagagcggtctgttaatcattgtcctcggagtgatctttatggaagggaactgcatccctgaggaagtgatgtgggaagttctcagtatcatgggagtatatgccggccgcgagcatttcctgtttggagaacccaagcgacttctgacccaaaactgggttcaggaaaaatacctcgtctatcgccaagtgcctggcacagacccagcttgttatgagttcttatgggggccgagggcacacgccgaaacatctaaaatgaaggtattggaatacattgctaatgcgaatgggagagatccgacgagctatccttccctgtatgaggacgcacttcgtgaagagggggaaggcgtgtag

SEQ ID NO: 123830 - DNA, 1290 bp, synthetic construct
  misc_feature 1..1290: note = Description of Artificial Sequence: Synthetic coding sequence
  source 1..1290: mol_type = other DNA
atggaaactcaatttaggagagggggccttgggtgctcccccgcctcgatcaagaggaagaagaaaagagaggatagcggcgatttcggcctgcaagtgtcaaccatgttttccgaagacgatttccagagcacggagagggcaccttacggccctcaactacagtggagccaggatcttcctagggtacaggtgtttcgggagcaagccaatttagaagaccgctctcctaggcgcacccagcgcatcacagggggcgaacaggtgctgtgggggcctataactcagatatttcccaccgtgagacccgctgacctgacgcgggtgatcatgcctctggagcagaggtcccagcattgtaaaccagaagaggggctgcaggctcaagaagaggacctggggctggtgggggcccaggctttgcaggcggaagagcaagaagctgctttctttagctctaccctgaacgtagggactcttgaggaactccctgcagccgaatctccatcccccccacagagcccacaggaggagtccttcagtcccaccgctatggatgctatattcggcagtctctctgacgaaggctccggtagtcaagaaaaggaaggcccatccacctccccggacttaatcgaccccgaatctttcagccaggacatcctgcatgataagatcattgatttggtgcacttgctgcttcgcaaatatagagttaaaggcctgatcactaaggccgagatgctcgggtctgtgatcaagaactacgaggattactttcccgagattttcagggaagcctccgtttgtatgcagttgctcttcggaatcgacgtgaaggaggtggaccctactagtcacagttatgttctcgtcacatcactgaacctgtcatatgatggaatccagtgtaacgagcaatcaatgccgaaatctggcctcctgatcatagtactgggagtaatcttcatggaggggaactgcataccagaggaggtgatgtgggaagtgctgtctatcatgggcgtatatgccgggcgggaacatttcctatttggggaaccaaaaagactgctgactcaaaactgggtgcaggagaagtatttagtataccgccaggtccccggcactgatccagcctgctatgagtttctctggggaccgcgggcccacgccgagactagtaaaatgaaggtgctggaatacatcgccaacgcaaatgggcgtgaccccaccagctaccccagtctctacgaggatgcactcagggaggaaggtgaaggcgtttag

SEQ ID NO: 123831 - DNA, 945 bp, synthetic construct
  misc_feature 1..945: note = Description of Artificial Sequence: Synthetic coding sequence
  source 1..945: mol_type = other DNA
atgccacttgagcaacggtcccaacactgtaagcctgaggaggggctggaggcgcagggagaagctttagggctggtgggggcccaggctcctgcaaccgaggagcaagaaactgcttcaagttcttccacactggtagaagttacactaagagaggttccggcagctgaatcaccatcacctccacactcaccacagggggcatccaccctccccacgacaatcaactatacattgtggagccagtctgacgagggatccagtaacgaagaacaggaaggcccatcaacgtttccggatctggaaacctcattccaggtcgcactatctcgtaaaatggcagagcttgtgcatttcctgttgctgaaataccgggcaagagaacctttcactaaagctgaaatgttaggcagtgtgatacgcaacttccaggattttttccctgttattttttctaaggcctccgaatacctccagctggtgtttgggattgaggtggtcgaagtggtgaggatcggccacctctatatattggtgacatgcctgggactgagctacgacggccttctgggagacaaccagatcgttccaaagaccggcctgctgattattgttttagctatcattgcaaaggaaggagattgtgcgcccgaggaaaaaatttgggaggaactgtccgtgttagaggccagtgatggacgggaggattcagttttcgctcatccacgcaaactcttgacccaggacctagtccaggagaattacctggagtatcgacaggtgcccgggagtgatcccgcttgctatgagttcctgtggggccctcgtgcgctggttgagacaagctacgtgaaagtgctccaccatctgctcaaaatctccggaggtccacatatctcttaccccccccttcacgagtgggccttcagggaaggagaagaatag

SEQ ID NO: 123832 - DNA, 945 bp, synthetic construct
  misc_feature 1..945: note = Description of Artificial Sequence: Synthetic coding sequence
  source 1..945: mol_type = other DNA
atgcctttagagcaacgcagtcagcactgtaagcccgaagaaggccttgaggctcagggtgaagctctaggcttggtgggggcccaagcccctgcaacagaggagcaagaaactgcatcaagtagtagcacccttgttgaagtcaccctcagagaagtgcctgcggctgaatcgccctcacccccgcatagcccccagggcgcaagcaccctacccacaactatcaactataccctgtggtctcagtcggatgagggcagttctaacgaagaacaggagggcccctcaacctttcccgaccttgagacatcctttcaggtcgccctctccagaaaaatggctgaactggtgcattttctactactcaagtatcgcgccagggagccctttaccaaggctgaaatgctcgggagcgttattagaaacttccaagacttttttccagtgatattttccaaggcttctgagtaccttcagctagtcttcggcatagaggtggttgaggtcgtcagaataggtcacctgtacatcctggttacatgcctcggtctctcctacgacggtctcctgggcgataatcagatagtgccaaaaactggcctcctaattattgtgctggccattatcgcaaaggaaggcgactgtgccccggaggaaaagatatgggaggagctatccgtcttggaggcctcagatggaagggaggattccgtctttgcccatcctcgtaagctgctgacacaggacttggtccaagagaattatctcgaatatcggcaggtccccgggtctgatcctgcatgctatgaattcctgtggggacctcgcgccctggtagagacgtcgtacgtgaaggtgctgcatcacctgctgaagataagtggaggacctcatatctcctatccacccctccacgaatgggcattccgtgaaggggaagagtag

SEQ ID NO: 123833 - DNA, 945 bp, synthetic construct
  misc_feature 1..945: note = Description of Artificial Sequence: Synthetic coding sequence
  source 1..945: mol_type = other DNA
atgcctctagagcagagatcgcaacattgcaagcctgaggaaggccttgaggctcagggcgaggccctggggctggtgggcgcacaggccccagccacagaggagcaggaaacagccagctcctcttctactctggtggaggtcactttgcgggaggtccctgccgccgagtccccctcacctccacacagtccacagggtgcctcaacccttccaacaactatcaattacaccctgtggtctcaatctgatgaaggttcatctaacgaggagcaggaaggccccagcacgtttcccgatttggagacgagtttccaggtggccctgtctcgaaagatggccgagctcgtccatttcctgctgctgaaatacagggcacgcgaaccctttacgaaggcggaaatgcttggctcagtcatccgtaatttccaggatttcttccctgttattttcagtaaggcgagtgaatatcttcagctggtgtttggaatagaggtggttgaagttgtccgtatcggtcatttgtacatcctggtaacctgccttggactttcctacgatggattgcttggcgataatcagatcgtgccaaagacaggactgcttattattgtgctggcaattatcgccaaggagggcgattgcgcacctgaggagaagatctgggaggagctatccgttctcgaagcttccgacggaagagaggattccgtgtttgcacaccccaggaagcttctgactcaggaccttgtgcaggaaaactatttggagtacaggcaagtgccgggatcggacccggcctgttacgagttcctctggggtcctagagccttagttgaaacctcgtacgtgaaagttctgcaccatctactgaaaatttcaggaggaccccatatatcttacccccctctgcatgagtgggctttccgagaaggagaggagtag

SEQ ID NO: 123834 - DNA, 945 bp, synthetic construct
  misc_feature 1..945: note = Description of Artificial Sequence: Synthetic coding sequence
  source 1..945: mol_type = other DNA
atgcctcttgagcagagatcacagcactgcaagcctgaagaagggctggaggcacgcggcgaggctttggggctggttggcgcacaagctccagcgacggaggaacaacaaacggcctcaagctccagcacactggtcgaggtgactctgggggaagtaccggccgcagattccccttcaccgccccactccccacagggggcttcaagtttttccaccaccataaattacaccctgtggaggcagagtgacgaaggaagcagtaatcaagaggaagaaggcccgcgcatgttccccgatctcgagtccgaattccaagccgctatttcccgtaaaatggtggaattggtgcactttctcctactgaagtaccgggcgcgagagcccgttactaaagcagaaatgctggagtccgtgctgagaaattgccaggacttttttcccgtcatcttttccaaggcatccgagtatctgcagctcgtgtttggtatcgaagtggtggaggtggtgccaattagccacctgtatatccttgtgacttgcctaggcctcagttatgatggcttacttggagacaatcaagtgatgcccaagactgggctgctcatcatcgtgctggcaattatagcaatcgagggtgactgcgcccctgaggaaaaaatctgggaggagctctccatgctggaggtcttcgaaggtcgcgaagacagtgtttttgcacatcctagaaaacttttgatgcaggatctggtgcaagagaattatcttgaatacagacaggttcccgggtccgatcccgcctgctatgaatttctgtgggggccacgcgcgctgatcgaaacctcttatgtcaaggtcctgcatcatactctgaagatcggaggggagcctcacatcagttatccgccactgcacgagcgagccctccgcgagggagaagagtag

SEQ ID NO: 123835 - DNA, 945 bp, synthetic construct
  misc_feature 1..945: note = Description of Artificial Sequence: Synthetic coding sequence
  source 1..945: mol_type = other DNA
atgcccctggagcagagaagtcagcactgcaaacccgaagagggtctggaggcacgtggcgaagctctcggcctggttggggctcaagccccagccaccgaggaacaacagactgccagtagttcttcaaccctggtcgaagtgacacttggtgaagtaccggcagccgattcacccagtcctcctcactctccccagggcgcctcgtccttcagcacgacaattaattacactctgtggagacagtcagacgaaggctcaagtaatcaggaggaggagggccccagaatgttccccgacctggagtcagagttccaggccgcaatctccaggaaaatggtggagctggtccactttctgctccttaagtaccgggctcgagagcccgtcactaaagctgaaatgctggagtccgtgcttcggaactgccaggattttttccccgtgatattttccaaggcctctgagtatttacagctcgtgttcggtattgaggtcgtagaagtggtcccaatatctcatttgtacattctggtcacttgtctgggattgagttacgatggcctcctaggggataaccaggtaatgccgaagacaggtttgcttataattgttcttgccatcatcgctatcgagggggactgcgcacctgaggagaagatttgggaggaactctcaatgcttgaagtgttcgagggaagggaggactcagttttcgcacacccaagaaagctgctgatgcaggacctggtccaggaaaattatctggaatatcgccaggtacccggcagtgatccggcctgttacgagttcttgtggggccccagagccctgattgagacttcatacgttaaagtgcttcaccatacgctgaaaatcggtggagaacctcacatttcatacccaccattacatgagcgggctctgagagagggggaagaatag

SEQ ID NO: 123836 - DNA, 945 bp, synthetic construct
  misc_feature 1..945: note = Description of Artificial Sequence: Synthetic coding sequence
  source 1..945: mol_type = other DNA
atgccattggaacagcgttcgcagcactgtaagcctgaagagggccttgaggcacgcggggaagctctcggactcgtcggcgctcaggcaccagccaccgaagagcagcagacagcaagcagctcaagtactctcgtagaagtgaccttaggggaagttccagccgcagactccccatctcccccccacagcccccaaggggcgagtagttttagtactaccatcaactacacgctctggaggcaaagtgacgaggggtccagtaatcaggaggaagaagggccgcggatgttcccagatctggagagcgaattccaggcagccatcagtcgaaaaatggtggagttggtccatttccttttgctcaagtatcgggccagagaaccagtcaccaaagcggaaatgctcgagagtgtcctgcggaattgtcaggatttcttcccagtgatctttagcaaagcttccgaatacttacagcttgtgttcggtatagaggttgtggaggtagtgccaattagtcacctttatatcctcgtgacgtgcttaggcctcagttacgacggactcctgggagataatcaagtcatgccgaaaacgggcttactaattattgtgttggccatcatagcaattgagggggattgcgcaccagaggagaaaatttgggaggagctttctatgctggaggtttttgagggaagagaggactccgtgtttgcccatccaagaaaactcctgatgcaggatctggtccaagagaattacctcgaatatcgtcaggtgccgggtagcgatcctgcctgttatgagttcctctgggggcccagggcactcatcgagactagctacgtaaaggtcctccaccacacattgaagatcggtggggagccacacatttcctatcctcctctgcacgagcgggccttacgcgaaggggaagaatag

SEQ ID NO: 123837 - DNA, 945 bp, synthetic construct
  misc_feature 1..945: note = Description of Artificial Sequence: Synthetic coding sequence
  source 1..945: mol_type = other DNA
atgcctctggagcaaagatctcagcattgcaagccagaggagggcctagaggctagaggtgaggccttgggtttggtgggggcccaggcccctgcaacagaagagcagcagactgccagttcaagcagcaccctggttgaagtcacgctcggggaagtgcctgctgctgactctcccagcccaccacactctccacagggggctagctccttctccaccactatcaattacacgctgtggcgtcagtcagatgagggatctagcaatcaggaggaagaaggacctcgaatgttcccagaccttgagtcagaatttcaggccgccatctccagaaaaatggtggaactcgtgcacttcctgctgctcaaatatcgcgctagggagcctgtcactaaggccgagatgctggagagtgtgctgaggaattgccaggatttttttcccgtgatttttagtaaggccagcgaatatctccagctcgtctttggaatagaggtggtggaagtcgttcccattagtcatttgtatatcctcgtaacttgccttgggctctcctacgatggattactgggtgataatcaagtcatgccaaagacggggctcctcattattgtcctggcaattatcgccatcgagggggactgcgctccggaggagaagatttgggaagaactctccatgctagaagtgtttgagggcagggaggatagcgtgttcgctcacccccggaaacttctcatgcaggaccttgttcaggaaaattatctcgagtataggcaggtgccgggctccgacccagcctgttacgaatttctttgggggcctcgagctttgattgagacctcatatgtcaaagtgctgcaccatacacttaagatcggcggcgaaccacacatctcctacccccctctccatgaacgggcactgagagagggcgaagaatag

SEQ ID NO: 123838 - DNA, 945 bp, synthetic construct
  misc_feature 1..945: note = Description of Artificial Sequence: Synthetic coding sequence
  source 1..945: mol_type = other DNA
atgcctttagaacagcgctcccaacattgtaaaccagaagaaggcttggaggctcgcggggaagcgctgggtcttgtgggcgcccaggcccccgctaccgaggagcaggaggccgcaagctctagctccacgcttgtagaggtgacattgggagaggtgccggcagcggagtccccagatccacctcagtctccccaaggagctagctcgctcccaacaaccatgaactatccactgtggagccagtcatacgaggacagcagcaatcaggaggaagaaggtcccagcacctttcctgatctcgaatcggaatttcaggccgccctgagcagaaaagtggctgagctcgtgcacttcctccttctgaaatacagggcgcgggaaccagtgacaaaggccgaaatgctcggttccgtggtcgggaattggcaatacttctttcccgtgattttctccaaggctagttcttctcttcagctggtcttcggtattgagttgatggaggttgatcctatcggacacttatacatattcgccacatgcctcggcctcagttacgatgggctactgggggacaatcagattatgccaaaggccggactgctgatcattgttctggcaatcattgcaagggagggcgattgtgcaccagaggagaagatctgggaagagctctcagttctggaagtctttgagggccgagaggacagcatcctgggagaccctaagaagctgctcacccagcactttgtccaggaaaactacctagaatatcgccaggttcccgggtcagatcctgcttgctacgaatttctctgggggcctcgggctctggtcgaaacatcttatgtcaaggtgctgcaccatatggtgaagatttctgggggaccacatattagctatccacccctacacgagtgggtgctaagagagggcgaggaatag

SEQ ID NO: 123839 - DNA, 945 bp, synthetic construct
  misc_feature 1..945: note = Description of Artificial Sequence: Synthetic coding sequence
  source 1..945: mol_type = other DNA
atgcccttagaacagaggagccaacactgcaagccagaagagggactggaggccagaggggaagctctgggtttagtgggtgcccaggcaccagccaccgaagagcaggaagccgccagttcttcaagcacactggtggaagtcactctaggtgaagttcccgccgctgaatcgccagacccaccacagagccctcaaggcgcctcttctctcccaaccaccatgaattaccccctgtggagccaatcatacgaagatagctctaatcaggaggaagaaggtccctcaacatttcccgatctggagtccgagttccaggcagcactctctcggaaggtagccgagttggtgcactttctgctgctcaagtatcgggcacgcgagcctgtaactaaggccgaaatgctgggaagcgtcgtgggaaattggcagtatttctttcccgtgatattctctaaggcatcctcttcgcttcagctggtctttggaatcgaactaatggaggttgatcctatagggcatctttacatcttcgcgacctgcctcggcttgagctatgatggactgttgggtgacaatcagatcatgccaaaggccgggctgctgataattgtgcttgctatcatcgccagagagggtgattgcgcacctgaagagaaaatttgggaggagctttccgtattagaggtctttgagggcagagaggactcaatcctgggggatcccaaaaaactgctgacgcagcattttgtacaggagaactatttggagtacaggcaggtgcccggctctgaccccgcgtgttacgaatttctctggggccctcgcgcattagtagaaacaagctacgtgaaggtgctccatcatatggtgaagatcagtggaggcccccacatctcatatccgccattacatgagtgggtcctgcgggaaggggaggaatag

SEQ ID NO: 123840 - DNA, 597 bp, synthetic construct
  misc_feature 1..597: note = Description of Artificial Sequence: Synthetic coding sequence
  source 1..597: mol_type = other DNA
atgcctctagagcagagaagccagcattgcaaacccgaagaggggctcgaggcccgcggcgaagccctggggctggttggtgctcaggcacctgctactgaggagcaagaagctgcttcatcctcttcaacgttggtggaagtgaccctgggggaagtccctgcagccgagagcccggacccacctcagtctccgcagggcgcatccagcttgcctacaaccatgaactacccgctgtggagccagagttacgaggacagcagtaatcaggaggaagagggaccaagtacttttccagatttggaatccgaatttcaggcagcgcttagccgaaaggtggcagagctggtgcactttctgctcctgaaataccgggctagagagccagtgacaaaggcagagatgctgggttccgtcgtcgggaactggcaatacttctttccagtgattttctccaaggcaagcagcagtttacagttagtgttcggaattgaacttatggaggttgacccaatcgggcatctctatatctttgctacttgtttgggattgagctacgatggtttgctaggcgacaaccagattatgccaaaatag

SEQ ID NO: 123841 - DNA, 954 bp, synthetic construct
  misc_feature 1..954: note = Description of Artificial Sequence: Synthetic coding sequence
  source 1..954: mol_type = other DNA
atgagcagtgagcaaaaaagtcagcactgcaagcccgaagaaggggtcgaagcacaggaggaagcattagggctagtgggtgcccaggcccctaccacagaagaacaggaggccgctgtgagcagcagctccccgcttgttccgggaacactggaggaagtcccagccgctgagtcagcaggacctccacagagtccacagggggcttccgcattgcccacgacaatatcgtttacctgttggcggcaacctaacgaaggctcaagcagccaggaggaggaaggcccgagtacaagcccggatgccgaatcactgtttcgagaggccctgtccaataaggtggacgaactggctcacttccttctgcggaagtaccgggccaaagaactcgtaaccaaagccgaaatgctagagagagtcatcaagaattataagaggtgctttcctgtgattttcggaaaggcaagtgagtctctgaaaatgatcttcggcattgatgttaaggaggtggacccagcaagcaacacctacacccttgtcacgtgtctggggttgtcctacgacggacttctgggcaacaaccagattttcccgaagaccgggctcctgatcatagtactcgggacaatcgccatggaaggagactctgctagcgaggaggagatttgggaagagctgggggtcatgggcgtgtatgacgggcgcgaacacactgtttatggcgagccacggaaattgttgacacaagactgggttcaagagaactatctggagtaccggcaggtgccaggaagcaatccggctagatatgaattcctgtggggccctagggccctagcagagacaagctatgtgaaagtcttagaacatgttgtgagggtgaatgcgagggtgcggattgcttatccttctctgcgggaagccgcactattagaagaggaggagggagtctag

SEQ ID NO: 123842 - DNA, 954 bp, synthetic construct
  misc_feature 1..954: note = Description of Artificial Sequence: Synthetic coding sequence
  source 1..954: mol_type = other DNA
atgagctcagaacaaaaatcccaacattgcaaacctgaagagggcgtggaggctcaggaggaagcgctgggtctggtgggagcacaagccccgaccaccgaggagcaggaggccgccgtttccagtagctcccccctggtgcccgggaccctggaggaagtgccagctgcagagagcgccggcccacctcagtccccccaaggggcctccgctctgccgactaccatatcttttacttgctggcggcagccgaatgaaggaagttccagccaggaagaagagggccccagcacttctccagatgcggagagtctcttcagagaagctttaagcaataaagtagacgaactagcccatttcctgttacggaagtatcgggcaaaggagctggtaacaaaggctgagatgctggaacgcgttatcaaaaactacaaacgctgcttcccggtgatattcggcaaggcctctgaaagtctgaagatgattttcggcatcgacgtgaaggaagtggacccagcgtccaacacgtatactctagtgacctgcttggggttgtcttacgacggcctgctgggaaacaaccagattttccctaaaaccggtcttttgatcattgtgctgggtactatagccatggaaggagactctgcatcagaggaagaaatttgggaagaactcggagtgatgggggtgtacgatgggagggagcacacagtatacggcgagcccaggaaactactgacacaggattgggtgcaggagaactatctcgagtatcgccaggtccctggctcaaatcccgctaggtacgaattcctatggggcccccgggcactggccgagacatcctacgtgaaagtgctagaacatgtcgtgcgcgttaacgctagggtgagaattgcttatcctagtcttcgcgaagccgccctgttggaggaggaggagggagtgtag

SEQ ID NO: 123843 - DNA, 954 bp, synthetic construct
  misc_feature 1..954: note = Description of Artificial Sequence: Synthetic coding sequence
  source 1..954: mol_type = other DNA
atgtcatctgagcaaaaaagtcagcactgtaagcccgaggagggcgtcgaggcacaggaggaagcattgggtcttgtcggggcgcaggcacctaccaccgaggagcaggaggcagccgtctcttctagctcccctctagttccaggtacgctagaagaagtaccagcagctgagagcgcagggccaccccagtcccctcaaggcgccagcgcactgccgactaccatttcttttacctgttggcgacagccgaacgaaggatccagcagtcaggaagaggagggtccaagcacatcaccagacgcggagagcctgtttcgagaagccttgtcaaataaggtggacgagctagcccacttcctgctgcgtaagtatagggcgaaggaactcgtcaccaaagcagaaatgctcgagagagtgatcaaaaactacaagaggtgctttcctgtgatatttggcaaggcctctgagagcctcaaaatgatctttggcattgacgtgaaagaagtggatcctgcttccaacacatacacactcgttacatgtttaggtctgtcttacgatggtctattgggtaataatcagatcttccccaagacaggtttgcttattattgtgttggggaccattgccatggagggagacagtgcctctgaagaggaaatttgggaggaactgggagtcatgggggtctacgatgggagagaacatacagtttatggtgagccccggaagctgctgacccaggattgggtgcaggaaaactacctggaataccgccaggtccctggctccaaccccgccaggtatgaattcctctggggtccaagagcactggcagagacttcctacgtgaaggtgttggaacatgttgtcagggttaacgcccgggtgaggatcgcctatccaagtttgagggaagcagccctgttagaagaagaagagggcgtttag

SEQ ID NO: 123844 - DNA, 954 bp, synthetic construct
  misc_feature 1..954: note = Description of Artificial Sequence: Synthetic coding sequence
  source 1..954: mol_type = other DNA
atgtccagtgagcaaaagtcacagcactgtaaacccgaagagggcgtcgaggctcaggaagaagctctcggcctggttggagcccaggcacctacgacagaggaacaggaagctgccgtgagcagctcaagtcctctggtacccggcactctggaagaagtccccgcagccgaaagcgccggtcccccccaaagcccccagggggcttctgccttacctactacaatcagctttacctgctggagacaacccaatgaagggtcaagcagccaggaagaggagggcccgagtacttcccccgacgctgagtccctatttagagaggccctgtcaaataaggttgatgagctggcccactttctgttaagaaagtatagggccaaagaactggtgactaaagctgaaatgctcgagagggtaattaagaattataagcgatgtttcccagttattttcgggaaggcgtctgaaagtctgaaaatgatcttcggaattgatgttaaggaagtggaccctgcaagcaacacatataccttagtcacctgcctggggctatcttacgacggcctcctgggaaataatcagatctttccaaaaacgggcttactgattatcgtgctgggcaccatagcgatggaaggcgattccgcaagcgaggaagaaatatgggaggaattgggagtgatgggtgtttatgacgggcgggaacacactgtatacggtgagccacgaaaactgctgacccaagattgggttcaagagaattacctggaataccgccaggtgccaggatcaaatccagcgagatacgagttcctatggggaccacgcgcactcgccgagacctcctatgtaaaggtgctggagcacgtagtgcgggtgaacgcaagggtcagaatagcatatccaagcctgagagaagctgccttgttggaggaggaagagggcgtgtag

SEQ ID NO: 123845 - DNA, 954 bp, synthetic construct
  misc_feature 1..954: note = Description of Artificial Sequence: Synthetic coding sequence
  source 1..954: mol_type = other DNA
atgtcctctgagcagaaaagtcagcactgtaagcctgaagagggagtagaggctcaggaggaggccctcggtctggttggggcacaggccccgacaaccgaggagcaggaagctgcagtgtccagttcttcacccttagtcccaggcactctagaggaagtgccagctgcggaatcagccggtccaccacaatcaccacagggggcaagtgccttacctaccacgatctctttcacatgttggcgacaacctaatgaggggtcatctagccaggaggaggaaggaccttccacttcgcccgatgcggaaagcctcttccgagaggctctgtcaaataaggtcgacgagctggcccatttcctgttacggaaatatagggccaaggagctggtcactaaagccgagatgctggagcgagtcattaagaactacaaacgatgcttcccggtgattttcggtaaggcatcagaatcgctcaaaatgatattcggaattgatgtgaaagaggtggatcctgcatctaatacatataccctcgtgacctgtctggggctaagttacgacggccttttaggaaataaccagatcttccctaagacaggtctgctaattatcgtactggggactattgctatggagggggatagtgcaagcgaagaagaaatctgggaagagctgggggtgatgggcgtatacgacgggcgggaacacacagtgtacggcgaaccccgtaagctgctgacgcaagactgggtgcaggagaattatcttgagtaccggcaagtgcccggctcgaaccctgcacggtatgaattcctctggggcccaagagccttagcagagacctcatacgtaaaagtgctcgaacacgtcgtcagagtgaatgcgagggttaggattgcttacccttctctccgtgaggccgcactgcttgaggaagaagagggcgtttag

SEQ ID NO: 123846 - DNA, 954 bp, synthetic construct
  misc_feature 1..954: note = Description of Artificial Sequence: Synthetic coding sequence
  source 1..954: mol_type = other DNA
atgtctagtgagcagaaaagtcagcactgtaaacctgaggagggagtggaagctcaggaagaagccctgggtttagtgggtgctcaggctccaactacagaagaacaggaggctgctgtgtcttcttcttcacccctcgtccctggaaccctggaagaggtgcctgctgcagaatctgcagggcctccccaatccccccagggagccagcgccctgccaaccaccatcagcttcacttgctggcgacaaccgaatgaagggagttctagccaggaagaagaggggccgtctaccagcccagacgctgaatccctattccgggaagcactctccaataaggtggatgaactggctcattttctgctcagaaaatatcgcgccaaggaattagtgactaaagcagaaatgctagagcgggttattaaaaattataagagatgctttcctgttatcttcggaaaagcctcagaaagcctgaaaatgatctttggaattgacgtcaaggaggtggaccctgccagcaacacctacactctcgttacatgcctgggattgagctatgacggactgttaggaaataaccaaatttttcccaagactggcttgcttatcatcgttcttggtactatcgccatggagggtgattctgcatcagaggaggaaatctgggaagaactgggagtgatgggagtgtacgatgggagggagcataccgtgtacggagaaccccgtaaactgctgactcaagattgggtgcaggagaactacctggagtacaggcaggtacccggttcgaacccagcgagatacgagtttctttggggcccacgagcactggccgaaacatcctacgtgaaggtcctcgagcacgtagtgcgagtgaatgctagggtgcgcatagcttatccatcccttagagaggcagccttgctggaagaggaagagggcgtctag

SEQ ID NO: 123847 - DNA, 954 bp, synthetic construct
  misc_feature 1..954: note = Description of Artificial Sequence: Synthetic coding sequence
  source 1..954: mol_type = other DNA
atgagctctgagcaaaaatcacaacattgtaagccagaggagggagtggaggcgcaagaggaggccttgggactggtgggagctcaggcgcctacaacagaagaacaggaggctgccgttagttcctcctctcccttggtacctggaacactagaggaagtgcccgcggctgaatccgcaggtccaccccagtccccgcaaggagcctctgcattaccgacgactatctcctttacctgctggcgccagcctaatgaaggctcaagttcgcaggaagaagaaggcccgagcacatcccccgacgcagagagtctgttcagagaggccttgtctaacaaagtagatgagctagctcactttttgcttcgaaaatacagagcaaaggaactcgtaactaaagctgaaatgctggaacgagtaataaagaattataagcgctgtttccccgtcatattcggcaaagcaagcgaatccctgaaaatgatatttgggatcgatgtgaaggaggtggatccggccagcaacacctacacccttgtcacctgcctgggtttaagttacgatgggctgcttggcaacaatcagatcttccccaaaaccgggctcttaattatcgtattgggtacaatagccatggagggagattccgcatctgaggaggagatctgggaggaattaggcgtgatgggcgtttacgatggccgtgagcacacagtgtacggggagccccgtaaattgctgacacaggattgggtgcaggaaaattacctggagtatcgccaggtcccggggtcgaaccctgccagatacgagtttttgtggggtccacgagccctggcagagaccagctacgttaaagtgctggaacatgtcgtccgagtcaacgcccgggtgcgcattgcatatcctagtcttcgggaagcagcactcttagaggaggaggaaggggtgtag

SEQ ID NO: 123848 - DNA, 693 bp, synthetic construct
  misc_feature 1..693: note = Description of Artificial Sequence: Synthetic coding sequence
  source 1..693: mol_type = other DNA
atgtcatctgagcagaagagtcaacattgcaaaccggaggaaggtgtcgaagctcaagaagaagccctgggtctcgtgggggctcaggcgccaacaacagaggagcaggaggccgccgtctccagctcaagtcctttggtcccgggtacactggaagaggtgcccgccgccgaatctgccgggccacctcaatcccctcaaggcgcgagcgcgctgccaaccacaataagctttacgtgctggcggcagcccaacgagggttcgagctcgcaggaggaagaggggccctccacttcgcctgacgccgaaagtctgttcagggaagcactgagtaacaaagtggacgagctggctcacttcctgctgcgcaagtaccgagcaaaagagctcgtcaccaaagctgaaatgctagaacgcgttataaaaaactataaacgctgttttcctgtcattttcggaaaagcaagtgagagccttaaaatgatattcggtattgacgtgaaagaagttgatcctgcctctaacacgtacactcttgtaacctgtctgggcctctcatacgacggtctgttaggtaataatcagattttcccgaagacaggactgttgattatagtccttggcacaatcgccatggaaggggattcggcctccgaagaggagatatgggaggagctgggcgtgatgggctag

SEQ ID NO: 123849 - DNA, 654 bp, synthetic construct
  misc_feature 1..654: note = Description of Artificial Sequence: Synthetic coding sequence
  source 1..654: mol_type = other DNA
atgtcttccgagcaaaagagccagcattgcaagcctgaagaaggcgtcgaggctcaagaagaggctttaggactcgtaggagcccaagctccaactacagaagagcaggaggccgccgtgtccagttcctcaccattggtcccaggaacccttgaggaagtaccagccgccgaaagcgccgggccaccacagagtccacagggcgcaagcgccctgccgacaacaatctctttcacatgttggaggcagcccaacgagggaagtagcagtcaggaagaggaggggccatccacttcgcctgacgcagagtcactcttccgagaagccctgagcaataaggtggacgagctagctcattttctgttgcgtaagtaccgagccaaagaactggtgactaaagcagaaatgttagaacgcgtgattaagaattacaaaagatgcttcccagtgatcttcggcaaagccagcgaatccttgaagatgatttttggcatcgatgtgaaggaagtcgaccccgcaagcaatacatatacattagtaacctgccttggcttatcctatgacggtcttttggggaacaatcagattttcccgaaaacgggtctgctcattattgtgttgggaacaatcgctatggaaggggactcggcgtag

SEQ ID NO: 123850 - DNA, 726 bp, synthetic construct
  misc_feature 1..726: note = Description of Artificial Sequence: Synthetic coding sequence
  source 1..726: mol_type = other DNA
atgagcagtgaacagaagtctcagcactgtaaacctgaagagggggtggaggcccaggaagaagcactgggactcgtgggcgctcaagcaccaactacagaagagcaggaggccgcagtgagctcatccagcccgctggtgccggggacactggaggaggtgcccgcagcagagtctgccggacccccacagtccccccaaggcgctagcgccctgccaacaactatctcgttcacttgctggcgccagcccaatgaaggatccagttcacaggaagaggagggcccatccacatctcctgacgctgagtccctttttagagaagccctgagtaacaaggtggatgaactggcccacttccttcttaggaagtacagggctaaagagttagtcacaaaagccgagatgttagagcgtgtcattaaaaattataagaggtgttttccggtgatcttcggtaaggcctcagagtccctgaagatgatttttggtattgacgtaaaggaagtggatcccgcttcgaacacgtacacacttgttacctgtcttgggttgtcctacgacggtttgctggggaataaccagattttccctaagaccggtctgttgatcattgtgctgggcaccattgccatggagggtgattcggctagcgaggaggagatttgggaagaacttggggtcatgggggtctatgatggccgcgagcatacagtttatggttag

SEQ ID NO: 123851 - DNA, 519 bp, synthetic construct
  misc_feature 1..519: note = Description of Artificial Sequence: Synthetic coding sequence
  source 1..519: mol_type = other DNA
atgtcctctgagcagaagtcacagcattgcaagccagaggaaggagtcgaggctcaagaagaggccctgggcctggtgggtgcacaggctccaaccactgaggagcaagaggcagcggtttcctcctcatcccccctggtgccaggcaccctggaggaggtgcctgctgccgagagcgccgggccccctcagtcccctcagggcgcctcagcactgccgactaccatttcattcacctgctggcgacagcccaacgaaggaagcagtagtcaagaggaggagggcccgtccacaagcccagacgcagaatctcttttcagggaagccctttccaacaaagtcgatgaactcgcccattttctcttaaggaaatatagggcaaaggaactggtcactaaagctgaaatgctcgaacgggtgatcaagaactataaaaggtgctttcccgtgattttcggaaaagcatcagagagcttaaaaatgatttttggaattgacgtgaaggaagttgacccctag

SEQ ID NO: 123852 - DNA, 726 bp, synthetic construct
  misc_feature 1..726: note = Description of Artificial Sequence: Synthetic coding sequence
  source 1..726: mol_type = other DNA
atgtcatccgaacagaagtcccagcactgcaagccggaggaaggcgtcgaagcccaggaagaagcccttggcctagttggcgcgcaggcgcctactaccgaagaacaggaagcagcagtctcatcgagcagtccactggtcccaggaacgctagaggaggttccggccgctgagagtgccgggccgcctcagtcaccgcagggcgcttcagcccttccaaccacaatctcatttacatgctggcggcagcccaacgaaggctcctccagtcaggaagaggagggcccctctacgtcgccggatgccgaaagcctttttcgtgaagctcttagtaacaaagtagacgaactcgctcatttcctcctccggaagtatagggctaaggaattggtcaccaaggctgagatgctcgaacgagtgattaaaaactacaagcgttgcttccctgttattttcggcaaggcttctgagagtctcaaaatgatatttggaatcgacgtgaaagaagtggatcctgcttccaacacatatacactagtcacatgcctcggcctctcatatgacggactgctcggcaacaaccagatctttccaaagacaggcctgctcatcattgttctgggcacgatcgctatggaaggcgactcggcatccgaggaggaaatctgggaggagctcggcgtgatgggcgtgtacgatggtagagaacacaccgtgtacggttag

SEQ ID NO: 123853 - DNA, 726 bp, synthetic construct
  misc_feature 1..726: note = Description of Artificial Sequence: Synthetic coding sequence
  source 1..726: mol_type = other DNA
atgagcagcgagcaaaagtcacaacattgcaaaccggaagagggagttgaagctcaggaagaagccctgggcctagtcggagcccaggccccgacaacagaggagcaggaagccgcagtctctagttcttctcctctggtgcccggcaccctcgaggaggtcccagccgccgagtcggccggcccccctcaaagtccccagggcgccagcgccctccccaccacaatttccttcacctgttggcgccagccgaacgagggatcttcaagtcaggaggaggagggaccctccacgagccctgacgcggaaagcttgttccgagaagcactaagcaacaaggtggatgagctggcacactttcttctgcgcaaatatagagccaaggagctcgtgaccaaggcagaaatgctcgagcgcgtaattaaaaactacaaacgatgttttcctgtgatattcgggaaagcttcagaaagcctgaagatgatctttgggattgacgttaaggaggttgatcctgccagcaacacatacaccctggtcacgtgcctgggtctctcttacgatgggctcttaggcaataatcagattttcccaaaaacaggactgctgattattgtgctgggaactatcgctatggaaggcgattctgcaagtgaggaagagatctgggaagaacttggagtgatgggcgtatatgacggtagggagcacacagtttacggatag

SEQ ID NO: 123854 - DNA, 654 bp, synthetic construct
  misc_feature 1..654: note = Description of Artificial Sequence: Synthetic coding sequence
  source 1..654: mol_type = other DNA
atgtcctcagagcagaagtctcagcactgcaaaccagaagagggcgtggaagcccaggaggaggctcttggccttgtcggtgcacaggcacccacgactgaggagcaggaggccgccgtgtctagcagcagccccctggtgcccgggacgttagaggaagtgcctgctgctgaaagcgccggccccccacagtccccccagggagccagtgcactgcccactacaatctccttcacttgctggcgccagcccaatgagggaagcagctcccaggaggaagagggcccctctacatctcctgatgcagagtctctgttccgtgaggcgctcagtaacaaagtagatgaactcgctcactttctgctgagaaaataccgcgctaaggagttggttacaaaggccgagatgctcgagagggtcataaagaattacaaacgttgttttcccgtgattttcggtaaggcctccgaatccctgaaaatgatttttggaatagacgtgaaggaggtggatcccgccagcaacacttatacccttgtcacatgtctggggctgtcttacgacggccttctggggaataaccaaatcttccccaaaactggcctgctgatcatcgtactgggaacgatcgctatggagggtgattccgcttag

SEQ ID NO: 123855 - DNA, 726 bp, synthetic construct
  misc_feature 1..726: note = Description of Artificial Sequence: Synthetic coding sequence
  source 1..726: mol_type = other DNA
atgagtagcgaacagaaatctcaacattgtaagcccgaagaaggggtcgaggcgcaagaggaggcgctcggactcgttggcgcccaggcccccaccacggaggagcaggaggctgccgtgtcttcaagttctcctcttgtgccaggtactcttgaagaagtccctgcggctgaatccgcaggaccaccgcaatcgcctcagggggcaagtgctctgcccaccacgattagcttcacgtgctggcgacagcctaatgagggcagctcttcacaagaggaggaggggccgagtaccagccccgatgcagagtcccttttccgtgaggccctgtcgaacaaggtggacgaattagcccactttctactgcggaagtatcgtgctaaggagctagttaccaaagcggagatgttagaacgagtcatcaagaactataaaagatgtttcccagttatctttggtaaagccagtgaatctctcaaaatgatttttggcattgacgtcaaggaggtcgacccagcttccaacacgtatacactggtgacctgcctgggtctctcctacgatggcctcttggggaacaatcaaatcttccccaaaaccggattactcattattgtgctgggcaccatcgctatggaaggggacagtgccagcgaagaggagatctgggaggagctaggtgtcatgggcgtctatgacggtcgtgaacacacagtgtacggctag

SEQ ID NO: 123856 - DNA, 945 bp, synthetic construct
  misc_feature 1..945: note = Description of Artificial Sequence: Synthetic coding sequence
  source 1..945: mol_type = other DNA
atgccccttgagcagcgatcacagcattgcaagcccgaggaggggctggaggctcgtggggaagctttgggtctcgtgggtgcacaggctcctgccaccgaggagcaggaggctgcaagtagcagcagtacgctggtcgaggtcacacttggcgaggtgcctgccgctgaatctccagaccccccgcagtcaccacaaggtgccagcagtctgcccaccacgatgaactacccactttggtcccagagctatgaggatagtagcaatcaggaggaggaggggccgtctacttttcccgacctggagtccgagttccaggccgcccttagccggaaagtggccaagttagtgcactttctactcctgaaatatcgagcacgcgagcctgtgaccaaggctgaaatgcttgggagtgtagtaggaaattggcaatatttcttcccggtgattttttctaaggcatctgactcccttcaactagtctttggtatagagttaatggaggtggatcccatcggacatgtgtacatttttgctacttgtctgggcctctcatacgatggccttctcggtgataaccagatcatgcctaaaaccggatttctcatcatcatcctggccatcatcgccaaagagggtgactgtgcacccgaagagaagatttgggaagaactgtccgtcctggaggttttcgaagggcgagaggacagtatttttggcgatcccaaaaagctcctgacgcagtatttcgtgcaggaaaattacctcgagtaccggcaggttccaggatccgatcccgcctgttacgaatttctgtggggcccccgggcgctgatcgagacatcttatgtgaaggtgttgcatcacatggtgaagatcagtggtggtccgagaatttcttatcctctactgcatgaatgggccctccgtgagggagaggaatag

SEQ ID NO: 123857 - DNA, 606 bp, synthetic construct
  misc_feature 1..606: note = Description of Artificial Sequence: Synthetic coding sequence
  source 1..606: mol_type = other DNA
atgcctctggagcagagaagtcagcactgcaagccagaggaggggcttgaggcccgaggtgaagcgctcggtttggtgggcgcacaggccccagctacagaagagcaagaagcagcttccagcagtagcactctggttgaggtgactcttggtgaagtgcccgctgcagagtctcccgacccccctcagtcccctcagggagcatcgtcccttccgacaactatgaattaccccctctggtcccaatcttacgaagattcttcaaatcaggaggaggaagggccatccacgttccctgatttggaaagtgagttccaggctgcactgtccaggaaggtggccaagttggtacactttctgctgctcaagtaccgcgcaagagagccagttactaaagccgaaatgctgggatcagttgtcggcaactggcagtacttttttccggtgattttctcaaaggcgtccgattctctccagctggttttcggcatcgagttgatggaggtggatcccatcggccatgtgtacattttcgcaacatgcctaggcctcagctacgacgggctgctgggggataaccaaattatgcctaagaccgggttctag

SEQ ID NO: 123858 - DNA, 708 bp, synthetic construct
  misc_feature 1..708: note = Description of Artificial Sequence: Synthetic coding sequence
  source 1..708: mol_type = other DNA
atgcccttggagcagaggtcccaacattgtaagccggaagaggggctcgaggcgcgtggggaagcactgggcctggtcggagcccaggccccagccaccgaggaacaagaggccgcttccagcagtagcaccttggtggaggtaactctcggggaggtccccgcagcagaatctcctgaccccccacaatccccccaaggcgcatcttctctgcctacgaccatgaactatccgttgtggtcacagagctacgaggatagcagcaatcaagaagaggaaggaccgtcaacttttcctgacttggaaagtgaattccaggccgctctgagcaggaaggtggctaagttagtgcacttcctgctgctgaagtacagggcgcgagaaccagtgactaaagccgagatgctgggatcagtggtgggaaactggcaatattttttcccagttatttttagcaaggcctcggacagcctgcaactggtgttcggtatcgaattaatggaagtggaccctattggacatgtttacatttttgccacttgtctcggcctgagctacgatggactgctgggcgataatcaaataatgcctaagaccggtttcctgataattatactggcgataatagccaaggagggcgactgcgcccctgaagaaaagatctgggaggaattgagtgtccttgaagtcttcgaagggagggaatag

SEQ ID NO: 123859 - DNA, 957 bp, synthetic construct
  misc_feature 1..957: note = Description of Artificial Sequence: Synthetic coding sequence
  source 1..957: mol_type = other DNA
atgctgcttgggcaaaaaagccagcgctataaggctgaggaaggactccaggctcagggcgaggcgcccggcctcatggacgttcagatccctactgctgaagagcaaaaagcggccagctcatcttctactctgataatgggcaccctggaggaggtgaccgattcaggctctccctctccgccccagtctccagaaggtgccagttccagcctgactgtcacggactctactctgtggagccagagtgacgagggctcttcaagcaatgaggaggaaggacccagcacctctcctgatcccgcacacctcgagtccctttttagagaagctctggacgagaaggtcgcggaactggtaaggtttctgctgagaaaatatcagatcaaagagccagtgacgaaagctgaaatgttagagtccgtgattaaaaattacaaaaaccatttccctgacatctttagtaaagcctctgaatgcatgcaggtaattttcggaatcgatgtgaaggaagtggaccctgctggccactcctacatacttgtgacatgcctcggcctttcatacgacggactgctgggtgacgatcagtcaactccaaagacaggtctgttgattattgtgctgggaatgattttgatggaagggagccgcgccccagaggaggcgatctgggaagctctttctgttatgggactttacgatggtcgggaacattccgtttactggaagctccgaaagctactgacacaggagtgggtgcaggagaattacctggaatacagacaggcccccggtagcgacccagtgcggtatgaattcctgtggggaccaagggctctggccgagacatcctacgtcaaggtgctagaacacgttgtccgggtgaatgcacgggtgcggatcagttatccctcgctgcatgaggaggcgctgggagaggagaaaggggtgtag

SEQ ID NO: 123860 - DNA, 957 bp, synthetic construct
  misc_feature 1..957: note = Description of Artificial Sequence: Synthetic coding sequence
  source 1..957: mol_type = other DNA
atgctcctgggccagaaaagccaaagatacaaagccgaggagggccttcaggcccagggggaagctccaggcctcatggacgttcagattcccaccgccgaagagcagaaagcagcgtctagctcaagtacactgattatgggaactctcgaggaggtgaccgattccggctccccaagccccccacagtcacctgagggagccagtagttcattgaccgtgaccgattctacactgtggtcccagtctgatgaaggtagttcatctaacgaggaagagggcccttccaccagccccgatcccgcccacttagaatccttgttccgagaggcactggacgagaaagtcgccgagcttgtccgtttcctgctacgcaagtaccaaattaaagaaccagtaaccaaagccgaaatgctagaatccgtcattaaaaattataagaatcattttccggacattttctccaaagcttcggaatgtatgcaggtcatcttcgggatagacgtgaaagaggtcgatcctgcaggtcattcatacatacttgtgacctgcctcgggcttagctatgatggcctgctcggagatgatcagtctacacctaaaaccggcctactgatcatcgtgctggggatgatacttatggaaggaagtcgtgcccctgaggaagccatctgggaggcactgtcagtgatgggtttatatgatggacgcgagcattccgtctactggaagttacggaagttattgacgcaggagtgggtgcaggaaaactacttggaatatcggcaggccccaggctccgatccggtgcggtacgagttcctttggggacccagggcgctcgctgaaacgagctacgtcaaagttctggagcatgtggtgagagtgaatgccagagtgaggattagctacccctcactgcacgaagaggcactaggcgaagagaagggggtgtag

SEQ ID NO: 123861 - DNA, 957 bp, synthetic construct
  misc_feature 1..957: note = Description of Artificial Sequence: Synthetic coding sequence
  source 1..957: mol_type = other DNA
atgctcttgggtcagaaatcccagagatacaaggcggaagaaggcctccaggcccagggagaagcaccaggattaatggacgtacagattccaactgccgaagagcagaaagcagccagttcgtcttcaacactgattatggggacacttgaagaggtgaccgattccggttcaccgtctcccccgcagagtcctgagggtgcttctagcagccttaccgtcacggattccactctctggagtcagagcgatgagggctctagcagcaatgaggaagagggtccctcgaccagccctgacccggctcatttggaaagcctgttcagggaggcattagacgaaaaagtggctgagctagtcagattcctcttgaggaagtaccagatcaaagaaccagtgacaaaggcggagatgctcgaatcggtgatcaaaaattacaagaatcacttcccagatatcttctcaaaggcctcagaatgtatgcaagtgatcttcgggatagacgtaaaagaggtagaccccgccggccattcatatattttagtcacctgtctcggactgagctacgatgggctgttgggtgacgaccagagtacacctaagactgggcttctcatcatcgtcctgggcatgatcctgatggagggatcacgcgcccccgaggaggccatctgggaggctctgtcagtcatgggcctgtatgacggcagagaacacagtgtatattggaagctgagaaaactgcttacccaggagtgggtgcaggagaactaccttgagtatcgccaggctcccggaagcgacccagttcgatacgagtttctgtggggccccagagccctggcagagacaagctacgtgaaagtgctcgagcatgtagtgagagtaaacgctagggtaagaataagctaccccagcctccacgaagaggccctgggagaggagaagggcgtgtag

SEQ ID NO: 123862 - DNA, 948 bp, synthetic construct
  misc_feature 1..948: note = Description of Artificial Sequence: Synthetic coding sequence
  source 1..948: mol_type = other DNA
atgagtttagagcagcgctctcctcattgtaagcctgatgaagaccttgaggcccagggtgaagatctcgggctaatgggcgcacaggagcctacaggagaggaagaggagactacatcctctagcgattctaaggaggaagaagttagcgcggctggatcctctagtccgcctcagagtccacaaggaggggcgagcagcagcatctctgtctactacaccctttggtcccagtttgatgaagggagtagtagccaggaggaagaagaaccatcttcgtcagtcgatcctgcccagctcgagtttatgttccaggaggctctgaagctcaaggtggcagaattagttcacttcctgctgcataaatacagagttaaagaacctgtaaccaaggccgagatgctcgagtctgttataaaaaattacaaacggtactttcccgtgattttcggcaaagcaagtgagtttatgcaagtgattttcgggactgacgtgaaggaagtcgatccagccgggcactcttacattctggttactgccctgggattatcttgcgatagcatgctgggcgatggtcattctatgcccaaagcagcattactgatcatcgtgttgggtgtgatactcacaaaggataattgcgccccagaagaagtcatttgggaagcacttagcgtgatgggcgtgtatgtcggcaaagaacacatgttctacggagagccgcgcaaactgctgacccaagattgggtacaggagaactacctggaatatcgacaggtgccaggaagcgatccggcacactatgaattcttgtggggcagcaaagcccacgccgaaacttcatatgaaaaagttatcaattatctggtgatgctcaacgccagggaacccatctgctacccatctctttatgaggaagtgcttggggaagaacaggaaggagtgtag

SEQ ID NO: 123863 - DNA, 345 bp, synthetic construct
  misc_feature 1..345: note = Description of Artificial Sequence: Synthetic coding sequence
  source 1..345: mol_type = other DNA
atgtcactagagcaacgctcaccccattgcaagccagacgaggatctggaggctcaaggcgaagacctcgggcttatgggggcacaggagccaactggtgaggaggaagagactacctcctcatccgattccaaagaagaggaggtctctgccgctgggagctcctctccccctcaaagtcctcagggcggtgcgtcatcctcaattagcgtgtactacactctgtggtcccaatttgacgagggatccagttctcaagaggaggaggaacccagctccagcgtggatcctgcccagcttgaattcatgttccaggaggctctgaagctaaaggtcgccgagtag

SEQ ID NO: 123864 - DNA, 930 bp, synthetic construct
  misc_feature 1..930: note = Description of Artificial Sequence: Synthetic coding sequence
  source 1..930: mol_type = other DNA
atgtctctcgagcagaggtcgccccattgcaagccagacgaggatctagaggcccagggcgaggacctcgggctgatgggcgcacaggaaccaactggggaagaagaagagacgacaagctcaagcgattctaaggaagaggaagttagcgcagctggttcctcttctccacctcagtccccccaggggggtgcgagcagctcgatatctgtgtactatacactgtggtctcaattcgatgagggaagcagcagccaggaggaagaggagccctcttcttctgtggacccggcacagctggagtttatgttccaggaggccctgaaactgaaggtagctgagctcgtgcacttcctcctccacaagtacagagtgaaagaacctgtgactaaggccgagatgctggagtctgttataaagaattacaagcgatatttccccgtgattttcggaaaagcgtcagaatttatgcaggtgatctttgggaccgatgttaaggaggtggatcccgcaggtcactcctatatactggtgaccgcccttgggctatcatgtgatagcatgctaggagatggtcattccatgccaaaagccgcactcttaatcatcgtgctgggcgtcatcctgactaaagataattgtgcacccgaagaggtgatctgggaggccctcagcgtgatgggcgtgtacgttggcaaagaacatatgttctacggagagcccagaaaactcctcacacaagactgggtgcaggagaattatctggaatatagacaggttcctggatcagacccggctcattacgagtttctctggggatccaaagcgcacgcagagactagttacgagaaggtgatcaattatctcgtgatgttaaacgccagggaacccatctgctacccatcactgtatgaggaggtcctcggatag

SEQ ID NO: 123865 - DNA, 591 bp, synthetic construct
  misc_feature 1..591: note = Description of Artificial Sequence: Synthetic coding sequence
  source 1..591: mol_type = other DNA
atgtccctggaacaacgttctccacactgcaaacccgatgaagacttagaagctcaaggggaagacctggggctgatgggggcccaggaaccaactggcgaagaagaagaaactacatcatccagcgatagcaaggaggaagaagtgtctgctgccgggtcatcttcaccaccgcagtccccacaagggggggcgagttcctccataagtgtctattatacgttatggagccaatttgacgaagggtcctcttcccaggaagaggaagagccctcctcttcagtggacccagctcagttagagtttatgtttcaagaggccctgaagttgaaggtggccgagctggtgcatttcctgttgcataaatatcgggtgaaagaacctgtgaccaaggccgagatgttggaatcagtcataaagaactacaaacgttactttcccgtgatattcggtaaagcaagcgagttcatgcaagttattttcggaacggatgtcaaggaagtggatcctgcaggccatagttacatcctggtgacggcgctcgggttgagctgtgacagcatgttaggcgacggacatagtatgccctag

SEQ ID NO: 123866 - DNA, 294 bp, synthetic construct
  misc_feature 1..294: note = Description of Artificial Sequence: Synthetic coding sequence
  source 1..294: mol_type = other DNA
atgtctctggaacaacgcagccctcactgtaaaccagacgaagatctggaagctcagggagaagacttaggtctgatgggagcgcaggagcccaccggtgaggaagaggagacaacaagtagctctgacagcaaagaagaagaagtatcagcagccggatcctcatccccaccacagagcccccagggtggtgcttcctccagcattagtgtgtattacaccctgtggtcccagtttgacgaggggagctcatcacaggaagaagaagagccatccagctccgttgacccctag

SEQ ID NO: 123867 - DNA, 948 bp, synthetic construct
  misc_feature 1..948: note = Description of Artificial Sequence: Synthetic coding sequence
  source 1..948: mol_type = other DNA
atgagtctggagcaaaggagcccacactgcaagcctgatgaggacctggaagcccagggagaggatctgggcctcatgggggcccaagaacccacgggggaggaggaggagacaacgtcctccagtgattccaaggaggaggaggtgtccgctgccggttcctcgtcacccccccaatccccccagggcggcgcttcttcaagtattagcgtgtactacacgctttggtcacagttcgacgagggttcatcatcccaggaagaggaggaacccagcagctccgtggaccccgcgcagcttgagttcatgttccaggaagcactcaagttaaaggtggccgagctggtgcatttcctgcttcacaagtaccgagtcaaggagcctgtaaccaaggcggaaatgctggagagcgtgatcaagaactacaaaaggtacttccccgtgatctttgggaaggcttcagagtttatgcaggtgatcttcggtacagatgtgaaggaggttgaccccgcagggcactcttatattctggtcaccgcgctcgggctgtcatgcgattcgatgctgggggacggccacagtatgcctaaagctgctctgctgattattgtacttggagttattctgactaaggataactgcgcccctgaggaagttatctgggaagctctcagcgttatgggggtttatgtggggaaggagcacatgttctacggcgagccgaggaaacttttgacacaggattgggtacaggagaattatctcgagtacagacaggtacccgggagcgatccagcccattacgagtttctatggggaagcaaggcccacgcagagacttcttacgagaaggtgatcaactatctggtgatgctgaatgctcgagaaccaatatgctatcctagcctttacgaggaagtgctgggcgaggaacaggaaggggtttag

SEQ ID NO: 123868 - DNA, 1044 bp, synthetic construct
  misc_feature 1..1044: note = Description of Artificial Sequence: Synthetic coding sequence
  source 1..1044: mol_type = other DNA
atgccacgcggccaaaaatcaaaactgcgagcccgcgaaaaaagaagaaaagcgcgcgaggaaacacaaggattaaaggttgctcacgctacggcagccgaaaaagaggagtgtcctagctccagcccagtactgggggacacacccactagctcacccgccgcgggtattccccagaaacctcagggagctcctcccaccaccaccgccgctgccgccgtctcttgcaccgaaagtgatgaaggcgccaagtgccagggcgaggagaacgcctccttctcgcaggccactacatcaaccgagtctagcgttaaggatcccgtggcctgggaggcagggatgttgatgcactttatcctgcgaaagtacaaaatgagagagcctatcatgaaggcggacatgttgaaggtggtagacgagaaatacaaggatcatttcacagagatactcaatggcgccagccgtaggctggaactcgtctttgggctggacttgaaggaggacaacccaagcggccatacttatactttggtttccaaactgaaccttaccaatgacggcaacctctccaatgactgggacttcccccgaaacgggttattaatgccgctgctgggcgtcatcttcttaaaagggaactctgcaaccgaggaggagatctggaaattcatgaatgtactgggagcctatgatggtgaggaacatttaatctacggcgagccaaggaagtttatcacacaggatctggtccaggaaaagtatctgaaatacgaacaggtccctaactccgaccccccccggtatcagtttctctggggccctcgcgcatacgcggaaaccactaagatgaaagttctggaatttctggccaaaatgaacggggcgacgcccagggacttcccatcacactatgaggaggcccttcgagatgaggaggagagagcccaggtgagaagcagcgtaagagcacgcaggcggactactgccacaacgttccgcgccaggagccgggcaccattcagtcggtcatcccacccaatgtag

SEQ ID NO: 123869 - DNA, 1044 bp, synthetic construct
  misc_feature 1..1044: note = Description of Artificial Sequence: Synthetic coding sequence
  source 1..1044: mol_type = other DNA
atgcctaggggacagaaatcaaagctgagagcccgcgaaaaacggagaaaggctagggaagaaacccaggggctcaaggtggcccatgccactgctgccgagaaggaagaatgtccgagttccagtccagtactgggggatacccccacctccagccctgcagccggtattccccagaaacctcaaggggccccacccaccacaactgcagcagccgctgttagctgcactgaaagcgacgaaggggccaaatgccaaggcgaggaaaacgccagtttctcacaggcaactacctctacggagagctctgtcaaagatcccgtggcttgggaggctggaatgctcatgcacttcattcttcgtaaatacaagatgcgggagcctatcatgaaagccgatatgctcaaagtggtggatgaaaagtacaaagatcacttcaccgaaatcctcaacggcgccagccgcagactggaactcgtgttcggtctggatctaaaagaagataatccatccggccatacatatacactcgtgagcaaacttaatctaacaaatgatgggaacctctctaatgactgggattttcctcggaacggcctgctgatgcccctcctcggcgtaatttttcttaagggcaactctgctacagaggaagaaatctggaagtttatgaacgtgctgggagcctatgatggagaggagcacctgatctacggtgaacctcgaaagttcatcacgcaggatctcgtgcaggagaagtacctgaaatatgagcaggtccccaattctgatccaccacgctaccagtttctgtggggtccacgcgcatatgccgagaccactaaaatgaaggttctcgaatttttggctaaaatgaatggtgccacgccccgcgacttcccttctcactacgaagaggctcttagagacgaggaggagagggctcaagtgaggtctagcgtgagggctcgcaggcgcacgaccgcaaccacatttagagcacgaagcagagcccctttctctcgaagctcccacccaatgtag

SEQ ID NO: 123870 - DNA, 1044 bp, synthetic construct
  misc_feature 1..1044: note = Description of Artificial Sequence: Synthetic coding sequence
  source 1..1044: mol_type = other DNA
atgcctaggggtcaaaagtctaagctaagagctagggagaagcgacggaaagcgcgcgaggaaactcaagggcttaaggtggcacatgccaccgcggccgagaaagaggaatgtccttcctcatctccggtcctgggcgacacacctacctcatcccctgcggccgggatccctcagaaaccccaaggtgcaccccccactacgacggcagcggccgccgtctcatgtaccgagagcgacgaaggggccaagtgtcagggcgaagagaacgcatcattttcccaggctaccacatccaccgaaagtagcgtaaaagatcccgtggcctgggaggcggggatgctgatgcacttcatcctcaggaaatacaagatgagggaacccataatgaaggccgatatgctgaaagtagtcgacgagaagtataaagaccactttaccgagattttgaacggcgcttctagaagattggaacttgtgttcggcctggacttgaaggaagacaacccctcagggcacacctacaccctggtgagtaaactcaacctaactaatgacggaaatctgagtaacgattgggactttccaaggaatggcctgctcatgcccctgttaggtgtcatctttctaaaaggcaacagtgctacagaggaggaaatatggaagttcatgaatgttctgggcgcatatgacggagaagagcacctgatttacggtgagccacggaaattcattactcaggacctggtccaggagaaatacctgaaatatgagcaagtgcctaacagtgatcccccacgctaccagtttctttggggccccagagcttatgcggagaccacaaaaatgaaagtgcttgaatttctagcaaagatgaatggcgccactccccgtgacttcccctcgcattatgaagaagcgctgagagatgaggaagagcgggcacaggtgagaagcagcgtgcgcgcaagacgcaggacgaccgccaccaccttccgcgctcgaagcagggctccgttctccaggtccagccatccaatgtag

SEQ ID NO: 123871 - DNA, 1044 bp, synthetic construct
  misc_feature 1..1044: note = Description of Artificial Sequence: Synthetic coding sequence
  source 1..1044: mol_type = other DNA
atgcccaggggacagaagtctaagctgagggcccgggagaagagaagacaggctaggggcgggcttgaggatctaatcgatgcccttgacatcctcgaggaagaagaagagtcccccccctccgcatccgcttgcctgaaggatgtgttccaaagctctctcgacggcgcttcgaacaatccacacggactacgcgaggcgcagagtaccagcaccagcgccaccgctgcttctcacactcggcatcccgaaggagtcaacgaccaaatggaagagagacctatctgcacccaggatctggaggccaccgattcttttccccgtggacccgtcgatgaaaaagtaatcattctcgtgcattacctgctctacaaataccagatgaaggaaccaatcaccaaggccgacatgctgcgtaatgtgactcaaatgtcaaaaagccagtttccggtgatactgagtcgggcaagtgagcacctggaactgatcttcgggctggaccttaaggaagtagagcccaacaagcatatttatgtcctggttaacaagttggatcttgggtgtgatgcaaagctcagcgacgagaccggcgtgcccaaaacaggactcctgatgactgtcctcggcattatcttcacgaatggaaattgtgtcgctgaagaggaagtttggaaggttttcaatactatggggctgtacgatggtatcgagcactttatgtttggcgagcctcgaaaactgctgacaaaagatcttgtcaaggagaactatctcgagtaccagcaagtaccgaacagtgaccctccgcgttaccaattcctgtggggccccagagcccatgccgagacctcaaagatgaaggtactcgagtttctggccaaagtgaatgataccgcaccaagcgaattcagcaattggtacaccgaagccctgcaggacgaagaagagcgcgccagagcccgggtggcagctaaggctagagtgagtgctacagccggagcccgcagtaaggtcaagagttccaagtctagtcagctgcagtag

SEQ ID NO: 123872 - DNA, 975 bp, synthetic construct
  misc_feature 1..975: note = Description of Artificial Sequence: Synthetic coding sequence
  source 1..975: mol_type = other DNA
atgtcccaggatcaggagtcgcccaggtgtacccacgaccagcaccttcaaacatttagtgagactcaatcactggaggtggcgcaggtatcaaaggctctcgaaaaaaccttgctcagctcttcccacccactagtgcctggcaagctaaaagaggcaccagcagccaaggctgagagcccgctcgaggttcctcagagcttttgcagctcgagtatcgctgtcaccacgacctcttcttccgagtcagacgaagcctccagcaaccaggaagaggaagactccccttcaagctcagaggatacatctgacccaaggaacgtgccggccgacgccctggatcagaaggtcgccttccttgtcaacttcatgcttcacaagtgtcagatgaagaagcccatcacgaaggctgatatgctaaagatcatcatcaaggatgacgaaagccacttctcagagatcctcttgcgggcctccgaacacctggagatgatcttcggtctggacgtggtagaagtcgatcccacaacccactgctatggcctgtttattaagctgggccttacttacgacggcatgctgagtggtgaaaaaggggtgccaaagacgggactcttgattatcgtactcggcgtgatctttatgaaaggcaatcgcgcgaccgaggaggaggtctgggaggttctaaacctgacaggagtctatagtggcaaaaagcactttattttcggagaacctaggatgttaattacaaaggattttgtgaaggagaagtatttggagtatcaacaggtagcaaacagtgacccagctaggtacgaatttctctggggccctagggcgaaggcggagacctctaagatgaaagttctggaatttgtggcaaaggtacatggcagttatcctcattcattcccgagtcaatatgcagaggctctgaaggaagaggaagagagagcaagagcccgcatctag

SEQ ID NO: 123873 - DNA, 975 bp, synthetic construct
  misc_feature 1..975: note = Description of Artificial Sequence: Synthetic coding sequence
  source 1..975: mol_type = other DNA
atgagtcaggatcaggagtctccccgttgtactcacgaccagcatctgcagacattttctgaaacccagtctctcgaggtcgcgcaggtatccaaagccctggaaaaaacattactctcctcgtcccaccctctcgtccctggaaaacttaaggaagcaccagccgcaaaggccgagtctcctctcgaggtgcctcagtcattctgttcctcctctatagctgtgaccactacctcctcctcagagtcagacgaggcttcctcgaaccaggaagaggaggattcaccatcctcaagtgaggacaccagcgacccaaggaatgtgcccgccgacgctctggaccaaaaggtagcatttttagtcaacttcatgctacataagtgtcaaatgaaaaagccaatcactaaggccgacatgctgaaaatcatcataaaggacgacgaaagtcatttctcagaaatcttgcttcgtgcgagtgagcacctagaaatgatctttggcctggatgtggtcgaagtggatccgacaacacattgttatggcttgtttatcaagttgggcttgacgtacgatggcatgctgagcggggaaaaaggcgtccctaaaactggcctgctgatcatcgttttgggcgtcatctttatgaaaggaaatagggcaactgaagaagaggtatgggaggttctcaacctgacaggagtttactccggaaagaaacactttatctttggtgagcctcgcatgcttatcaccaaagatttcgtgaaggagaagtatctcgagtaccagcaggtcgctaattcagatcctgcacggtacgagttcctttggggcccacgcgccaaagcagaaaccagcaagatgaaagttctagagttcgtggccaaggtgcatggcagctatcctcacagcttccctagccaatacgccgaagctctgaaggaagaggaggaacgcgccagggctcgaatttag

SEQ ID NO: 123874 - DNA, 975 bp, synthetic construct
  misc_feature 1..975: note = Description of Artificial Sequence: Synthetic coding sequence
  source 1..975: mol_type = other DNA
atgagtcaagaccaagaatccccccgctgcacacatgatcagcacctgcaaacgttttccgaaacgcagtctcttgaagtggcgcaagtctccaaggccctggagaagaccctgctctcatcatctcacccattggtccccggtaaactcaaggaagctccggccgcgaaagcagagtccccacttgaggtccctcagtcgttttgcagcagcagtatcgccgtgactacaaccagctcctcagagtcagacgaggcctcatcaaaccaggaggaagaggatagcccctcctctagcgaagatacctccgacccgagaaatgtacctgccgacgcgttggaccaaaaagtggctttcctcgtcaatttcatgctccataagtgtcaaatgaaaaagcccatcaccaaagcagatatgctaaaaataattattaaagatgacgaatcccattttagcgaaatcctgctaagagcttcagagcatcttgaaatgatttttggcctggacgtggtcgaagtggacccgaccacacattgttacggtctttttatcaaactgggacttacatacgatggtatgttgtctggggaaaagggagtgcctaagacaggtctgttgattatcgtgctgggcgtgatctttatgaagggtaaccgcgcaaccgaagaagaagtctgggaagtactgaacttgacaggagtgtatagcggcaaaaagcattttatcttcggagaaccacggatgctcattacgaaggattttgtcaaggaaaaatatctcgagtaccagcaggtggcgaactctgaccccgcccgatacgagtttttgtggggacccagggcgaaagcggaaaccagtaagatgaaagtccttgagttcgtggcaaaagttcacggcagctacccacatagctttcccagccaatacgctgaggccctgaaagaggaagaggagagggctagagctaggatttag

SEQ ID NO: 123875 - DNA, 975 bp, synthetic construct
  misc_feature 1..975: note = Description of Artificial Sequence: Synthetic coding sequence
  source 1..975: mol_type = other DNA
atgagccaggatcaggagtctccgaggtgtacgcacgaccagcacctccagacattctccgaaactcagtcacttgaagtggcccaggtgtccaaagctctggagaagacacttttatcctcctcacatcctttagtccccgggaaacttaaggaggcacccgctgcaaaagccgagtcccctctggaagtgcctcagagtttctgtagtagttctatcgccgtgacgacgacatccagctcagaaagtgacgaagcttccagcaatcaggaagaggaagacagtccgtctagttccgaagataccagcgatccgcgaaacgtacccgctgacgcactcgaccagaaggtggcgtttttggtgaattttatgttgcataagtgccaaatgaagaagcctattactaaagcagatatgctgaagattattatcaaggacgacgaatctcactttagtgaaatcctcctgcgggcatctgagcacctggagatgattttcggactggacgtggtcgaggtagaccccacaacgcattgctacggtctcttcatcaaactggggctgacttacgacggaatgctcagtggcgagaagggggttcctaagaccggactccttataattgtcctcggggttatcttcatgaaaggtaatagggcgactgaggaagaagtgtgggaggtgctgaatctcacaggagtgtactctggcaagaaacattttatttttggtgagcctaggatgctcattaccaaggattttgttaaagaaaagtacctagagtatcagcaggtcgccaacagcgacccagctagatatgaattcctgtggggcccgcgagctaaggccgagacaagtaaaatgaaggttctcgaatttgtggccaaggttcatggtagctacccacattcgtttccatcacaatacgcggaagctctgaaggaggaggaagagagggcgagagcgcggatttag

SEQ ID NO: 123876 - DNA, 1071 bp, synthetic construct
  misc_feature 1..1071: note = Description of Artificial Sequence: Synthetic coding sequence
  source 1..1071: mol_type = other DNA
atgggtacagaggctcagccagtggttaaggctgtgattctccactgtttaccctcatgccctcattcttgtctattgcctcctaccagagtgataatgagtcaagaccaggagtcccccaggtgtactcacgaccagcacttgcagactttcagcgaaacacaaagcctggaggttgctcaagtgtctaaggccctggagaagaccctgctgtcctcatctcaccctctggttccgggtaagctcaaagaggctccagctgcaaaggctgaaagtcctctagaagttcctcagtccttctgcagctcttccatcgccgtcacgacgacaagttctagtgagtcagacgaagccagtagcaaccaggaagaggaggactcaccttcgtcatccgaggacacatcagacccaagaaacgtgcctgctgacgctctggaccagaaggtcgcctttttagtcaatttcatgcttcacaaatgccagatgaagaagccaattaccaaggcagatatgctgaaaattatcataaaagacgacgagagccacttcagcgagatcttgctgcgtgccagcgagcatctagaaatgatcttcgggctggacgtcgtggaggtggatccaacaacgcactgttacggactctttatcaagctggggcttacgtatgatgggatgctctctggcgagaaaggtgtgcctaaaacaggacttctgatcattgtccttggtgtgatctttatgaagggtaaccgggccactgaggaggaggtgtgggaggtgctaaacctgactggagtttattccggcaaaaagcatttcatatttggggagcctcggatgctgatcactaaggacttcgtcaaagaaaagtacctggaataccaacaggttgccaattcagatcctgcccgatatgagtttctctgggggccccgggccaaggcagagacatccaagatgaaggtgctcgagttcgtggccaaggtgcatggaagttacccacattcttttccctcccagtacgccgaagccctgaaggaagaggaagagagagctcgggcaagaatttag

SEQ ID NO: 123877 - DNA, 996 bp, synthetic construct
  misc_feature 1..996: note = Description of Artificial Sequence: Synthetic coding sequence
  source 1..996: mol_type = other DNA
atgcctcggggccaggctagtaagcggagggctcgggagaaaaggcgtcaagcaaggggcgaggaccagtgtctcggcggtgctcaggccaccgctgctgagaaagagaaactaccctcgtcttcgagcccagcttgccagtcccctccacagtctttcccaaacgcgggaattccccaggaaagccagcgcgcaagctatccctcaagccccgcctccgctgtgtccctgaccagctccgacgaaggggccaaagggcagaagggcgaaagtcccaatagcttccacggtccatcatccagcgaatcgaccggacgggacctcctcaacactaaaaccggtgaactcgtgcaattcctgcttaataaatacatacggaaagaacctattaccagggaagctatgctgaaggtgattaacagaaagtataaacaacacttccctgagatcttacggcggagcacggagaacgtcgaggtggtgtttggtctgtacttgaaagagatggatccaagcagacagagttacgtactggtcggcaaactggattttccaaaccagggaagcctgtcagatggtggggggttccccctcagtggcctcctgatggttctgctgtccaccatcttcatgcacggaaatagagctactgaggaagagatgtgggagtgtctgaacgccctcgggatgtacaaaggccggaaacacttcatttatggagaacctcaggagctcgtaactaaggacctggttcgtgagggatacctggaataccagcaggtgcccagttcagatcctccgaggtacgagttcctttggggcccacgggcgagagccgaaactagcaagatgaaagtgctagaattcgtggctaagctcaacgacactgtggccagcacctacaagtcaagatatgaggaagcgctaagagaagaggaagaacaggccagagcccgcgccgtcgcccgggattctgctagggctagagcatcttag

SEQ ID NO: 123878 - DNA, 1011 bp, synthetic construct
  misc_feature 1..1011: note = Description of Artificial Sequence: Synthetic coding sequence
  source 1..1011: mol_type = other DNA
atgcctagaggccaggcaagcaagaggcgggcacgcgagaagcggcgccaggcccgcggggaagaccagtgcctgggtggggcgcaagcaacagctgccgaaaaggagaaactccccagcagctccagcccagcttgtcaatcacctccacagagcttcccaaacgccggcattccgcaggagtcgcagagggcctcctatcccagctcgcccgcatctgctgtgtcacttacatcctcggacgaaggcgcaaagggccagaagggagagtcacccaattcttttcatggcccttcaagcagcgaaagcactggcagagacctgcttaacactaaaaccggggaattagtccagttcctgctgaataagtacatcaggaaggagcccattacgcgggaggctatgcttaaggttataaataggaagtacaagcaacatttccccgagattcttcgtcggtccacggagaatgtggaggtggtcttcggtctttatctcaaggagatggatcctagcaggcagtcatacgttctggtggggaaactggacttccccaaccagggatcacttagcgatggggggggcttccctctgagcgggctgcttatggtgctgctgtctacaatattcatgcatggaaatagggccaccgaggaggagatgtgggaatgtctgaatgccctgggaatgtacaaaggccgaaagcatttcatctatggtgagccccaggagctagtgacaaaagatctcgtccgagaggggtaccttgaatatcagcaggtgccttctagcgatccacctagatatgaatttctatgggggcccagggctcgggcagagacctctaagatgaaagtgcttgaatttgttgccaaactcaacgataccgtggccagcacttataagtcacgttatgaggaggctctacgtgaagaagaagagcaggcgagggctagagccgtagcccgcgactctgcccgtgcccgtgcctctcgatcttttcagccttag

SEQ ID NO: 123879 - DNA, 1011 bp, synthetic construct
  misc_feature 1..1011: note = Description of Artificial Sequence: Synthetic coding sequence
  source 1..1011: mol_type = other DNA
atgccaaggggccaggctagcaagaggagggctcgtgagaaacgtagacaggcacgaggcgaagaccagtgtctgggtggagctcaagctacagccgccgaaaaagagaagctgccgagctcgtcgtccccggcatgccagtcaccgccccagagctttcccaatgccggcatccctcaggagtcacaaagggcatcttacccaagcagcccagccagcgccgtgtctcttacaagtagtgatgaaggagccaaaggtcagaagggtgagtctcccaactcttttcacgggccttcaagctccgagtcaacaggcagagacttgcttaatacaaaaacaggagagctcgtccaattcctcctcaacaaatacatcagaaaggagcctatcacccgggaggcgatgcttaaggtgataaacagaaaatataagcagcacttcccagagatcctccgtagatcaactgagaacgtagaagtggtgttcgggctgtatcttaaagagatggatccgagtcgccaatcttacgtgctggtcggcaaacttgatttcccaaaccagggatccctgtccgatggaggaggcttcccactatctggcttgctgatggtccttctgtctactatctttatgcatgggaacagggccaccgaagaggagatgtgggaatgcttaaacgctcttggcatgtataaaggccgcaagcatttcatctacggggaaccgcaggagctggtaacgaaggatctggtcagggagggctacttggagtatcagcaggtccctagctctgacccccccaggtatgagtttctctgggggcctagagcccgggcggaaactagtaaaatgaaagtactagagttcgtagcaaagctgaatgacaccgtggcttcaacatataagagccggtatgaagaagccttgcgagaggaagaagagcaggctcgcgcaagggctgtggcccgggattcagctagggctcgcgcatccaggtccttccaaccgtag

SEQ ID NO: 123880 - DNA, 960 bp, synthetic construct
  misc_feature 1..960: note = Description of Artificial Sequence: Synthetic coding sequence
  source 1..960: mol_type = other DNA
atgcctcgcgggcagaaaagtaagctgcgagcaagggagaagaggcggaaagcccgcgacgagactagaggcctaaatgtgcctcaagtcacggaagcagaagaggaagaagcaccttgttgttcgtcttcggtctcaggaggagctgcctcaagtagccccgccgcaggtatccctcaggagccacaaagggcccccactacagccgcagccgcagcggctggcgtaagtagcaccaaaagtaaaaagggcgcaaagtcccatcagggagaaaagaatgcctcaagttctcaggctagtactagtaccaagagtccctctgaggacccccttactagaaaaagtggttcccttgtgcagtttctgttatacaaatacaagataaagaagagcgtgaccaagggcgagatgctgaagattgtcggcaaaaggtttagggaacattttcctgagatcttaaagaaggcttcagagggcttgtctgtagtgttcgggctcgagctgaataaggtgaatccaaacggacatacctacactttcattgataaagtagacttgaccgacgaggagagcctgctgtcttcctgggacttccctagaaggaaattactgatgccccttctgggcgtaattttcctgaatggcaatagtgctaccgaggaggagatttgggagttcttaaatatgctcggggtgtatgatggtgaagagcattcagtctttggagaaccgtggaaactgattaccaaagacctggtgcaggagaaatatctggagtacaagcaagtgccgagctccgaccccccaagattccaattcctttggggaccacgagcatacgcagagactagtaagatgaaggtacttgaatttttggcaaaagtcaacgggacaactccctgtgcctttcctactcactacgaagaggcacttaaagacgaggagaaggccggggtgtag

SEQ ID NO: 123881 - DNA, 1041 bp, synthetic construct
  misc_feature 1..1041: note = Description of Artificial Sequence: Synthetic coding sequence
  source 1..1041: mol_type = other DNA
atgcctcggggccaaaagtccaccctgcacgccagggaaaaacgacagcagacacgcgggcaaactcaggaccaccaaggagcgcagattactgctactaacaagaagaaagtttccttctctagccctttaattcttggagccactattcagaagaaaagtgcaggtagatctcgaagtgctcttaaaaaacctcagagggctttgagtaccacgacttccgtcgacgtgtcttataaaaaatcatataagggggccaatagtaaaatcgagaaaaagcagtcgttcagtcagggcttgagctctactgtgcaatcgagaaccgatcctctgatcatgaagactaacatgctggtccagttcttgatggaaatgtataagatgaaaaagccaatcatgaaggctgatatgctcaagattgtccagaaatcacacaagaactgcttccctgagatcctgaagaaggcttcattcaatatggaggtggtcttcggagtggatttaaagaaggtagatagcacaaaggactcttatgtccttgtgtcaaagatggacctgcctaataatggcaccgtcactcgaggccgggggtttcccaaaacaggactgctcttgaatctcctgggtgtgatttttatgaaggggaattgcgctacggaggaaaagatttgggaatttttaaacaaaatgcggatctacgatggcaaaaagcattttatcttcggagagcctaggaagctcataactcaggacctggtgaaattaaaatatctggagtacagacaggtgccaaactcaaatccagctaggtacgagtttctgtggggccctcgggctcatgcggagacttcaaaaatgaaggtactggagttctgggccaaagttaataagacggtgccatccgcctttcagttctggtatgaagaggccctccgcgatgaggaggaaagggtacaggcagctgccatgctcaacgatggctcttccgctatggggcgtaaatgctccaaggccaaagcctcatcttcatcacatgcatag

SEQ ID NO: 123882 - DNA, 1041 bp, synthetic construct
  misc_feature 1..1041: note = Description of Artificial Sequence: Synthetic coding sequence
  source 1..1041: mol_type = other DNA
atgccacgcgggcagaagtctaccctgcatgcccgagagaaaagacagcagacccggggccaaacccaggatcaccaaggagcccaaatcacagctaccaacaagaagaaagtgtcctttagcagtccgctgattttaggtgctacaattcaaaagaagtcagctggacggtcaagatcagctcttaagaaaccccagcgagctctgtccacgacaacatccgtcgatgtgtcatataagaagtcctataagggagccaattcaaaaatcgaaaaaaaacaatcttttagccagggcttatcaagtactgtacaatcgaggactgacccactgattatgaaaactaacatgctggtccagtttctaatggagatgtacaaaatgaaaaagcccatcatgaaggcggacatgttgaagatagttcagaaatcccacaaaaattgctttccggagatattaaaaaaagcatcttttaacatggaagttgtgttcggggtggatctgaagaaagtcgacagtacgaaagattcatacgttctggtctccaaaatggacctccccaacaacgggaccgtaactcgcgggcgaggctttccgaagaccgggctgcttctgaaccttctcggcgtgattttcatgaaggggaactgcgctacggaagaaaagatctgggagttcctcaacaaaatgcggatctacgacggtaagaaacacttcatctttggagagcctaggaaactgatcacccaggatcttgtaaagttgaagtacctggaatatcggcaggtgccgaattccaatcccgccagatacgagtttctctggggccccagggcccatgccgaaaccagcaagatgaaagtgctcgagttttgggctaaggtcaacaagaccgtacctagcgcttttcaattctggtatgaggaagcccttagggatgaagaagagagagtgcaagccgccgccatgctcaatgatggatcgtcagccatgggaaggaagtgttccaaggccaaggcaagtagctcaagccacgcctag

SEQ ID NO: 123883 - DNA, 1041 bp, synthetic construct
  misc_feature 1..1041: note = Description of Artificial Sequence: Synthetic coding sequence
  source 1..1041: mol_type = other DNA
atgcctcggggccagaagtcaaaattaagggccagggagaaaaggcagcgaacccgcggacagacacaggacctgaaagtggggcagccgactgctgccgagaaggaggaaagtccatcatcgtctagctcagttctcagagacaccgcaagctcgagcctggcttttgggatcccccaagaacctcaaagagagccccctaccaccagcgctgccgctgctatgtcttgcacaggctctgacaagggagacgaatcccaagatgaggaaaatgctagctcttcccaagctagcacgagcactgagcgatcattaaaggactcactaaccagaaagaccaagatgctggtacagttcctcctgtacaagtacaagatgaaggaacccacgaccaaagcagagatgcttaagatcatctccaagaagtacaaagagcactttccagagatttttagaaaggtttcgcagcggaccgagctggtctttggcttagcacttaaagaagtaaatcccactacccatagctacatactcgtcagcatgcttgggcctaatgacggcaaccagtcaagcgcatggaccttaccacgcaatggcttgctgatgcccctgctctctgtgattttcttaaacggtaactgtgcccgggaagaagagatatgggagttcctgaatatgcttgggatctacgacggaaaacgacaccttatctttggcgaaccccggaagctgattacacaagacctggtccaggaaaagtatctcgaatatcagcaggtgcccaactcagacccccctagataccagtttctgtggggtcctcgggcacatgcagagaccagcaagatgaaggtccttgagtttctcgcgaaggtcaacgataccacccctaacaacttccctctcctgtatgaggaggcactcagagacgaagaggagagggctggagctcggccccgcgtggcagcccggcgcgggaccaccgccatgaccagcgcctattcacgcgcaacatcctctagctcgtcacagcccatgtag

SEQ ID NO: 123884 - DNA, 828 bp, synthetic construct
  misc_feature 1..828: note = Description of Artificial Sequence: Synthetic coding sequence
  source 1..828: mol_type = other DNA
atgacttccgctggggtgttcaacgctggatcagatgagcgagcgaatagccgggatgaagaatatccgtgcagttccgaagtgagcccgtccaccgaatccagctgttctaattttatcaacatcaaagtgggactgttggaacagtttttgctctacaaatttaagatgaaacagaggatcttaaaggaagacatgctgaagatcgtgaatccaagataccagaaccagtttgcagaaatccacaggagagcttccgagcacatcgaggtggtgttcgcggtcgacctgaaagaggtcaatcctacatgtcacctgtatgatctggtgagcaagctgaagcttccaaataacggtaggattcatgtcggtaaagtgctgccaaaaactggcctcttgatgacatttttagtggtcattttccttaagggcaattgcgcaaataaggaagacacctggaagtttcttgacatgatgcagatctacgacgggaaaaaatattatatctacggggaacctagaaagctcataacacaggactttgtccgcctgacctatctagaataccaccaggtgccgtgcagctatcccgcccactatcagttcctgtggggaccacgcgcctataccgagacttcgaagatgaaggtgctggaatatttagctaaggtgaatgatattgcacctggcgcattctcaagccaatatgaggaggccctgcaggacgaggaagaatccccctctcagagatgctcccgcaactggcactattgcagtgggcaggactgtctgagggctaaattctcctcattttcacagccctattag

SEQ ID NO: 123885 - DNA, 1224 bp, synthetic construct
  misc_feature 1..1224: note = Description of Artificial Sequence: Synthetic coding sequence
  source 1..1224: mol_type = other DNA
atgccacgaggccacaagagcaaattaaggacttgcgaaaagagacaggaaaccaacgggcaaccgcagggactgactggaccccaggccacagctgagaaacaagaggagtctcacagttccagctcctcttcacgtgcttgtctgggagattgtcggaggagtagtgacgcctcaattccacaagagagccagggcgtcagccctactgggtcacctgacgcagtggtatcttattctaaatcagacgtagccgcaaatggccaggacgaaaaatcacccagtacaagtcgtgatgctagtgtcccgcaggagagtcagggcgcttctccaaccggcagccctgacgccggtgtttctggaagcaagtacgatgtggcagctaacggccaggacgaaaaatcaccttcaacatcacacgatgtaagcgtgccgcaggagtcccagggggcatcacctaccggcagccccgatgctggggtatcgggaagtaaatatgatgttgctgcggagggagaggacgaggagtccgttagtgctagtcagaaggccattatcttcaagcgcctgagcaaggatgcagtgaaaaagaaggcatgcacactcgcccagttcctgcagaagaaattcgaaaaaaaagaatcaatccttaaggctgacatgctcaaatgtgttcgtcgcgaatataagccctattttccgcagatcctgaaccggacctcacagcacttagtggtagccttcggggtggaattaaaggagatggatagttcaggggaaagttacactcttgtctcaaaactgggcctgccctctgagggcattctgtccggagacaacgctcttcccaaatctggcttgctcatgagcctgctcgtggtcatttttatgaatggcaactgcgctaccgaagaggaggtctgggaattcctgggcctgctgggcatctatgatgggattctgcactctatttacggtgacgcccggaagatcattaccgaagatctggtgcaggacaagtacgtggtataccggcaggtctgcaactcagaccccccttgctacgagtttctgtggggtccacgcgcctatgctgaaaccacgaagatgcgagttttgcgcgtgctggccgattcctccaacacgtctccaggactatatccacatctttacgaagatgccttgattgacgaagtcgagagggcactcaggttgagggcctag

SEQ ID NO: 123886 - DNA, 3429 bp, synthetic construct
  misc_feature 1..3429: note = Description of Artificial Sequence: Synthetic coding sequence
  source 1..3429: mol_type = other DNA
atgggtgacaaagacatgccaacagcggggatgccttccctgctgcagtcaagttctgagtcccctcaatcttgccccgagggggaagactcacagtcgcctctgcaaatcccccagtccagtccagaaagcgatgacacactatatccattgcagtctccccagagcaggagcgagggcgaagactccagcgatcctctacagcggccaccagagggtaaggatagtcagtcacctttgcagattccccagtcttcgccggagggcgatgacactcaaagtccacttcagaacagccagagttcccctgaagggaaggacagcctctcgcctctcgagatctcccagtcccctcctgaaggcgaagacgtgcagagtcccctgcaaaaccctgcctcctcttttttttcttctgcgcttctgagtatattccagagcagtccggagagtacccagtcgccctttgaggggttccctcagagcgtgctccaaattcctgtgagtgctgcttccagctccaccctcgtttctatttttcagtcttctcccgagagcacccagtcaccctttgagggttttcctcagtcccctttgcagatcccagtatcccgaagttttagcagtacccttttgagcatattccagagttcccccgagagaacccagtctacattcgaagggtttgcacagagtcctcttcagatcccggtatctccatcttcttccagtaccctgctgagcctgttccagtcattttctgagagaacccagagcacgttcgagggcttcgcgcagtcttcccttcaaataccggtttccccaagcttcagctcaaccctggtctcgctgttccagtcatcaccggaacgcacccagtccacctttgaaggattcccccagagccccttacaaattccagtcagctcttctagttcctctacactgctctcactctttcagtcttcacctgaacgcacacacagcacctttgagggattccctcaatcactgctccagatcccaatgacttctagtttcagttctacactgctctctatcttccaatcgtcacccgagtcagcgcaatctactttcgaaggtttccctcagagtcccctccagatcccaggttcaccatcgttcagctccactctgctttccctgtttcagtcaagccccgaacggacgcactccaccttcgagggctttcctcagtcacccttacagataccaatgacatctagcttcagctctactttactgtccattctgcagagttcaccagagagcgctcagtctgcattcgaaggctttccccagagtccactccagatcccagtgtcgagcagcttctcttacactctgctgagcttgttccagtctagccctgaacgaactcacagcactttcgaggggtttccccagtctcctcttcaaattcctgttagtagcagcagctcaagctcaaccctgctctctctgtttcagagctcccctgaatgcactcaatctacttttgaaggattcccccagtctcctctccagattccccagagtcctccggaaggtgagaacacacacagtcctctccagattgtaccctctctccccgaatgggaggattctctctcgccccactacttcccacagagtcctccacagggcgaggatagccttagtccccattattttccccagtctccgcctcaaggcgaggacagcttgtcaccacactatttcccccagtcgccccagggagaggattcactgagcccccattacttcccccaaagccctcctcaaggagaggactctatgagtcctttatacttcccacaatctccactgcagggagaagagtttcagagttcactccaaagcccggtgagcatttgttctagttcgactccctcatccctcccccagtccttcccagagagcagtcagtcacctcctgagggtccagtccagtctccactgcacagtccacaatctccacctgaaggcatgcactcgcagtcccccctgcaatccccagagtccgccccggagggcgaagattcactgagccctctgcaaattccccagagtccattggagggggaggactcgctcagctccttacatttccctcagagtcctcccgaatgggaagattccctgagtcccctccactttccccagttccccccccagggggaggactttcaatcctcactgcagtccccagtctcgatttgctcttctagtacttctctgagcctgccccagtcctttcccgaaagccctcagagccctcccgaggggccagcgcaaagtcccctccagagacctgtgtcatctttcttctcttacactctagcatctctgctgcagagcagccatgagtccccacagtctccgcctgagggtcctgcccagtcacccctgcagagcccagtgtcatcctttccgagtagtaccagtagctccctcagccagtcatctcctgtctcctcgttcccctcttcaacctcttctagtttatcaaaaagctcgccggagtctccactgcagtcccccgtgatatccttctcctccagcacgtctctctctcctttcagtgaagagtccagtagccctgtggacgagtacacctcatcttccgatacactcctggagagcgacagtctgacagattccgagtcactgatcgagagtgaacctctctttacttatacgctcgacgaaaaggtggatgagcttgcccggttcttattactcaaatatcaagtcaagcaaccgatcaccaaagctgaaatgctgacaaatgttatttcaaggtacacaggttactttcccgtgatctttagaaaggcccgtgaatttattgagatattattcggaatatcactgcgcgaagtcgatcctgatgacagttacgtcttcgtgaacacccttgacttgacctccgaaggatgcctgagcgacgagcaggggatgagccaaaatcgactacttattcttatactatctattatatttattaagggcacttatgcctcagaggaggtgatatgggacgtgctgtcaggcatcggagtccgagccggaagagaacatttcgcgttcggggagccacgggagctcttgaccaaagtttgggttcaggaacattacttagagtatcgagaagtgcccaattccagcccccccaggtacgagtttctgtgggggccgcgcgcacactccgaggtgatcaagagaaaagtggtggaattcttagctatgctgaaaaatacggtgcccattaccttcccttcctcctacaaagatgcccttaaagacgtggaggaaagagcacaggcaatcatcgacaccaccgacgactccactgccaccgagagcgcatcttcctcggtaatgtccccctctttcagcagtgaatag

SEQ ID NO: 123887 - DNA, 354 bp, synthetic construct
  misc_feature 1..354: note = Description of Artificial Sequence: Synthetic coding sequence
  source 1..354: mol_type = other DNA
ggtgacaaggacatgccaacggccggtatgccaagcctgctgcagagtagtagcgagagcccacaatcttgtcccgaaggggaggactctcagtctcccctgcagattccagtgagcccatcatccagctctacactcttatccctgttccaatctttctcagaaagaacccaatccactttcgaggggtttgcccagagttccctccagattccagttagtccttccttttcgtcgacgctcgtatcactctttcaatccagcccggaacggacacagtccacattcgaggggttcccacagagtccacttcagattccagtaagttcatccagctctagcacgctcctgtag

SEQ ID NO: 123888 - DNA, 357 bp, synthetic construct
  misc_feature 1..357: note = Description of Artificial Sequence: Synthetic coding sequence
  source 1..357: mol_type = other DNA
atgggagacaaggacatgccaactgccggcatgccctctctgctccagtcgtcttccgaaagcccacaatcttgccccgagggcgaggatagtcaaagccctctgcaaatccctgtgtccccctcttcaagctcaaccctactcagtctatttcagagttttagcgagcggacccaatccacttttgaaggctttgctcagtcctccctccagatccccgtgtcccccagtttcagcagcacgcttgtctccctcttccaatctagcccagaacgcacgcaaagtactttcgaaggctttccgcagtccccattacagattccagtctcatcctctagctcgtccactcttctctag

SEQ ID NO: 123889 - DNA, 630 bp, synthetic construct
  misc_feature 1..630: note = Description of Artificial Sequence: Synthetic coding sequence
  source 1..630: mol_type = other DNA
atgctgaccaacgttatttcccgctacactggctatttccccgtgatattccgtaaggcccgcgagttcatcgagatcctgttcggcatttctctgcgagaagtggatcctgacgacagttacgtgtttgtaaacaccctggatttaacatctgaagggtgcttaagtgacgaacagggaatgtcgcagaacaggttgttgatcctgatactgtctatcatcttcatcaaaggtacttacgcctcagaagaggttatttgggacgtcttgtccggcatcggtgtcagggcgggaagagagcactttgcattcggggaacctagagagctgctgacgaaggtgtgggtgcaagagcactacctggaataccgagaagtgcccaacagcagcccaccaagatacgaattcctgtggggcccccgtgctcacagcgaagtgattaaacgcaaagttgtggagttcctggccatgttgaaaaatactgttcctataacgttcccttcttcatataaagatgcgctgaaggatgtggaagaaagagcccaggctattatcgatacaaccgacgactccacagctacggagagcgcctcttcctcagtgatgagcccatctttctcgagcgagtag

SEQ ID NO: 123890 - DNA, 1122 bp, synthetic construct
  misc_feature 1..1122: note = Description of Artificial Sequence: Synthetic coding sequence
  source 1..1122: mol_type = other DNA
atgcctccagtaccgggagtcccctttcgtaacgtcgataacgactccccgacctcagtggagcttgaagattgggtggacgcccagcaccctactgatgaggaggaggaagaagccagctccgcttctagcacgctgtatctggtgttctccccatccagtttcagcacctcctcaagcttgattctcggcggcccagaggaggaggaagtgccaagtggcgtcattcccaatcttacagagagcatcccctcttctccgccacagggcccaccacagggcccctcgcaatcccctctgagctcctgctgctccagcttctcatggtcaagttttagcgaagaatcttcctcccagaaaggcgaagacactgggacttgccaagggctccccgacagcgaatcgtccttcacatacacgctcgacgagaaggtggccgaactggtggaatttcttcttctgaaatatgaagccgaagagcccgtgactgaggccgagatgctaatgatagttattaaatataaagactattttccagttattttgaagcgagctagggagttcatggaactgctattcggcctggcacttatcgaggtggggccggaccacttttgcgtgttcgccaacacagttggcctgaccgacgaaggcagcgacgacgagggaatgccagagaacagcctccttatcattatactgtctgtgatcttcatcaagggtaattgtgcaagcgaggaggtgatctgggaggtgttgaatgcggtcggcgtttacgcaggacgcgagcactttgtgtacggggagccacgtgaactcctgacaaaagtgtgggtgcaggggcactatcttgagtacagggaagtgccgcactcatcacccccctattacgagttcctgtggggaccccgggcccattccgaatcgataaaaaaaaaggtgctggaatttttagctaagctaaataacaccgtcccgtcttcgtttccatcctggtacaaagatgccctaaaagacgtcgaggaacgggtacaggctacaattgacaccgcagacgatgccactgtgatggcctccgagtccttgtctgttatgagctccaatgtgagtttctccgagtag

SEQ ID NO: 123891 - DNA, 1932 bp, synthetic construct
  misc_feature 1..1932: note = Description of Artificial Sequence: Synthetic coding sequence
  source 1..1932: mol_type = other DNA
atgttactgccatgtcattgggtgctggatgcaacgttcagcgacgggagcttggggcaatgggtcaagaatacatgcgcaacatacgccttgtctccagtcgtgctgccccctcaaccccagcctcgcaagaaggccacagataaggactactccgcgtttcacttgggacacctgcgggaggtgcgactcttccttcgcggaggtaccagtgaccaaagaatggatagcctcgtgctttgcccgacttactttaaattgtggaggaccctcagcgggtcacctgggctgcagctcagtgatctgcattttggctcccagccagaaggaaagttttccctaagaagggctgtcagtgtgaagcagcgcgaagagccccaggattggcctttaaacgaaaagcgcacattatggaaggattcagatctcccaacttggcggagaggcaccggatataccctttctctgccagctgtgagtcctggaaagcggttgtggggcgagaaggctggaagccttcctgagtctgaacccctcttcacatatacacttgacgagaaagttgataagctggtgcaattcctgcttttgaagtaccaagccaaggaaccattaacccgtgcagaaatgcaaatgaacgtcattaatacatacacaggctatttccctatgattttccgaaaagcacgagagtttatcgagattctgttcggcattagtctgaccgaggtcgaccctgaccacttctacgttttcgtgaatacgctggaccttacctgtgagggctccttgagtgacgagcagggcatgccccagaacaggcttcttatactgatcctcagcgttattttcatcaagggaaattgtgcttctgaggaggtaatctgggaggtcttgaatgcaattgggccgtggtccgctctggcaggctttgctgacgtcctgagtcgcttggccctttgggaaagcgaagggccggaggcattttgcgaagaaagcggcctccggagcgccgaagggtccgttttggacctggctaacccacagggcctcgccggacatagacaggaggacgggagaagagggctgactgaggccagccctcaacaaaaaaagggcggcgaggacgaggatatgcccgcggcaggtatgccccccctccctcaaagcccacctgaaatccctccacagggcccgcccaaaatctcaccccaaggacctcctcagtctcccccacagtctcccctggattcatgctcctctcccctgctctggactagactggacgaggaatcgtcaagtgaggaagaggacactgccacatggcatgccctccctgagagcgagtcgcttccgaggtacgccctggacgagaaagtagcagagctcgtccagtttttgttacttaaataccaaaccaaggagccagtgacaaaagccgaaatgctcaccaccgtgatcaagaaatataaagattacttccccatgatcttcggcaaggcccatgagtttatcgaattgatcttcggaattgccctgacagacatggaccccgacaaccactcgtacttcttcgaagacactttggacttgacctacgagggctccctcatcgatgatcagggaatgcctaaaaactgtctactcatactgattttaagcatgattttcatcaaggggtcttgcgtgcctgaagaagtcatctgggaggtcctttcagctatcggccctatacagcgcccagcccgcgaggtgctggagttcctgagtaagctgtctagcatcataccaagcgcgtttccctcctggtacatggatgcactgaaagacatggaggaccgggcacaggccattattgataccaccgatgacgcaaccgcaatggctagtgcatcaccatctgtgatgagtacaaatttctgtccagagtag

SEQ ID NO: 123892 - DNA, 801 bp, synthetic construct
  misc_feature 1..801: note = Description of Artificial Sequence: Synthetic coding sequence
  source 1..801: mol_type = other DNA
atgcctgccgctggaatgcctcctctgcctcagtcaccaccggaaatacccccccagggcccccctaagattagccctcaagggcctccacagtccccgcctcagtcacccttagactcctgttcaagccccttgctctggacccggctggatgaagagtcctctagcgaggaggaggacacagcaacctggcacgccctgccagaaagtgagtctttgccgcgatacgccctagacgaaaaggtggctgaactggtccaatttctcctcctgaagtatcagactaaggagcctgtgacaaaggcagagatgctaaccactgtgataaagaagtataaggactatttcccaatgattttcggcaaagctcacgaattcattgaactgatattcggaattgccttgaccgatatggaccccgataatcattcgtatttcttcgaggatactctggatctgacatacgaaggttctctcatagatgatcagggcatgcctaaaaattgcctccttattttgattcttagtatgattttcatcaagggctcctgtgtgcccgaggaagtcatctgggaggtgctgtccgctataggtgtgtgtgcaggacgcgagcattttatctatggcgatcccaggaaacttctgactatccactgggtgcaacgcaaataccttgagtatagagaagttccaaactcggcgccaccacggtacgaattcctctggggtccacgggcacactctgaggcgagcaagcggagcctgagagtctttatccaggccattcagtatcacccatag

SEQ ID NO: 123893 - DNA, 381 bp, synthetic construct
  misc_feature 1..381: note = Description of Artificial Sequence: Synthetic coding sequence
  source 1..381: mol_type = other DNA
atggacacaggccaactccaactctctagagaaagatctcccggggccggacaacaggctcgcagagaactctgcggccggattgcgatttcccaacatggaggaaaagcacaggccagtccctcccacagcctgctgtctccgctggataagacggatggggaaccttggagtgcactggccggattcgccgatgtgctgagccgactcgcactgtgggaatcagaaggaccagaagccttctgtgaagagagcggactgagaagcgctgaaggctccgtcctcgaccttgctaaccctcaggggaaagggccaaagggagagctaagggacttcgccccacgcactgaagaggcgcctgtgtgtcccgccctgccctag

SEQ ID NO: 123894 - DNA, 1041 bp, synthetic construct
  misc_feature 1..1041: note = Description of Artificial Sequence: Synthetic coding sequence
  source 1..1041: mol_type = other DNA
atgccactgttccccaatctgccccggttatctttcgaggaagacttccaaaacccatccgtgaccgaagacctggttgacgctcaggattccattgacgaggaggaggaggacgcctccagcacttcctcatcgagcttccactttctgtttccctcttccagttcactgagctctagctcacccctatcgtctccgttacccagcacactgatcctcggggtacccgaggacgaggacatgcccgccgctggtatgcctcctcttccccagtctcctcccgagataccacctcaggggccacccaaaatttcccctcaggggcccccacagtcaccaccccagagtcccctggacagctgtagctcaccactgctttggacccgcctcgatgaggagtcctcaagtgaggaggaggacacggctacttggcatgcacttccagaatctgaaagcctgccccgctatgccctggacgaaaaagtggcagagcttgtacagtttttactgctcaaatatcagactaaggaacctgtgacgaaagcggaaatgctgaccacagtgattaagaagtacaaggactacttccctatgatcttcggaaaagcccacgagtttattgagctgatctttggcatcgccctcaccgacatggatcccgataatcacagctacttctttgaggatacactggacctgacttacgaaggatccctaatcgacgatcagggcatgcccaaaaattgtctgctcatcctgattctgagtatgatcttcattaagggctcatgcgtgcctgaggaggtcatctgggaggtcctttccgccattggtgtttgtgcaggccgggagcatttcatctatggtgatccacggaaactacttacaatccactgggtccagcggaagtatctggaataccgggaggtgcccaattctgctccacctcgctacgaattcctgtggggtcccagagcccattctgaggcaagcaaacgctcactccgggtctttattcaggccatccaataccacccctag

SEQ ID NO: 123895 - DNA, 1041 bp, synthetic construct
  misc_feature 1..1041: note = Description of Artificial Sequence: Synthetic coding sequence
  source 1..1041: mol_type = other DNA
atgcctctgttcccaaacctgcctagactctccttcgaagaggactttcagaacccttcagtaacggaagatctcgttgatgcccaggacagcatcgatgaggaggaggaggatgccagctccacatcatcttccagctttcatttcctgtttccctctagttcctctctctcctctagttcccccctgagttcacccttaccctcaacactcatcctcggagttcccgaagatgaggacatgcccgcggcaggtatgccacccctccctcaaagcccacccgaaatcccgcctcagggtcccccgaagatctctccacagggcccccctcagtctccaccccaaagtcccctggactcttgtagttcaccgctgctgtggactcgcctcgacgaggaatcttcttccgaggaggaggataccgccacttggcacgcgctcccagaaagtgaaagtctccctcgctatgcccttgatgaaaaagtggcggagctcgtacagttcctgctcctcaaataccagactaaggaacccgtcaccaaggcagagatgctgacgacagtgataaagaagtacaaggactactttcccatgattttcggcaaggctcacgaatttatcgagctgatctttgggatcgcgttgacagacatggacccagataaccatagctactttttcgaagataccctcgatctgacctacgagggctcactgatcgacgatcaaggcatgcctaagaattgtctcctcatcctcatcctgtccatgatctttatcaagggctcatgcgtacccgaagaagtcatttgggaggttcttagcgcaataggcgtttgcgcaggtagagagcattttatctacggagaccctcgaaagttgcttaccatacattgggtccagcgaaagtacctagaatacagggaggtcccgaactcagcacccccaagatacgagtttctctggggaccacgggcccattctgaggctagcaagcggagcctgcgtgtctttatccaggcgattcagtaccatccttag

SEQ ID NO: 123896 - DNA, 2337 bp, synthetic construct
  misc_feature 1..2337: note = Description of Artificial Sequence: Synthetic coding sequence
  source 1..2337: mol_type = other DNA
atggcccaaaagatggactgcggggccggacttctgggctttcaagccgaggcatcagttgaggactctgcactactcatgcagactctgatggaggccatccaaataagtgaggctcctccaactaaccaggcgacggccgctgcatcgcctcaatcttcacagcctcctactgccaatgagatggctgatatccaggtgtctgccgcagccgcaaggccaaagagtgcattcaaggtgcaaaacgctaccaccaaaggacctaatggcgtgtatgatttctcccaggcccacaacgccaaggatgtgcccaacacgcagcccaaggccgccttcaaatcccagaacgccacacccaaaggccccaacgccgcatacgacttttcgcaggcagccacgactggcgaattggctgcaaataaatctgagatggcctttaaggctcaaaatgccacaaccaaggtggggcccaatgcaacgtacaacttctcacagagtttgaatgccaacgacctcgccaattctagacccaaaactccatttaaggcgtggaatgacacaaccaaggctcccactgccgatacccagacccagaacgttaaccaggctaaaatggctacctcacaggcggatattgaaacagatcccggcattagcgaacccgacggcgccactgcgcaaacctcagccgacgggagtcaggcccagaatctggaatccaggaccatcataagagggaaaagaacaaggaagatcaataatctgaatgtggaagagaattcctcgggggatcagcgtagggcaccactggcggcaggtacctggaggtccgctcctgtgcccgtaaccactcagaatccaccaggcgcccccccgaatgtgctgtggcagacgcccttggcgtggcagaacccctctggctggcagaaccagaccgcccgccagactccaccggcccgccagtcacctccagccagacagactccacctgcttggcagaatcctgtcgcctggcagaacccagtgatttggccaaacccagtaatctggcagaacccagtaatttggccaaaccctatagtatggccaggacccgtcgtttggccgaaccccctcgcctggcagaatccacccggttggcagacacccccaggttggcaaactccccccggctggcaggggccccccgactggcagggccccccagattggcctttgcccccagactggccactaccgccagactggccccttcccactgactggcctctgcctccagattggatccctgccgattggccaataccacctgattggcaaaacctacgtcctagccccaacctcaggccctccccaaatagccgggcctcacaaaacccaggggctgcccagcctcgagatgtggcactgctgcaagagcgagctaataagctggttaagtacctgatgttaaaagactacaccaaggtacccataaagagatccgaaatgctacgcgatatcatcagagagtacaccgatgtgtacccggaaataatcgagcgcgcttgtttcgtgctagagaagaaattcggtatccaactcaaggagatcgataaggaagagcacctgtatatcctcatctctactccggaatcactcgctggaatccttggcaccacaaaagatacacctaagcttggactgctgctcgtcatacttggggtgatcttcatgaatgggaaccgtgcctccgaggcagtcctgtgggaagcccttcggaagatggggttgcgaccaggagtgcgccatccccttctgggcgacctgaggaagctgttgacttacgaatttgtcaaacagaaatacctcgactaccgcagagtaccaaattcaaaccctcccgagtatgagtttttgtgggggctgcgcagctaccacgaaacgtccaaaatgaaagttctacggttcatcgccgaggtgcaaaaacgtgacccacgggattggactgcacagttcatggaagccgccgatgaagccctggacgcgctggacgcagcggctgccgaggcagaagctcgagccgaggctaggaccaggatgggcataggtgacgaggcagtgtccggaccgtggtcctgggacgacatagagttcgagctgctgacatgggacgaagagggagacttcggggacccctggtccagaattccctttactttttgggctcgatatcaccaaaacgcccgctctcggttccctcagacctttgccggacccataatcggacctggtgggaccgctagcgcaaacttcgcggccaacttcggcgcaatcggttttttctgggttgagtag

SEQ ID NO: 123897 - DNA, 2505 bp, synthetic construct
  misc_feature 1..2505: note = Description of Artificial Sequence: Synthetic coding sequence
  source 1..2505: mol_type = other DNA
atggctcaaaagatggattgtggggccggcctgctcggttttcagaacccagacgcttgtcgtgccgtttgtcacccactccctcagcctcctgcttctacgttacctctcagcgcattcccaacactgtgtgaccccccctattctcagctccgtgatccccccgccgttctcagctgctactgtacaccgctgggtgcttccccagcacccgcagaggctagcgtggaggatagcgctctgttgatgcaaaccctgatggaagcgattcagatctcagaggccccaccaacaaatcaagctaccgcggctgcatcacctcagagtagtcagcctccaacggccaatgagatggcagacattcaagtatcagctgcggccgcccgcccgaagagcgccttcaaagtacagaatgcaacaaccaaaggtcccaacggggtctatgacttcagccaggcccataatgcaaaagatgttcctaacacacagccaaaggccgcatttaaaagccagaatgcaacaccaaaaggtccgaacgccgcttatgacttttcgcaggccgccaccaccggggagctggctgcgaataagagtgagatggccttcaaggcacagaacgcaacgaccaaagtgggtcccaatgctacttataatttcagccagagcttaaacgctaatgatttagcaaacagtcggcctaagacaccctttaaggcctggaacgataccaccaaggcacccaccgccgacacacagacacagaacgtaaaccaggctaaaatggccacttctcaggccgatatcgaaaccgacccagggatctccgagcccgacggagccacagcacagacgtcagccgatggcagtcaggcccaaaacttggagtccaggactattatccgagggaagagaacacgcaagattaacaatctaaatgttgaagaaaactcttccggtgaccaacgccgggcgccattggctgctggcacatggaggtctgcaccagtacctgttacaactcagaatccaccaggcgctcctccaaacgtgctttggcagaccccactggcctggcagaatccgtcaggctggcagaaccaaacagcccgccagaccccccccgcacgacagtcccctcctgcaagacagacgcctcctgcttggcagaaccctgttgcctggcagaaccccgtcatctggcccaatcctgttatttggcaaaaccccgtcatttggcccaatcccatagtgtggccgggcccagtcgtctggccgaatccccttgcctggcagaatccacccggatggcaaacccccccaggctggcagaccccacccgggtggcaaggccctcctgactggcaggggcctccagactggcctctgcctccagattggccactaccgcctgattggcctttgcctactgattggcctctgccgccggactggatccctgccgattggccgataccacctgactggcaaaatttaagaccatctccaaatcttagaccatctcctaattcacgggccagtcaaaatcccggagcagctcagcccagggatgtggccttacttcaggagcgcgctaacaagctcgttaaatacctgatgctgaaagattatactaaagtgccgattaagaggtctgaaatgctgcgtgacataatccgagagtataccgatgtttacccggaaataatcgagagagcatgcttcgtcctcgagaagaaattcggtatccagctgaaagaaattgataaggaggaacacctgtacatcctcatttctactccagaatcgcttgccggcatactgggaactacgaaggacacgccgaagctaggcctgctccttgtgatcctcggcgtgatcttcatgaatgggaatcgcgcgtcagaagccgtgctgtgggaggcactacgcaaaatggggctgcgacccggcgtgcggcacccgctgcttggcgacctacgcaagttgctgacatacgaatttgtcaagcaaaaatacctggactaccgccgggtccctaatagtaatccgccggagtacgaattcctgtggggtctcagaagctatcacgagacttccaaaatgaaggttctgcgcttcatcgccgaggttcagaaacgcgacccaagagactggaccgcacaattcatggaggctgcggacgaggccctcgacgccctggacgccgctgctgcagaggccgaggctcgcgccgaggctagaactcggatgggcatcggcgatgaggccgtgagcggcccttggagctgggacgatattgaattcgagctgttgacctgggatgaagagggcgatttcggcgacccttggtcccggatccccttcaccttctgggctagataccatcaaaacgcacgctcacggtttcctcagacgttcgcgggaccaatcatcggaccgggtggtacggcttccgctaactttgccgcaaactttggggcgataggcttcttctgggtggagtag

SEQ ID NO: 123898 - DNA, 2337 bp, synthetic construct
  misc_feature 1..2337: note = Description of Artificial Sequence: Synthetic coding sequence
  source 1..2337: mol_type = other DNA
atggcccaaaagatggactgcggggctggtttgctggggtttcaggctgaggccagtgtggaggattcagctctattaatgcagacattaatggaggctatacagatctcagaggcacccccaaccaatcaagccacagccgctgccagtccacaaagctctcagcctcctaccgctaatgagatggcagacatccaggtgtctgctgccgctgctcgtcccaagtccgctttcaaggtacaaaatgctaccacaaaagggccaaacggcgtctacgatttctcccaggcccacaatgccaaagacgtgcccaacacccagcctaaggccgctttcaaaagccagaacgccacccctaaaggccccaatgccgcgtacgatttctcacaggcagccactaccggcgagctggcagcaaacaagagcgaaatggccttcaaggctcagaatgctacaactaaagtcggccctaatgcaacatacaacttctcacagtctcttaatgctaacgatctggcaaacagcagacccaaaaccccttttaaagcgtggaacgatactacaaaggcaccaacagctgatactcagacccagaacgttaatcaagccaagatggccacctcgcaggcagatatcgagactgatcctggcatctccgagcccgatggggctacagcgcagaccagtgcggatggctcccaggcacaaaacctggagtcccgtaccattatccgcggaaaaagaacccgcaagatcaataacctcaatgtcgaggaaaactcttctggagatcagcgtcgggctcctttggccgctggcacttggagaagtgcgcctgtgcccgtcactacccaaaacccccccggtgcccctcccaatgtcctctggcagacccctctggcttggcaaaaccccagcggatggcagaaccaaacggcgcggcagacgccccctgccaggcagtcccctcctgcaagacaaactccccccgcctggcagaatcctgtggcatggcagaaccctgtgatctggccgaaccctgtgatttggcagaacccagtcatatggcctaatccaatcgtatggccaggcccagtggtttggccaaatcccttggcctggcagaacccccccggatggcagaccccacccggctggcagaccccccccggatggcaaggaccccccgattggcagggccccccagactggcccctcccacccgactggccattgccgcccgactggccattgcctaccgattggccactgccccccgattggattccggctgattggccaatccctcccgactggcaaaatctccgtccctcccccaacctcaggccatctccaaacagcagagcatcccaaaaccctggcgccgcgcaacccagagatgtggctctcttacaagagcgcgccaataagttggtcaaatatctgatgctcaaagactacaccaaggttcccatcaagcgcagcgaaatgcttcgggatatcatcagggagtacacagatgtgtaccccgaaataatcgaaagggcctgtttcgtcctagagaagaaatttggcattcagttgaaggaaatcgataaagaagagcatttatatattctcatctccacccccgagtccctggcgggaatactagggaccactaaggatacgccaaagttgggactgcttctggtgatccttggagtgatttttatgaatggaaaccgggcgtccgaagctgtgctttgggaggcccttcggaaaatgggactgcggcccggcgtgcggcacccgctcttgggagacctacgcaaactgctcacctatgagtttgtgaaacagaagtacttggactacagaagggttcctaatagcaacccacccgagtatgagtttctgtgggggctccggagctaccatgaaacatccaagatgaaggtgctgcgctttattgctgaagtgcaaaagcgcgatcccagggactggacagcccagtttatggaagccgctgatgaggcactagacgccttggatgctgctgccgcagaagctgaggcacgggccgaagccagaacgcggatgggcattggcgacgaggcagtgagcggcccctggagttgggatgatatcgagttcgagttactaacatgggatgaagagggagatttcggtgatccttggtcacgcatcccttttactttctgggcccgctaccaccaaaacgcgcggtcccgatttccgcagactttcgcaggacccatcatcggccctggaggtactgcaagtgcaaacttcgccgccaactttggagcaattgggtttttctgggtggagtag

SEQ ID NO: 123899 - DNA, 2337 bp, synthetic construct
  misc_feature 1..2337: note = Description of Artificial Sequence: Synthetic coding sequence
  source 1..2337: mol_type = other DNA
atggcacagaaaatggactgtggcgccggcttgctgggctttcaggccgaagcaagtgttgaggatagtgctctgctgatgcagacgctcatggaggctatccaaatctccgaagcccctccaacgaaccaagcaacggcggctgcatccccacagagctcacaaccacctactgccaacgagatggcagacatccaggtgtcagctgcagcagcaagaccaaagagtgccttcaaggtccaaaatgccacgacgaaggggcctaatggcgtatacgacttctctcaggcccataacgccaaagatgtgcctaacacccaacctaaggccgctttcaaaagccaaaatgcgactcccaagggacctaacgcagcatatgatttttcacaggctgccactaccggagagctagctgcaaataaatctgagatggccttcaaggcccaaaatgccactactaaggtaggacccaacgcaacatacaacttttcgcagtctttgaacgccaacgacctggccaactcacgccccaagacaccttttaaggcctggaatgacactactaaggctccaaccgcagatacccagacgcagaatgtcaaccaagccaagatggcaacatcacaggccgacatcgagaccgatcccggaattagtgagcccgatggtgccactgctcagactagcgccgacgggtcgcaagcccaaaacctggagagccgaaccatcatccgtgggaaaagaaccagaaagatcaataacttaaatgttgaggaaaactccagtggagatcaacgaagagctccccttgccgccggcacttggcggtcggcgccggttcccgtaaccactcagaaccctcctggggcccccccgaacgtgctctggcaaactccactcgcctggcagaatccttcggggtggcagaatcagacagctcgccagacaccacccgcccggcaaagtccaccagccaggcagaccccaccggcctggcagaatcccgtggcttggcagaatcctgttatttggcctaatccggttatctggcagaaccctgtaatatggcccaatcccatcgtgtggccagggccagtggtctggcccaatccacttgcttggcagaacccacccggatggcagactccacctggctggcagacaccccccgggtggcaggggcctcccgattggcagggaccccccgactggccactccccccggattggccgttgcctcccgactggcccctgccgacagactggccactgccaccagattggatccccgccgattggccaattccacccgactggcaaaacctgcggccctcccctaatctgagaccctctcccaactctagagccagccaaaaccccggagccgctcagccgcgcgatgtagccctgttgcaggaaagggctaataagctcgtaaagtacctgatgctcaaggactatacaaaagtcccaatcaaaagatccgaaatgttgcgtgatattatcagagaatatactgatgtgtatcctgagatcatcgaaagagcgtgtttcgtgttagagaaaaagtttgggattcagttaaaagagatcgacaaagaagaacacctctacatcctgattagtaccccagagagtctagctgggatcttgggtactaccaaggatacacccaaactcgggctgctgttagtgatccttggtgttatattcatgaatggaaatcgagccagtgaggccgtgctgtgggaggctttacggaagatgggccttcggcccggcgtcagacatccacttctgggggaccttaggaaactgctgacatacgagttcgtgaaacagaagtaccttgactatcgcagggttcctaattccaacccaccggagtatgagtttctttggggactcaggagttatcacgagactagcaagatgaaagtgttaagatttattgctgaagtgcagaagcgcgacccacgggactggactgcacagtttatggaagcagccgacgaagctctggacgcactcgacgctgctgctgccgaggcggaggctcgagccgaggcgaggacacgcatgggaataggcgacgaagccgtgtcaggcccctggtcttgggatgacatcgagttcgaactcctgacgtgggatgaggagggagattttggggatccctggagtagaatcccttttaccttttgggcaagataccaccagaatgctcgttctagatttccacaaactttcgcggggcctattattgggcccgggggcacagcctctgcaaattttgctgcaaacttcggagccataggcttcttttgggttgaatag

SEQ ID NO: 123900 - DNA, 414 bp, synthetic construct
  misc_feature 1..414: note = Description of Artificial Sequence: Synthetic coding sequence
  source 1..414: mol_type = other DNA
atggcccaaaaaatggactgcggcgctggtttactcggatttcaggccgaagcaagtgtggaggacagcgccctgctcatgcagactctgatggaagccatccagataagtgaggcgccccccacaaatcaggctaccgcagctgcgagcccacaatcatctcaaccaccaaccgctaatgagatggcagacatccaagtgagcgctgccgctgcacggcccaaatcagcgtttaaagtgcaaaatgcaaccaccaaagggcccaacggcgtttacgatttctctcagtccctgaacgcaaatgacctcgcgaattcccgtccaaaaacccaagtaagcctgaacctgacagtgcagctccaccgccaccagcagatggtgccacgactgaggatatggagcccaggtcaatag

SEQ ID NO: 123901 - DNA, 3942 bp, synthetic construct
  misc_feature 1..3942: note = Description of Artificial Sequence: Synthetic coding sequence
  source 1..3942: mol_type = other DNA
atgagcggctggcgctacctcatctgcgtctccttcctgcttaccatactgcttgagctcacttatcaggggccccctgtccctgcctccagttcgaccaagctgttgatgactagctacagtatgcgtagcacagtcgtgtccaggtatgctcacactttggtcacaagcgtgctgtttaacccccatgccgaagctcatgaggctatctttgacttggatcttccgcatctggccttcatctcaaatttcaccatgactatcaataacaaggtgtatatagcagaggttaaagagaaacatcaggctaagaagatctacgaagaggcacatcaacaagggaaaaccgccgcccatgttggaatacgcgatcgggagagcgaaaaattccgaatttccacatctctggctgccgggactgaggtaactttttccctggcctacgaggaattattgcaacgccaccaaggccagtatcagctagtggtgtctctgcgacctgggcagctggtgaagaggctctctattgaggtaacagtgtcagagcggaccgggattagttacgtccatatacccccactgcgcactgggaggcttcggacaaatgcacacgcctccgaggtcgatagccccccttctactagaatagagaggggcgaaacctgcgtgcgtattacatattgccctacattgcaagaccagagcagcattagcggatcaggaattatggctgatttcttggtgcagtatgatgtggttatggaggacattattggtgacgtgcagatatatgacgattactttattcactactttgctcctcggggactgccccccatggagaaaaacgtagtgttcgtgattgacgtgtcatcctcgatgtttggcacaaagatggagcagaccaaaacagctatgaatgtgatacttagtgacctccaggccaatgactatttcaacataatttccttttctgacactgttaacgtttggaaggccgggggaagcattcaggcaactatccaaaatgtgcactccgctaaggactatttacattgcatggaggctgacgggtggacagacgtgaatagcgccctgctggcagctgcctcagtactcaaccatagtaaccaggagccagggcgagggccgtctgtggggcgtatcccgctgatcatttttctgaccgatggagaacccaccgctggggtcaccacaccgagtgtgatcctcagtaacgttagacaggcgctgggacaccgtgttagtctcttcagcttggcctttggagacgacgccgacttcactcttttgagacgtctgtcgctcgaaaatagagggattgccaggcgaatatacgaagataccgatgctgccctgcagctgaaaggactgtatgaagagatctctatgcccctcctagcagacgtacggctgaactaccttggcggactcgttggcgcctctccttgggccgtgttccccaattacttcggtgggtcggagctggtggtcgctggacaagtccaaccaggaaagcaggagctgggtattcatctggccgcccgcgggcccaaggaccagttgttggtagcgcaccattctgaaggcgccaccaataatagccagaaggcctttgggtgtccgggtgaacctgcgcctaacgttgctcacttcataagacgactgtgggcatacgtaaccattggggagctcctggatgcccactttcaggcgagggacactaccacacgccatctgctggcagcgaaagtactgaatctgagccttgaatacaacttcgtgacccctctgacctcactggtgatggtgcaacccaagcaggcctccgaagagactaggagacaaacctctactagcgctggacccgacacaattatgccttctagttcatcccgtcatggcttgggggttagcaccgcccagcccgccttggtacctaaggttatctcaccaaagtccagaccagtgaagcctaagttctacctgagcagcactaccacagcatcaacgaaaaaaatgctatctagcaaagagctcgaacctcttggcgaaagtcctcatacactgtccatgcctacctatcctaaagccaaaattcctgcccagcaggattcagggaccctcgcccaacccactctgaggacaaagcctacgatacttgttccgagtaattcaggcacgctgctgccactgaagcccggcagtctctcccatcaaaatccagacatactgcctaccaactcccggacacaggtcccacctgtgaaaccaggcattcctgctagccctaaggccgacacagtgaagtgtgtgacccctcttcactcaaaacccggggcccccagccaccctcagctaggggcccttacttcacaggcccctaaaggcctgccccagtcccggcctggcgtatcaaccctgcaagtccctaaatatccccttcacactcgccccagagtcccagccccaaagacaaggaacaacatgccgcacttgggtcccggtatacttctgtccaaaacacccaagatcctgcttagcctcaaaccctcagctcctccccatcagatttcaaccagcatctccctgagtaagcccgagacacccaaccctcatatgccccaaactcctttaccgccacggcccgataggccacggcctccactccccgagtctctgtcaaccttccccaacacgatctcatcatcgactgggccaagctcaacaaccacgactagcgtcttgggtgagccattacccatgccctttacacccactctgccacccggccgtttttggcaccagtatgatctgcttcccggcccacaaagaacaaggcaggtactgggacccagccggcccggcgtgccaacaatgagcctgctcaatagttccagacccactcctgaagggagtccacccaaccttcccatattgttgccctcctctatcctccccgaggcgatttccctgctccttctcccagaagagctggagcttctgagtgaatccatggtagaaagcaagtttgtggagtctctgaacccccccgctttctacactttcctcaccccggatgaagacggctctcctaattgggatgggaacagcgaagagattctcggcggcgccggaggaagcatggagtcgcagggctcttccgtgggcctcgcaaaaggaaccctcccaagtatattcacattcagttcaagcgtggatggggatcctcactttgtgattcagatcccacactccgaagagaaaatatgcttcacgctgaacgggcaccccggtgacttactgcagttgattgaggaccccaaggccggattgcatgtgagcgggaagcttctcggcgccccacctaggcctggacataaagaccagacgagaacctattttcaaatcattaccgtgaccactgacaagcccagggcgtacacaataacaattagcagaagcagcatttcactgcgcggcgaaggcactttgcggctttcttgggaccaacctgctctcctaaagcgccctcagttggaactctacgtagccgccgcggccagactgactctgcgcctgggcccttatctggagttcttggtgcttagacatcggtacaggcacccttccaccctgcagttgccacaccttggtttttatgtagcaaacggctccggcctgtcccccagcgccaggggtctgatcggacagttccaacacgcagatatacgcctagtcaccgggccaatggggccttgcctccgtaggcatcacggtcctgatgtgccagtgattctgggaaaacgtcttctaaaagacagcccacggcttctgcctcggtgggcttcatgctggctggtgaagaggtctcacgtcgaactgctgttaggccacccgtacttgagttacgttctgtag

SEQ ID NO: 123902 - DNA, 1767 bp, synthetic construct
  misc_feature 1..1767: note = Description of Artificial Sequence: Synthetic coding sequence
  source 1..1767: mol_type = other DNA
atgagtgacacttctgagagcggtgccggtctcacgagattccaggccgaggccagtgagaaggacagttcctctatgatgcagaccctcttgacggtgacacagaacgtcgaggttccagagacccctaaggcgagtaaggccactgaggtctctaagactccagaagcaagggaggcgcccgctacccaggcttcatccacgacccagctgacggacacccaggttctggctgccgagaacaaaagtctcgcagctgatacaaaaaagcagaatgccgaccctcaggcagtaacaatgcccgcgactgaaaccaagaaagtctctcatgtcgctgacacaaaggttaacaccaaggcacaagagactgaggccgccccctctcaggcacccgcagatgagcccgaaccagaatcagctgccgcccagtctcaggaaaaccaggatactcggccaaaagtcaaggccaagaaggctcgaaaagtgaaacatctggatggagaagaggacgggtcctctgaccagtcacaggcatccggtacaactggagggcgtcgcgtgtcaaaagcattgatggcctctatggctagaagggcctcccgaggccccatagccttctgggcaaggcgcgctagtaggaccagactggccgcgtgggctcgtagggctctattgagtcttcggtcgccgaaggcacgaaggggcaaagctcgacggcgggccgcaaagcttcagagttcgcaagagcccgaggctccgcctcctagggacgtcgctttgctgcagggtcgggcaaatgacctcgtgaagtatcttctggcaaaagaccagacaaagattcctatcaaacgctctgatatgctgaaggatatcatcaaggagtacaccgatgtgtatccagaaattatcgaacgcgccggatactccctggagaaggtgttcggaatccaactaaaagaaatagataagaacgatcacttatacatcttgcttagtaccctggaacccactgacgccggcatcttgggaactaccaaagactcccccaagctgggcctgctgatggtgttgctgagcataatcttcatgaacgggaaccgttcatccgaagccgtcatttgggaggtccttaggaaattgggcctgagacccggcatccatcacagcttattcggggacgttaagaagctgatcactgatgaattcgtcaagcagaaatacctagactacgctcgtgtccctaacagtaaccctcccgaatatgaatttttttggggattgagaagctattatgaaactagtaagatgaaggttctgaagtttgcctgcaaggttcagaagaaggatcccaaggaatgggcagcccaatacagagaggcaatggaggctgaccttaaagccgccgcagaggccgcggcagaggcaaaggctagagctgagattcgagcacgcatgggtatcggtctgggctctgaaaacgctgcaggcccttgcaactgggacgaggccgacatagggccttgggccaaggctcgtattcaggctggcgctgaagccaaggcgaaagcccaagaatccggtagtgccagtaccggcgcttccacgagcacgaataattctgcaagtgcctccgcaagcacatctggcggatttagcgccggggcctcgctgacagctacgcttacttttgggctgtttgccggtctcggaggcgcaggggccagtactagcggaagttcaggcgcctgtggtttcagttacaagtag

SEQ ID NO: 123903 - DNA, 1653 bp, synthetic construct
  misc_feature 1..1653: note = Description of Artificial Sequence: Synthetic coding sequence
  source 1..1653: mol_type = other DNA
atgtggcggtcccaaaggcatagaagacctcagagagttagtaaaaccccggaggcacgagaagcccccgcaactcaggcttcctcaaccacacagctgaccgacacccaggtccttgcagccgaaaataagagcctcgcggccgatacaaagaagcaaaatgctgatccccaggcggtaacgatgccagcaactgaaaccaagaaggtgagccatgttgccgataccaaggtcaacacgaaggcgcaggagactgaagccgcaccgtcacaggccccggctgatgagcctgaacccgagagtgccgctgcccagtcacaggaaaatcaggacaccaggcccaaggtgaaggccaaaaaggcacggaaggtgaagcacctcgatggggaggaagatggttcgtctgaccaaagccaggcaagcggcactaccggagggcggcgggtctctaaggccctgatggctagcatggcgcgacgggcctcaaggggcccaattgctttttgggctcgccgagcgagtaggacacgactggccgcctgggcacgcagagccctgttgtcactacgttcccccaaagcccggagaggcaaggcaaggcggcgggcagcaaaactgcagagctcgcaggagcccgaagcgccccccccacgtgacgtcgccttgttgcaaggtcgtgccaatgatttggtgaagtatctgctagccaaagaccagacgaaaattcctattaagagaagcgatatgctgaaagacattatcaaggaatacactgacgtctatcctgagattatcgagcgcgcaggatactcacttgagaaggtttttggtattcagctgaaggagatcgacaagaacgaccatctgtacatactgctgagcactctggaacctactgatgcagggatcctgggcaccactaaggattcgccaaagctgggtttgctgatggtgctcctgtccattatattcatgaatggaaaccggagctctgaggccgtgatctgggaagttctgaggaaattgggacttaggccggggattcaccactccttattcggggacgtgaaaaagctgattaccgacgaattcgtaaagcagaaatacctcgactacgcacgagtccccaattctaacccccctgagtacgaatttttctggggcctgcgatcatattatgagacctccaagatgaaagtgttgaagtttgcctgcaaggttcagaagaaagaccctaaagagtgggcagcgcagtaccgcgaagccatggaagctgacttaaaggctgcagcagaagctgcggcagaggcaaaagctagggccgagatccgagcaaggatgggaatcggcctcggtagcgagaatgcagcaggcccatgcaattgggacgaggctgatatcggcccctgggcaaaggcacgtatccaagctggcgccgaggcaaaagccaaagcacaggaaagtggaagcgcatccaccggcgcctcaacgagtactaataatagcgcatccgcctctgcgtccacgagtgggggattctcagctggcgcctccttaactgctaccctgacgttcggcctgttcgcaggactgggaggggccggtgcaagcacatccggttccagtggcgcttgtggcttctcgtacaaatag

SEQ ID NO: 123904 - DNA, 1821 bp, synthetic construct
  misc_feature 1..1821: note = Description of Artificial Sequence: Synthetic coding sequence
  source 1..1821: mol_type = other DNA
atgagcgacacaagcgagtcaggcgcaggactgacccggtttcaagctgaggcttcggagaaggattcatcttccatgatgcagacactgctcaccgtcacgcagaacgttgaagtgccagagacgcctaaagcgtccaaggctttggaggtgagtgaggacgtcaaagtgtcaaaagcttcaggagtgtctaaggcaactgaagtctccaagacaccagaagcacgcgaagctcccgcaacccaggcgagcagcaccacccagttgacggacacacaggtgttagctgccgagaataaaagtctcgcagccgacactaagaagcaaaacgccgacccccaggcagtcaccatgcccgccaccgagaccaaaaaggtatctcacgtcgccgacaccaaagttaataccaaggctcaggaaaccgaagcagccccctctcaagcccctgccgatgaacccgagccagaaagtgcggcggctcagtctcaggaaaatcaagatactagacccaaagtcaaagcaaagaaggcgcggaaagtaaagcaccttgatggagaggaagatggctcatcagaccaatctcaggcctcgggaaccacaggaggtcgccgcgtgagcaaagcgctgatggcctccatggcgcggagggctagccgggggcctatcgctttttgggctcggcgcgcttcaaggacaaggctggcagcctgggccagaagggccctgctgtcattgaggtctcccaaggcccgaagaggtaaggctaggaggcgcgccgcaaaactacaatctagccaggaacccgaggcccccccgccaagggatgtcgctttgttgcagggccgcgctaacgacctggtgaagtacctcctcgctaaggatcaaacaaagattccaattaaaagaagcgatatgttgaaggatataatcaaagagtacactgatgtgtaccccgaaattatcgaaagggccgggtattctctggaaaaggttttcggcattcagctgaaagaaattgacaagaatgatcatctgtatatcctgttgtctactctggagcctacagacgccggcatccttggcactaccaaggattcccctaaactgggactcctgatggttctactgtcgattatcttcatgaacgggaatcgttcgagtgaggcggtgatttgggaagtactgcgtaaactgggactgaggcccgggatccaccattctctgttcggcgacgtgaagaaattgataaccgacgaatttgtaaagcaaaagtatttggattatgccagggtgccaaactcaaatcctccagagtacgaattcttttgggggttgcggagctactacgaaaccagcaaaatgaaggtgttaaaattcgcctgtaaggtccaaaagaaagacccaaaggaatgggctgcccagtatcgtgaggctatggaagccgatctgaaagcggctgccgaggcagcagccgaggcaaaggcccgggccgaaatccgcgctagaatgggaattggcttaggatcagaaaacgccgccggcccctgtaactgggacgaagcggacatagggccatgggcaaaagcgcggatccaggccggggcagaagctaaggccaaggctcaggagagcggcagcgcctcaactggcgcttcaacttctaccaacaactcagccagtgcaagtgcatcgactagtggcgggttctccgctggcgcgtccctgacagctacccttacttttggactgttcgccggcctggggggggcaggcgccagtacgtctggctcctcaggtgcctgtggattctcttacaagtag

SEQ ID NO: 123905 - DNA, 1821 bp, synthetic construct
  misc_feature 1..1821: note = Description of Artificial Sequence: Synthetic coding sequence
  source 1..1821: mol_type = other DNA
atgtccgatactagcgagtccggcgccggtctgacaaggtttcaggccgaggcttccgagaaagactcaagcagtatgatgcagaccttactaacagtgacacagaatgtcgaggttcccgaaacccccaaggcttccaaggccctggaggtcagcgaggatgttaaggtgtccaaagcctcaggtgtttcaaaggctacagaagtttcgaagacacccgaagcgagagaggccccggctacccaggcgtcgtccacgacacagttgacagatacacaggtgctagccgccgaaaacaagagtctggctgccgatacaaagaagcagaatgctgaccctcaagccgtgacgatgcctgcaaccgagactaagaaggtgtcccatgtcgctgataccaaggtcaatactaaagcccaggaaactgaagccgcaccctcccaggcccccgcagacgaacccgagcctgaatccgctgccgcgcagtctcaggaaaaccaagatactcgacccaaggtgaaggccaagaaggccagaaaagtcaaacatctggatggcgaagaggatggctccagcgatcaaagtcaggcgtctggtactaccggcggaagaagagtgtcaaaggctctcatggcgtccatggctcgcagggcttctagaggacctatagccttctgggctagacgggcctctcgcacaaggctcgccgcatgggctcggagggcactgttaagtctgcggagtcccaaagcccggagagggaaggcgcgcaggcgagccgccaagcttcagagctctcaagagcccgaggccccaccccccagagatgtggcccttttgcaggggagagccaacgatctggttaagtacttactcgccaaagatcagacgaagataccgattaaacggagcgatatgctcaaagacattattaaggaatacaccgacgtgtatccagagatcattgaaagggcgggatacagtctggaaaaagtgtttggaattcagctcaaagaaatcgacaagaatgaccacctgtacatcctactgagcacccttgaaccaacagacgccggcatcctcggcaccactaaggatagccctaaacttggattgcttatggtgttgttgtctatcatcttcatgaacggaaatcggtcctcagaagccgtgatatgggaggtgttgaggaaactcggtctgcggcccggtattcatcactccctgttcggtgatgtgaaaaaattaataacagacgagttcgtaaagcagaagtatctggactacgctcgggtgcctaactctaacccacccgagtacgagttcttctggggactgaggtcctattacgagacatccaagatgaaagtactgaagttcgcttgtaaggtgcagaagaaagacccaaaggagtgggccgcccagtatcgcgaggcaatggaggctgacctcaaggccgctgcggaagccgctgctgaagcaaaagcccgagccgaaattagggcacgtatgggaatcgggctggggtcggagaacgccgctggcccttgtaattgggacgaagccgacatcggtccctgggcgaaggccaggattcaagcgggagccgaggccaaagccaaagctcaggaatccggctccgcctccacaggagcatcaaccagcacaaacaacagcgcaagcgccagtgcctccacatccggcgggttctcagcaggagccagccttaccgcaacattgacatttggcctcttcgcgggtctgggaggcgctggagcatccacgagtgggagttccggggcttgcggcttttcttataaatag

SEQ ID NO: 123906 - DNA, 1566 bp, synthetic construct
  misc_feature 1..1566: note = Description of Artificial Sequence: Synthetic coding sequence
  source 1..1566: mol_type = other DNA
atgtcggacactagcgaatcaggcgcaggtctaactaggttccaagctgaagccagcgaaaaagacagcagcagtatgatgcagactttactgactgtcactcagaacgttgaggtcccggagacccccaaggccagcagtaccacacagctcacagatacccaggtacttgctgccgagaataagagcctcgccgccgataccaagaaacaaaacgccgacccacaggcggtcactatgcccgcaacggagaccaaaaaggtaagtcacgttgctgacaccaaagtcaacaccaaagcccaggaaacagaggccgctccaagccaggccccagccgacgagccggaacctgagtccgctgccgctcagagccaggagaaccaagacacccggccaaaagttaaagcaaaaaaggcccgaaaagtcaagcatctggacggcgaagaggatgggtcctccgatcagagccaagcaagcggcactaccgggggccgcagggtgagcaaggctcgacggcgggcagccaagctgcaaagctcccaggaaccagaggccccgccccctcgagatgtggcgctgctgcaggggagagcaaacgatctggtgaaatatctactggctaaggaccagaccaaaatacctatcaagcggtctgacatgcttaaagacatcataaaagagtacaccgacgtctatcctgagattatagagcgcgccggttactctctggaaaaggtctttgggatccagcttaaggaaatagataaaaatgatcacctctatattctgctgtccacactggagccaaccgacgctgggatactgggtaccacaaaggattcaccaaagctgggattactcatggtgctgctaagcataatctttatgaacggaaaccgaagctccgaggccgtaatttgggaggttctgaggaaactgggtctgcggcccggtatccaccattccctatttggcgacgtcaagaaactgattacagacgaatttgtgaaacaaaagtaccttgattatgcacgcgtgcctaatagcaatcctccagagtatgaattcttctggggcctacgttcctattatgagacatcaaagatgaaggtgctgaagttcgcctgtaaagtgcagaaaaaagatcctaaagagtgggctgcccagtaccgcgaagctatggaagcagatctcaaggctgccgccgaggccgctgccgaagctaaggcacgagccgaaattcgcgcaaggatgggcattgggttgggatctgaaaacgccgccggaccttgtaactgggatgaggccgatatcggcccgtgggccaaggctcggattcaagccggggcagaggctaaggctaaagcccaagaatcgggatccgcttcaaccggggcatctacatccacaaataactcagcctctgcatccgcctccacctctgggggattcagtgctggtgctagcctgacagctaccttgactttcgggctgtttgccggcctgggcggtgccggcgcctcgacatcaggcagctctggagcgtgcgggttttcgtacaagtag

SEQ ID NO: 123907 - DNA, 1566 bp, synthetic construct
  misc_feature 1..1566: note = Description of Artificial Sequence: Synthetic coding sequence
  source 1..1566: mol_type = other DNA
atgagcgatacttcagaatccggggcaggcctgacaaggtttcaggccgaggcctcggagaaggactcgtcctccatgatgcagacactgctcaccgtaacccaaaacgtcgaagtgcctgagacacccaaagcctcttccactacccagctgactgacacccaggtgttggctgccgaaaataagagtctagccgctgacacaaaaaaacagaacgctgatccccaagctgttaccatgcccgccaccgaaacaaagaaagtgtcccatgtggcggatactaaagtgaataccaaggcccaggagacagaagctgccccttcgcaggcccccgccgatgagcctgagcccgagtccgctgccgcacagtctcaggaaaatcaagatacaaggcctaaggtaaaagcaaaaaaagcacggaaggtgaaacacctggatggagaggaggacggttcttccgaccagtctcaggcctctggcactacaggcggcagacgcgtctctaaagcccgacgccgcgctgcaaagctccagtcgagccaagaacccgaggctcctcctccgagggacgtggccctcctgcaaggccgggccaacgatctggtgaaatacctgctcgctaaggatcaaaccaagatcccaattaaaaggtctgacatgcttaaggacattatcaaggaatacacagatgtctatcctgaaatcatcgagagagcaggatattctttagagaaagtgtttgggatccagttaaaggaaattgataaaaacgaccacctgtatatcctgctcagcacactggaacccactgatgcaggaattcttggaaccactaaagatagccctaaactcggtctccttatggtcctgctcagtatcatttttatgaatggtaatagatccagcgaagccgtgatctgggaggtgttacgcaagctgggcctgaggcctgggattcatcacagccttttcggcgacgtgaaaaagttgattactgatgaattcgtgaaacaaaaataccttgattatgcaagagtgcccaacagcaatccacctgagtacgagttcttttggggcctgcgcagttactacgaaacctccaaaatgaaggtgctgaaatttgcttgcaaagtgcaaaagaaggaccccaaggagtgggccgcccagtatagggaggcaatggaggcggacctcaaggcagccgccgaggctgccgccgaagcaaaagctagagccgaaatccgggcgcgcatgggcataggactgggaagcgagaatgcagccgggccctgtaactgggacgaggccgatataggaccatgggccaaagctagaattcaggcaggagctgaggccaaggcaaaggcccaagagtccggcagcgcatctacaggtgcttccacctcaactaataattccgccagtgcatcagccagcacatcaggcggattttcagccggggcatcactgaccgctaccctgacattcgggctctttgccggattgggtggagccggagctagcacttcaggctcttccggagcttgtggcttctcatataagtag

SEQ ID NO: 123908 - DNA, 1821 bp, synthetic construct
  misc_feature 1..1821: note = Description of Artificial Sequence: Synthetic coding sequence
  source 1..1821: mol_type = other DNA
atgagcgatacttcggagagtggggccggcctaactagattccaagctgaagctagcgagaaggacagctccagtatgatgcagacgcttctcacggtaacacagaatgtcgaagtgccagaaactcctaaggcgagcaaagccctagaggtctcagaagatgttaaagtgagtaaagcttcaggtgttagcaaggccactgaggtttccaaaactcccgaggcacgtgaggcgccagctacacaggcctcttcgactacccagcttaccgatacacaagtcctagcagccgaaaataagtccctggcggctgatactaaaaagcagaacgcagatcctcaggcagtcaccatgcctgccaccgaaacaaagaaggtgtcccatgtcgccgacactaaagtgaatacaaaggcccaggaaactgaggcagcccccagccaggcgcctgcagatgaaccggaacctgaatccgccgccgctcaatctcaggagaaccaggacacaaggcccaaagttaaggccaagaaggctcgcaaagtgaaacacctggatggggaagaagacggatctagcgaccagtctcaggcgtcaggcaccaccggcggccgcagagtgtctaaagcactgatggcctccatggcccgtagagccagccgggggccaatcgcgttttgggcccgtcgcgcgtcccgcacgagacttgcagcctgggccagacgcgcgctcctgtcgctgaggtcacctaaagccagacgcggaaaggctcgacggagagccgccaagctccaaagcagtcaggagcctgaagccccccctccaagggatgtagccctgttgcaaggtcgcgctaacgacttggtgaaatatttactggccaaggaccagaccaaaattcctatcaaacgcagtgacatgttgaaggatataattaaggagtatactgatgtctacccagagatcatcgagagggcgggctattccctcgagaaggtgttcggcattcagctgaaggaaattgataagaatgaccatttgtacattttgctatctaccctcgaacctaccgatgctggaatactcggcactaccaaggactctcccaaattaggcctgctcatggttctgctgtctataattttcatgaatgggaataggagcagtgaggccgtgatttgggaggtactgagaaagctgggactgcgtcctggcatccatcactccctgttcggggatgttaaaaaattgatcacggatgagttcgttaagcaaaaatacctggattatgctagggtgccaaacagtaatccacccgagtacgaattcttctggggcctcaggagctattacgagaccagcaaaatgaaggtgctcaaattcgcctgtaaggttcagaaaaaggatccaaaggaatgggctgcgcaataccgtgaggctatggaggctgatctgaaggccgcagccgaggctgccgctgaggctaaagcgcgagccgagatcagagcgcgtatgggcattggcctgggcagcgagaatgcagctggcccgtgcaactgggatgaagcggacatcggcccttgggccaaggccaggattcaggccggagcagaggccaaagccaaggcccaggagagcggctccgcgagcaccggagcctcaacatcaaccaacaattctgcgtcagcaagtgccagcacttccggcgggttttctgctggcgcatcacttactgcaactctaactttcggtctgtttgccggtctaggtggcgccggcgcatctaccagtggaagttccggcgcatgcggtttctcctataaatag

SEQ ID NO: 123909 - DNA, 1821 bp, synthetic construct
  misc_feature 1..1821: note = Description of Artificial Sequence: Synthetic coding sequence
  source 1..1821: mol_type = other DNA
atgtctgatacgtctgagtcaggggctggtctaacacgcttccaggctgaagcgtctgaaaaagacagttcttccatgatgcagacgttgttaaccgtgacccaaaatgtggaggtacccgagaccccaaaagcttctaaggcacttgaggtttctgaagatgtcaaggtgagcaaagccagtggtgtgagcaaggccactgaggtgagtaagacacccgaggcacgtgaggctccagccacacaggcatcttccactacacagctgaccgacacccaggtactggcagccgagaacaaaagccttgcagctgatacaaaaaagcagaacgccgatccacaggccgtgactatgcctgccacggaaacaaaaaaagtaagccacgtggctgatacgaaagttaatactaaggcccaggagactgaagccgcccccagtcaagcccccgctgacgagcccgagcccgagagcgcagcagcgcagagccaagaaaaccaggacacaaggccgaaagtcaaagcgaaaaaggccaggaaagttaagcatcttgatggggaagaagacgggtcgtctgatcagagccaggcaagcggcactaccggcggacgaagggtgagcaaagctctgatggcaagtatggcgcgaagggcaagtcgtggcccaatcgctttctgggccagacgggctagccgcactcggcttgccgcctgggccaggagagctttgctgagtctgaggtcacccaaggctagaagaggaaaagctcgtcggcgagcggcaaagcttcagagctcacaggagcccgaagcaccccctccacgagatgttgccctgctgcagggtcgggccaacgacctggttaaatacctcctcgcaaaggatcagacaaaaattccaatcaaaaggagcgacatgctgaaagatatcatcaaggagtacacagatgtctaccctgagattatagagcgggcgggatacagcttagaaaaagtcttcggtattcagctgaaagaaattgacaagaatgatcatctctacattctgctgagcacacttgaacccactgatgctggcattctcggcacgaccaaggattcacccaagctgggattgttgatggtcctactaagtatcatctttatgaacggcaatcgctcaagcgaagcagtcatctgggaggttctgcggaagctcggactccgcccaggcatccatcactctctcttcggagatgtaaagaaactgatcacagacgaatttgtgaagcagaaatatctggactatgctcgtgttcctaactctaatccacccgaatatgaattcttttggggtctcaggtcatattatgaaacttctaaaatgaaggtgctgaagtttgcctgtaaggttcaaaagaaagatcctaaggagtgggccgcacagtacagagaggcaatggaggcggatcttaaggccgcggcagaggctgccgctgaggctaaagctcgggccgagattcgggccaggatgggcatcggactagggtctgagaatgctgccggcccttgtaattgggacgaggctgacataggcccctgggcaaaggcgaggatacaggccggcgctgaggcaaaggcaaaagcgcaggagtcgggctcagcatcgaccggagcttccacctccacgaataacagcgctagtgcatctgcctctacgtctggcggattttcagcaggtgccagtcttactgccaccctgacctttggtctgtttgctggtctcggcggtgctggcgcttcgaccagtggatctagtggtgcctgtgggtttagctacaagtag

SEQ ID NO: 123910 - DNA, 2220 bp, synthetic construct
  misc_feature 1..2220: note = Description of Artificial Sequence: Synthetic coding sequence
  source 1..2220: mol_type = other DNA
atggcagaaggttcgttttccgtgcaatccgagtcttattccgttgaggacatggatgaagggtcagatgaagtcggcgaggaagaaatggtggaggggaatgactacgaagaattcggggcctttgggggatacggcaccctcacctcctttgatatccatattttgcgcgcttttggatcactgggccctggactaagaatattgtcaaacgaaccctgggagctcgaaaatcctgtcctcgctcagacactcgttgaagcactgcagcttgaccctgagacactcgccaacgagactgccgctcgggccgccaacgttgcccgggctgcggcatcaaatagagccgcaagagccgccgcagccgccgcgcgcaccgcattctcacaggtggttgctagccaccgagtggcaacgccacaggtgtccggggaagatacccagccaaccacatatgctgccgaagcccagggcccaactccagagccgccattagccagccctcagacctcacagatgctcgtgacaagcaagatggcggctcccgaagctcccgccacttctgcccagtcgcagaccgggtcgcccgcgcaggaggctgcgaccgagggacctagcagtgcctgtgctttttcccaggcaccctgtgccagggaagtagacgcaaatcggccatcaactgcattcctgggccaaaacgacgtgtttgattttacccagcccgcaggggtgagcggaatggcattccccagaccaaaacgtccagcacccgcgcaggaagctgcgaccgagggtcctagtgctgccagtggagtccctcagacaggaccagggcgcgaggtggccgccacacgccccaaaaccacaaagagcggcaaagccctcgcaaaaacccggtgggtggaaccgcagaacgtagtggccgccgccgctgctaaagcaaaaatggcgacgtcaattcctgaaccagagggagccgctgcagcaactgcccaacattccgctgagccttgggcacgcatgggcgggaagagaactaagaaatcaaagcatttggacgatgaatacgaatcctccgaagaggaaagggagactcccgctgtgccaccaacctggcgggcgagccagccctcactgactgtacgggcgcagctggctccccggccgcccatggcaccaaggtcccaaattcccagcaggcatgttctgtgtctgccccccaggaacgtaactctgctccaggagagggccaataagcttgtgaaatatctcatgatcaaggattataagaagattcctatcaaacgggctgacatgctgaaagacgtgatacgagaatatgatgaacattttccagagattatagaacgtgcaacgtataccttggagaaaaagtttggcatccatctgaaagagatcgataaagaggagcacttgtacatcttagtctgtacacgggattcatcggccaggctcctgggcaagacaaaggacactcctaggctcagcttgctgctggttatcttaggtgttattttcatgaatggcaatcgggccagcgaggcagtgttatgggaagcgcttaggaagatgggcctcagacccggagttcgccatccgtttcttggagacctgagaaagctaatcaccgatgattttgtgaagcagaaatacttggagtataagaaaattcctaattccaatcctcctgagtacgaattcctctggggactcagagctcgccacgagacctccaagatgagggtcttgagattcatcgcccagaatcagaatagggatccccgcgaatggaaagcgcatttcctggaggctgtagatgatgctttcaagacgatggacgttgatatggcagaagagcatgctcgagcccagatgagagcccaaatgaacatcggagatgaggctcttattggtaggtggagctgggatgatatccaggttgagttgttgacctgggatgaggatggggactttggggatgcctgggcccgcatccctttcgcgttctgggctagatatcaccagtacattcttaactcaaatagggctaacaggcgagccacatggcgggctggagtatcctctggaactaacggaggagcatccacaagcgtactggacggaccttccacctcgagcaccattagaacccgcaatgcggcccgtgcaggagcctcctttttcagttggatccagtag

SEQ ID NO: 123911 - DNA, 2274 bp, synthetic construct
  misc_feature 1..2274: note = Description of Artificial Sequence: Synthetic coding sequence
  source 1..2274: mol_type = other DNA
atggccgagggcagcttctctgttcagagcgagtcttatagcgttgaggacatggacgaggggtcagacgaagtgggcgaggaagagatggttgaaggcaacgactatgaggagttcggcgcctttggcggctatggcaccctcacgagtttcgacatacacatcttacgtgctttcggatcattgggtcccggcttgcggattctgtcaaacgaaccctgggaactagaaaatcctgtactagcccagaccctggttgaggcactccagctggaccctgagacacttgccaatgagactgccgcccgagccgctaatgttgctagagccgccgcctctaaccgggcggcccgcgctgccgccgccgctgcccgtacagctttctcacaggtggtggcttcccatagagtcgctacaccccaagtgtctggtgaagacacccaaccaactacctatgccgcggaggcacagggccctacaccagagccaccccttgcttctcctcaaacatctcagatgctagtgacgagtaagatggccgccccagaggcgcccgccacctcggcacagtcccaaacaggaagtcctgcccaggaggcagccacagaggggcccagctcagcatgcgcattttctcaggcaccctgtgcaagggaggtagacgccaatcgtcccagcacggccttcctagggcaaaatgatgtcttcgatttcacccagccggcgggtgtgtccgggatggcttttccaagacctaaaaggccagcacccgcccaggaagctgctacagagggaccgtctgctgccagcggggtgccgcaaaccgggcctggacgcgaggttgccgccacaagaccaaagacaacaaagagcggcaaggccttagctaagaccaggtgggtggaaccccaaaatgtggtggcagctgccgctgccaaagccaagatggccacgagcataccggaaccagagggcgctgccgcagccacagctcagcattccgcagaaccgtgggcccgtatgggcggaaagcgcacaaaaaaaagcaagcatctggacgacgaatacgaatcttcggaggaggaaagagagacacccgctgttccaccaacctggagggcctcccaacccagtttgaccgtgagggctcagttggccccgagacccccgatggccccacgcagtcagatcccaagtagacacgtgctatgtttgcccccacggaacgttactttgcttcaggagcgtgcaaacaagctggtgaagtacctaatgatcaaagattataaaaaaattccgatcaagcgcgccgatatgttaaaagacgtgataagggaatatgacgaacatttcccggaaatcatcgagcgcgctacatataccctcgagaaaaaatttggcatccatttgaaggaaattgacaaagaggaacatttgtacattcttgtgtgcacacgcgatagttccgcaaggctcctggggaaaacaaaggatacccccagactcagcctgctcctcgtgatcctgggggtaatttttatgaacggaaaccgggcatctgaggccgtcctgtgggaggctctgagaaagatgggtctgcggcccggtgtgcgccatcccttcctcggcgacctgaggaagcttataacagacgatttcgtaaaacagaaaaacccagaactgagggaggaaacacccctgagcatggccccgagctggtacctggaatataaaaaaatccctaactctaacccgcctgaatatgagttcctgtggggccttcgggctagacacgaaacctctaagatgcgggttctgaggtttattgctcagaatcagaatcgggacccccgtgaatggaaggcacattttctggaggccgtggatgatgcctttaaaaccatggacgtcgatatggcggaggagcacgcaagagctcagatgcgtgcgcagatgaacattggagacgaggccctgatagggcgatggagctgggatgatatccaggtggagcttctgacatgggacgaggatggggactttggggatgcttgggcccgcatacccttcgcattctgggcccgataccaccagtacattttaaattcaaacagggcgaataggagggccacttggagagctggggtgtcaagtggtacaaatggcggcgcttcaacttccgtgttggatgggccaagcacgtcgagtaccattagaaccaggaacgccgccagagccggcgccagtttcttctcatggatccaacatcgctag

SEQ ID NO: 123912 - DNA, 2226 bp, synthetic construct
  misc_feature 1..2226: note = Description of Artificial Sequence: Synthetic coding sequence
  source 1..2226: mol_type = other DNA
atggccgagggaagcttttcggtgcagtcagagagttacagcgtggaggatatggacgagggttcggatgaagtgggcgaggaggagatggtggaagggaatgactatgaagagttcggcgcattcggagggtatggaacgcttactagctttgatattcatattcttcgggcctttggatccctaggcccaggattacggattttgagcaatgaaccctgggagttggagaatccagtgttggcacagacgctcgtggaggccttacagctggaccccgaaactctggccaacgagaccgccgcaagggccgctaacgtcgcacgagccgccgcgagcaacagggcagctagagctgccgcagctgcggcccgaacagcctttagtcaggtagtggcgagtcaccgagttgccactccacaggtgagcggcgaggatacccagcctaccacgtacgctgctgaggcccaagggcccacgcccgagccccccctcgccagcccccagacctcacagatgctcgttacttcaaaaatggcggctcccgaggcccctgccacatctgcacagtcgcagaccggcagcccagcccaggaggccgccaccgagggacctagtagcgcctgcgcattttcacaggcaccctgcgcccgggaggttgatgctaaccggccctctaccgccttcttgggacagaacgacgtgtttgatttcacgcagccagccggagtctccggaatggctttccccaggcccaaaaggcctgctccggctcaggaagccgctaccgaagggcccagtgccgcatctggagtgcctcagaccggcccaggacgagaggtggcggccacacgacccaagactactaaatcggggaaagcactggcaaagacacgatgggtggagccccagaatgtcgtggcagctgcagctgccaaggcgaagatggccacatccatacctgagcccgaaggagcagctgctgcaaccgcccagcattccgccgaaccgtgggctcgaatgggcggaaaaaggacaaagaagtccaaacacctggatgacgagtatgagagctctgaagaggagcgagaaactcccgctgtaccccctacgtggagggcctcccagcctagtctgactgtgcgggcccaactggcccctcgcccacctatggccccaagaagccagatcccttccagacacgttttgtgtctgccccccaggaatgtgaccttgctgcaggaacgcgccaacaaattagtgaagtatctgatgatcaaggactacaagaagatccctatcaagcgggccgacatgctaaaagatgttattcgagagtacgatgagcacttccccgagatcatagagcgagcaacttacaccctggagaaaaaatttggaatccacctgaaagaaatcgacaaggaagaacacctgtatattctcgtctgcacgcgggattcatcagcacgacttttgggcaagacaaaggacacgccccgcttgtctctcctcctggtgatactcggcgttatatttatgaacggaaaccgggcttcggaggccgtgctgtgggaggctctcaggaagatgggtttgcggccgggcgtgagacacccattcctcggcgacctcaggaagcttatcacagacgatttcgtgaaacagaagtatctggagtataagaagatcccaaacagtaatccgcctgagtatgagttcctttggggactcagggcaagacatgagacaagcaagatgagagtgttgagatttattgctcaaaatcaaaatagagatccgcgggagtggaaagcccacttcctggaggcagtggacgacgccttcaagacgatggatgtcgacatggccgaagaacatgctcgagcgcagatgagggctcagatgaatatcggtgacgaggccctcattgggcgctggagctgggatgatatccaggttgagctgctaacctgggacgaggacggtgacttcggcgacgcttgggccagaatccccttcgccttttgggcccgataccaccagtatatcttgaactcgaatcgggctaaccggagagccacttggcgagcaggagtgtcctcgggaacaaacggcggcgcaagcaccagcgtgctggacggtccctctactagtagcaccattcgtacgagaaatgcagccagagcaggcgcttcatttttctcctggattcagcatcggtag

SEQ ID NO: 123913 - DNA, 2220 bp, synthetic construct
  misc_feature 1..2220: note = Description of Artificial Sequence: Synthetic coding sequence
  source 1..2220: mol_type = other DNA
atggctgagggctcattcagtgtacaaagtgagtcgtatagtgtagaggatatggacgaagggagcgacgaggtcggcgaggaggaaatggttgagggaaatgactacgaagaattcggcgcctttggtggatatggaacactcacatctttcgacatccacatcctcagagcctttggttctctcggccccggattacgtattctctcaaacgagccctgggagttggaaaaccctgtgcttgctcaaaccttggtcgaggccctgcagttggatcccgaaaccctcgctaatgagacagcagccagggccgccaatgtcgcacgagctgcggcctccaaccgtgccgctcgggcggctgccgcggccgcacggaccgctttcagtcaggtggtggccagccatagggtggcaactcctcaggtgtcaggcgaggacacgcaacctaccacgtatgcagccgaagcccaggggcctacgcctgaacccccacttgcttccccacagacatctcagatgctcgtcacctccaagatggccgcccccgaggcccccgccacatctgcacagtctcaaaccggatccccagcacaggaggccgcaacagaaggaccatcttctgcctgcgcattctcccaggccccttgcgctcgtgaggtcgacgccaatagaccttccacagcctttctcggccagaacgacgtcttcgactttacccagcccgccggagtgtctgggatggcattccccaggccgaagcgccccgccccagcccaggaagccgcaactgagggtccatccgccgcttcaggagtgcctcagaccgggccaggcagagaggttgccgccacccggcctaaaaccaccaagtctggaaaggcccttgccaaaacccggtgggtagagccccagaacgtcgtcgccgccgctgcagctaaggccaaaatggcaaccagcatccctgagcctgagggggctgcggctgccaccgcccagcacagcgctgaaccttgggcgagaatgggcggtaaacggactaaaaagtccaagcatttggacgatgaatatgagtcatctgaggaagaacgcgaaactccagccgttccacctacctggcgggcttcccagccctcactgactgtgcgggcacagctagcaccccgccctccgatggcaccacgatcacaaatacctagtaggcatgtcttatgcctgccaccacggaatgtgactcttctccaggagcgcgcgaataaactggttaagtacttgatgatcaaggactataagaaaatccccatcaagagagcggacatgctaaaggacgtcatccgagaatatgacgaacacttcccagagatcattgagcgagcgacgtacaccttagaaaaaaagttcggaattcatctgaaggagattgataaggaggaacatctctatatcctggtttgtacaagggactcaagcgccagacttctcgggaaaaccaaggacacaccgcggttaagtctcctgttggtgatcctcggtgtcatattcatgaacggtaacagagcttctgaggcagtgctgtgggaagccctgagaaagatgggcctgcggcctggtgtccggcacccgtttctaggtgacctgcggaaactgatcacagacgattttgtcaagcagaaatacctggaatataaaaagattccgaatagtaacccacccgaatacgagttcttgtggggcttacgggctcgccacgaaacaagtaaaatgcgggtgctgagattcattgcccagaaccagaatcgggaccctcgagagtggaaggcacatttcttggaagcagtggacgatgcttttaaaacaatggacgtagatatggccgaggagcatgcccgggcacaaatgcgtgcccagatgaatattggtgacgaggccctgatcggcagatggtcctgggatgatatccaggtggaactgctgacatgggatgaggatggagatttcggagacgcctgggctcgtatccccttcgccttctgggccaggtaccaccaatacattcttaatagtaaccgggcaaatcggcgagccacgtggagagcaggggtgtcatcaggtaccaacggcggtgcttcaacaagtgtgctggacggaccctctacatccagtacaatccggactcgaaacgcggcacgggcgggcgcctcctttttttcatggattcagtag

SEQ ID NO: 123914 - DNA, 2274 bp, synthetic construct
  misc_feature 1..2274: note = Description of Artificial Sequence: Synthetic coding sequence
  source 1..2274: mol_type = other DNA
atggcggagggctcttttagcgtacagagcgagagctactcagttgaagacatggacgagggatccgacgaggtaggagaagaggaaatggttgagggaaatgactacgaggaatttggggcctttggtggatacggcaccctgacatctttcgatatccacattctccgggccttcggttcccttggacctggcctccgcatcctctctaatgaaccctgggagctcgaaaacccagttttagcgcagacactcgtggaggctctgcagctggatccagaaactctggccaatgaaactgctgcgcgggcggctaatgtggctcgagccgctgcttcaaatcgagctgccagggccgcagctgcagcagctaggaccgccttcagccaggtggtggcttcccatcgcgtggccaccccgcaggtttctggcgaggacactcagccaacaacttacgccgccgaggctcagggccctaccccagaaccacctctggcctctccacagaccagtcagatgctagtcacgtcaaagatggcggcccccgaagctccagcaacgtctgcacagagccagactggatcgccagcgcaggaggccgccaccgagggacctagtagcgcctgcgccttttcccaggccccatgcgctcgtgaagtggacgctaaccgaccgagcaccgcttttctggggcagaacgacgtgtttgacttcactcagcctgctggtgtgtcagggatggccttccctaggcccaagcggcccgctcccgcgcaggaggctgccaccgaggggcccagtgccgccagcggtgtgccccaaaccggcccaggacgagaagttgcagccacgaggcccaagaccacaaagtctggtaaggctttggcaaaaacccgctgggtagagcctcagaatgtggtggctgccgcagccgctaaggctaagatggccacaagcatccctgaacccgaaggggcagcagctgccacagcccagcactccgctgagccatgggcaaggatgggcggaaagagaacaaagaagtccaaacacttggatgacgaatacgagagtagtgaagaagaacgcgagacaccagcggtccctcctacttggagagccagccagccttccctgactgttcgggcacaactcgcacccaggccaccaatggcgccccggagccaaatccctagccgacacgttctgtgccttccacctcgcaatgtcactctccttcaggaacgcgctaataagctcgttaagtacctgatgattaaagattacaagaaaatccctataaagcgggccgatatgctgaaagatgtaatcagggagtacgatgagcacttcccagaaattatcgagagagccacctacacactagagaaaaagttcgggattcacttaaaagaaattgataaggaagaacatttatacatcctcgtctgcactcgggattcctcggctcgccttcttggcaagacaaaggacacaccaagactctcacttctgctcgtgatcttgggcgtcatcttcatgaatggtaacagagcatctgaagccgtgctctgggaagcgctcagaaaaatgggtctgcgacctggagtgcggcacccctttttgggtgacttgcggaaactaattacagatgacttcgttaagcagaaaaaccccgagctgcgtgaggagaccccactgagtatggcccccagttggtatttggagtacaagaaaattccgaacagcaatccgcccgagtatgaatttctgtggggcctcagagcccggcatgagaccagcaaaatgagggttctcagattcattgcccagaaccagaacagggaccccagagagtggaaggcccactttctcgaagcagtcgacgatgcgttcaaaactatggacgtggacatggctgaagagcacgctagagctcagatgcgggcacaaatgaacattggagatgaggccctgattgggagatggagttgggacgatatccaggtcgaactgcttacatgggatgaggatggcgattttggcgatgcctgggcaagaataccgttcgctttttgggcgcgataccatcaatatatactgaacagcaaccgcgctaaccggagggctacctggcgggcgggggtgagtagcggaaccaatggtggagcatcaacatctgtgttggacggaccaagcaccagctccacgataagaactcgaaatgccgcccgcgcaggggcatctttcttttcatggattcaacacaggtag

SEQ ID NO: 123915 - DNA, 2226 bp, synthetic construct
  misc_feature 1..2226: note = Description of Artificial Sequence: Synthetic coding sequence
  source 1..2226: mol_type = other DNA
atggccgaaggatctttcagtgtccagtcagaaagctattccgtggaggacatggatgaagggagcgatgaagtgggtgaagaggagatggtggaagggaacgactacgaggaattcggagcattcggcgggtatggaacactgacctcctttgatattcacatccttagggccttcgggagcctgggccctggattgaggatactgtctaatgagccatgggaactggagaaccccgtcctcgctcagactttggtggaggctctgcagctggatccggagactcttgcaaatgaaacagctgcacgagctgcaaatgtggcccgggcagccgccagcaaccgggctgccagagccgccgctgctgccgctagaactgcattctcacaggttgtggctagccaccgggtggctacaccccaggtgtcaggagaggacacgcaacccactacatatgcagcagaggcccaaggacccactcccgaaccacctttggccagtccacaaacttcacagatgctcgtgactagcaaaatggcagcccccgaggcccctgccaccagtgcccagtctcagaccgggagccccgcacaggaggccgccactgagggtccaagttccgcatgtgccttcagccaggccccctgcgcccgagaggtggacgctaatcgccccagcaccgccttcctgggtcaaaatgacgttttcgactttacccagccagcaggtgtgtccgggatggcgtttccccgcccaaagcgccctgctccagcacaggaggccgctacagagggcccctccgcagcttctggagtccctcagacgggaccagggagggaggttgctgcgactcggccaaaaaccaccaagtccggcaaagcccttgccaaaacaagatgggtggagcctcaaaatgtggtggcagccgccgctgctaaggccaagatggccacgagtatcccggagccagagggggccgctgcagccaccgcgcagcattcagccgagccgtgggccaggatgggagggaagaggaccaagaagagcaagcatttggatgacgagtatgaaagtagcgaagaggagagggaaactcctgccgttcctcccacatggcgagcgagccagcccagcttaactgtccgtgcacagctggcccctagaccacctatggccccccggagccagatcccatctcggcacgttctgtgtctccctccccgaaatgtcacactgctgcaagaaagagcaaacaaattggtgaagtatctcatgattaaggattataagaagatacctataaaaagagctgacatgttgaaggatgtgatcagagaatacgacgaacactttcctgagatcatcgaaagggccacttataccctggaaaaaaaatttggcattcacttgaaggaaatagataaggaggaacatctgtatatcttggtgtgtacaagggacagttcagcaagactgctggggaaaactaaagacaccccacgcctgtccctgctgctggtgatcctgggcgtgatatttatgaacggcaatcgcgcaagcgaagccgtgctgtgggaagcgttaaggaaaatgggacttagaccaggggtgcgacacccgttcctgggcgatctgcgcaaattgatcacagacgactttgtgaaacagaagtatctggagtataaaaaaattcccaactccaaccccccagaatatgaatttttgtggggactgagagcaaggcatgagacgtccaagatgagagtgctacgtttcatcgcacagaaccagaatcgggaccctcgcgagtggaaggcccacttcctggaggcagtggatgatgcatttaagacgatggacgtggatatggctgaagagcatgcccgagcccagatgcgagcacagatgaatatcggagatgaagccctgattggtcgctggtcatgggacgacattcaagtggaactgcttacctgggacgaggacggagacttcggcgatgcttgggccaggatccctttcgcattctgggctagataccaccagtatatactgaattcaaacagagcaaatagacgcgccacatggagggctggagtgtcctccgggaccaatggtggggcttccacaagcgtgctagatggaccgtctacatcaagtactattcggacccgcaacgcggctcgggccggggcgagcttcttttcctggatacaacaccggtag

SEQ ID NO: 123916 - DNA, 2874 bp, synthetic construct
  misc_feature 1..2874: note = Description of Artificial Sequence: Synthetic coding sequence
  source 1..2874: mol_type = other DNA
atgtcattagtatcacagaatagccgccgcaggcggcgaagggtggccaaggccacggcgcataactccagctggggtgagatgcaggccccaaacgcaccaggcctgccggccgacgtgccgggtagtgacgtccctcaaggcccctccgacagccagattttacagggactgtgtgcctctgaaggaccctccacctcggtcctccctactagcgctgagggcccatctacctttgtccctccgaccattagcgaggcctcttccgccagcggacagccgacaatctcagaagggcccggcacctcggtgcttcctaccccctctgagggcctgtcaacctctggaccccccactatatctaagggtctctgtacttctgtcactctcgccgcatccgagggaagaaatacgtcaaggccgcccacaagttctgaggagccttcaacatcagtacctcctaccgcaagtgaagtgccaagtactagtctgcctccaactccaggggaggggactagtacaagcgtcccccctacagcatatgagggacccagtaccagcgtggtgcctacccccgacgaggggccatccacctccgtgctgcctacaccaggcgagggtccaggcaccagtgtcccgctggccgctactgagggcctgtccaccagtgtgcaggcaacccctgacgaggggccatcaacttcagtccccccgactgccaccgagggcctcagcacacccgtgccacctactcgcgatgaaggacccagtacctcagttcccgctactcccggcgaggggccgagcacttccgtgctgcccgcagcctccgatggccagtcaatatcactcgtccctacacgcggcaagggatccagtacttctgtaccacccacagcgaccgaaggactttctaccagcgtgcagcccacagccggggaaggtagctccacaagcgtcccaccgacacctgggggaggactgtcgacctcggttccacctaccgcgaccgaagaactgtcaacttccgtccctccaacacccggagaggggccttccacttcagtgttgcctatacccggagagggtctttccacatcagtgcccccaactgcctctgatggctcagacactagcgttccgcctaccccgggggagggtgcatctaccctggttcaacccactgctcctgacggccctggaagttccgtactccccaaccccggagaggggccaagcactttgttttccagctctgcgagcgttgaccgaaacccgtctaaatgctctctggttctgccttcccccagagtcactaaagcctctgtcgattccgactcagagggtccaaaaggcgccgagggtcccatcgaatttgaagtcctgcgggattgcgagtcgccgaactctatctccattatggggcttaacacaagcagggtagcaattactttaaagccccaagaccctatggaacaaaacgttgccgaattactgcagttcttgctggtaaaggatcagagtaaataccccattagggaatctgagatgcgggagtacatcgtgaaggaatacaggaaccaattcccagaaatcttacggagagccgcagcccaccttgagtgtatcttcaggtttgagctgagggagctagaccctgaagcacacacctatatactgctgaataaactcggccccgtgcctttcgaggggctggaggagagccccaacggcccaaagatgggtttactgatgatgattctaggacagatctttttaaacggaaaccaggccaaggaggccgagatttgggaaatgctctggaggatgggagtacagcgggaacgccgactgtccatttttggcaaccctaaaagactccttagtgtggaattcgtctggcaaagatatctcgattacaggcccgtgaccgactgtaaacccgttgaatacgaattcttctggggtccccgctcacacctggagacgaccaagatgaagatcttgaagttcatggcaaagatctacaataaggaccccatggattggcctgagaaatacaatgaggcgctcgaggaagatgccgcacgcgccttcgctgaggggtggcaggccctgccacacttccggcggccatttttcgaggaagctgctgcagaagtgcctagtcctgactccgaagtgagttcttactcctccaagtatgcgcctcacagttggccagaatccaggctggagtctaaggccaggaagttagttcaactgttcctgttaatggactctactaagctgcctatacccaaaaagggtattctgtactatattgggcgagagtgctccaaagtgttccctgacctgctgaatcgtgctgcccgcacccttaaccacgtgtacggaacagagttggtagtcctcgacccccgaaaccactcctacaccttatacaatcgcagggagatggaggaaaccgaggaaattgtggacagcccaaatagacccggcaacaatttcctcatgcaggtactgagtttcattttcatcatggggaaccatgctagggaatcagccgtctgggctttccttagaggactaggcgtacaagcgggaaggaagcatgttatcacatgccgatatctctcccagcgttacatcgattccctgcgtgtaccagatagcgatcccgtccagtatgagttcgtatggggaccccgggcacgactggagacatccaaaatgaaggcccttagatatgtcgcccgcatacatagaaaagagccacaggattggccccagcaatatcgcgaggccatggaagatgaggccaaccgcgccgacgtcgggcatagacagatcttcgttcacaactttcgttag

SEQ ID NO: 123917 - DNA, 1572 bp, synthetic construct
  misc_feature 1..1572: note = Description of Artificial Sequence: Synthetic coding sequence
  source 1..1572: mol_type = other DNA
atgagtctcgtcagtcagaatgcccgtcattgttccgccgaaatcactgcggactatggtgatgggcgcggagaaatccaggcaactaacgcatccgggtctccaacaagtatgttagtggtggacgcaccccaatgtccgcaggcgcccattaattcccaatgtgtcaatacctcacaagcagtccaggaccccaatgatttagaagtcctaatcgacgagcaatctcggcggctgggtgctctccgtgtgcacgaccctttagaggacagatctatcgccctggtgaatttcatgcgcatgaagtcgcagactgaaggatccatccagcagagcgagatgctggaatttctccgtgaatatagtgaccagtttcctgaaatcttaagacgtgcctccgcccacctggatcaagttttcgggcttaacctgcgcgttatcgacccccaagcagacacgtacaacttggtgagtaagagggggttccagatcacagaccgcatagccgaatccttggacatgcctaaagcaagtctcctcgccctcgtcttggggcatatcctgcttaacgggaaccgagcacgggaagcttccatttgggacctacttctaaaggtggatatgtgggataaaccccaacgcatcaataatctgtttggtaacacccgcaatcttttgaccactgacttcgtgtgcatgcggttcctggaatattggcctgtatatgggactaacccgctcgagtttgagtttctttggggctcaagggcacatcgggagatcaccaagatggaggccctgaagtttgtgagtgacgcccacgatgaggaaccttggtcttggccagaggaatacaacaaagccctggaaggcgacaagacaaaggaacgaagcttgacagcgggtctcgaattctggagcgaggatacgatgaacgacaaggctaacgatctagtgcagctggcaatctcagtcactgaagaaatgctgcctatccatcaggatgagctcttggctcatacaggaaaggaatttgaggacgtctttcctaatatcctgaaccgagctaccctgatacttgacatgttctatggcctgtcactcatagaagtggacacatctgaacacatctaccttctggttcagcagcctgaatccgaggaggagcaggtgatgctagagtcactaggccgcccgactcaggagtacgtaatgccgatcctcgggctgatctttctcatggggaatcgagttaaagaagccaatgtgtggaatctgttgcgacgattttcagtggacgtaggccgcaaacatagcattacacgaaaactgatgcgtcaacggtatctcgaatgccggccgcttagttatagcaatccagtggagtatgagctgctatggggccctcgggcacaccacgagaccatcaagatgaaagtgctcgaatacatggctcggctatatcgcaagaggcctcagaactggcctgagcagtaccgtgaggcagtggaggacgaggaggcgcgagccaagtctgaagccactataatgttcttccttgatccaacatag

SEQ ID NO: 123918 - DNA, 924 bp, synthetic construct
  misc_feature 1..924: note = Description of Artificial Sequence: Synthetic coding sequence
  source 1..924: mol_type = other DNA
atgttgcagacaccagaatcaagagggctgcccgtgccccaggctgagggagaaaaggacgggggccatgatggggagacaagagctccaaccgcgtcacaggagcgcccaaaagaagagctcggggccggtagagaggagggagccgctgaacctgctcttaccaggaagggcgcccgtgccctggctgcaaaagctctggctaggcgcagggcctacaggcgactcaaccggacagtagccgaactggtgcagtttctgctggtgaaagacaaaaagaagtctccaatcacacggagtgaaatggtgaaatacgtgatcggggaccttaaaattctgttccctgacattattgctcgcgcagccgaacatctccgctatgtcttcggcttcgagctgaaacagttcgaccgcaagcaccacacatatattcttataaacaaacttaagcccctggaggaagaagaagaggaggaccttggtggtgacgggccaagactgggactcttgatgatgatcctgggccttatttacatgcgaggcaattccgcccgcgaggcccaagtgtgggaaatgttgagaaggttgggagtccaacccagtaagtaccatttcctttttggctacccaaagaggctgatcatggaagactttgtgcaacagcgatatctcagttatcgccgtgtgccccatactaaccctcctgagtacgaattttcctggggtccacgcagcaacctggagatcagtaaaatggaggtgctgggattcgtggctaaactgcacaaaaaggaaccccagcactggcccgtgcagtatcgggaggcactcgcagatgaggccgatcgtgcgagggccaaggctagggcggaggcaagtatgcgggcgagggccagcgctagggctggaattcacctctggtag

SEQ ID NO: 123919 - DNA, 396 bp, synthetic construct
  misc_feature 1..396: note = Description of Artificial Sequence: Synthetic coding sequence
  source 1..396: mol_type = other DNA
atggctcggtctctggtgtgtctgggcgtgataatccttctcagcgcttttagtgggcccggcgttagaggaggacctatgccgaagctggccgatcgaaagctgtgtgccgatcaggagtgttctcatcctatctccatggctgtcgctctgcaggattacatggctcctgattgtcgcttcctcacaattcacaggggccaagttgtgtatgtattcagcaagctaaagggtaggggcagactgttctggggcggatccgtccagggcgattattacggggacctggctgcgcgcctgggatactttccaagttcaatcgttagggaggaccaaaccctgaaaccgggcaaggtggatgtgaaaacagataagtgggacttctattgtcagtag

SEQ ID NO: 123920 - DNA, 642 bp, synthetic construct
  misc_feature 1..642: note = Description of Artificial Sequence: Synthetic coding sequence
  source 1..642: mol_type = other DNA
atggctgagacatacgactttctttttaagttccttgtgattgggagcgctggaaccgggaaatcatgcttactgcaccagttcattgaaaataaattcaaacaggacagcaatcatactattggggtggagttcgggagccgcgtcgtgaatgtgggcggcaaaacagttaagttacagatctgggatacagctggacaggaacggttcaggagtgtgacccgcagctattatagaggagccgccggcgcgcttctcgtgtatgacatcacctcacgtgagacctataactcgctagccgcttggctgacggacgccagaacactcgcctcccctaatatcgttgtcattctctgcggaaacaagaaggacttggatcctgaaagagaggtaacgttcttagaggcaagccggtttgcccaagaaaatgaactgatgttccttgaaacaagtgccctgacaggcgaaaatgtggaggaagcattcttgaaatgcgcccgaacaattctgaataagattgatagtggggaactggaccccgagagaatgggatcagggatccagtatggggacgcctcacttagacagcttcggcagcccagatctgcacaggccgtcgctcctcagccatgtgggtgctag

SEQ ID NO: 123921 - DNA, 366 bp, synthetic construct
  misc_feature 1..366: note = Description of Artificial Sequence: Synthetic coding sequence
  source 1..366: mol_type = other DNA
atggcggagacttatgactttttgtttaagttcctcgtaattggcagcgcaggtactggcaaatcttgtctattacatcagttcatcgagaacaagttcaagcaggactccaatcatactattggcgtggagtttggctcacgagtggttaacgttggtggcaaaaccgtgaagttgcagatctgggataccgccggacaagagcggttcaggtcagtcacccggagctattaccgtggtgccgcgggagccctcttagtttatgacatcactcgagctgatgttcctggggatcaacggagtcataggagggagcgcggagggggagtgccccaagtgtgtcctcactacccacaacaggactag

SEQ ID NO: 123922 - DNA, 396 bp, synthetic construct
  misc_feature 1..396: note = Description of Artificial Sequence: Synthetic coding sequence
  source 1..396: mol_type = other DNA
atggctcgctcattagtctgcttgggggtgataatcctgctcagtgcctttagcgggcctggcgtgaggggcgggcccatgcctaaactggcagataggaagctctgcgccgatcaagagtgttcccaccctatcagcatggcagtcgccctgcaggactacatggctccagactgccgctttctgacaattcatagaggtcaggtcgtttacgtgttttcaaagctgaaggggcgcggccgactgttctggggcggcagcgtgcaaggtgactattatggcgacctcgccgcccgtctgggctactttccatcttccatagtgcgcgaagaccagaccctaaaaccaggaaaagtagatgtcaaaactgatactagttcatccaacagctggtag

SEQ ID NO: 123923 - DNA, 2358 bp, synthetic construct
  misc_feature 1..2358: note = Description of Artificial Sequence: Synthetic coding sequence
  source 1..2358: mol_type = other DNA
atggatagcgtccccgcaaccgtgccttcgatcgcagccacccctggcgatcccgagctggtcgggcctttgagtgttctctacgctgcttttatagccaagctgcttgagctggtggcaacgctgccggacgatgtccagccaggccccgatttctacgggctcccctggaagcccgtctttatcacggccttcttgggaatagccagctttgcaatctttctttggaggaccgtcttggtcgtaactgacactctagtgtccgtcaccgagcagcagatctctgaaaaattaaagacaataatgaaagagaacactgagctcgttcaaaagctttcgaactacgaacagaaaatcaaagagtctaaaaagcacgtacaggagacacgcaagcagaacatgatcctgagcgacgaagccattaagtataaagacaaaattaagacactggaaaaaaaccaggagattctcgatgataccgccaagaacttgagagttatgctggaatcagagcgtgaacagaacgtaaaaaaccaggacctgatctcagaaaataagaaatcaatcgaaaaactcaaggatgttatatccatgaacgcatctgaattcagcgaggtgcagatcgctttaaacgaagcaaagttgtcagaagaaaaggtcaaatctgaatgccaccgcgtgcaggaagagaacgctaggcttaagaaaaaaaaggaacagctccaacaggaaatcgaagactggagcaagctgcatgcggagctgtcggagcagattaagagttttgagaagagccagaaggatctcgaagttgcattgactcataaggatgataacattaacgccctgacaaactgcattactcagctgaacctcctagagtgcgaatccgagtctgaggggcaaaacaagggaggtaatgactcagatgaactcgccaacggagaagttgggggtgacagaaatgaaaagatgaaaaaccaaatcaaacaaatgatggatgtgtccagaacccaaacggctatcagcgtggtggaggaagatctcaaactgctgcagttgaagctcagggcttctgtctctaccaagtgtaacctggaagatcaggtgaaaaaactggaagatgataggaactccttgcaggccgctaaggctggactggaagacgagtgcaaaacgttaagacagaaggtggaaattctgaacgagttatatcagcaaaaggaaatggccctccagaagaaactgagccaggaggagtacgagcgccaagagagagagcatcggctatcagccgccgatgaaaaagctgtgagcgctgctgaggaggtgaaaacatataagagacggatcgaggagatggaggatgaactgcagaagaccgagagaagcttcaaaaaccaaattgcaactcacgaaaagaaagctcacgaaaattggcttaaggctcgcgcggcagaacgtgcaatcgcagaggagaaacgagaagccgcaaacctcagacacaaactgttagaacttacacagaaaatggctatgctgcaggaagaacctgtgatagtcaagcccatgcccggaaagcccaatactcagaatcccccacggcgcgggccactttcccagaatggatccttcggccccagccctgtgagtggaggcgagtgctccccaccgctcacagtggaaccccctgtcagaccactgtccgcgactctcaataggagagacatgccacgcagtgaattcggctcagttgacgggcctctgccacacccccgctggagtgcagaggcgtccggaaagccgtctcccagcgatccagggtctggcaccgccactatgatgaatagctcgagcaggggttcctctcctacccgcgtgctggatgagggtaaagtaaatatggcacctaaaggacctcctccatttcctggagttcccctgatgtccactccaatgggcggaccagtcccccctcccatcagatatggacctcccccacagctgtgcggcccttttggccctaggcctttgcctcccccttttggacctgggatgaggccgcctctcggcctgcgggagttcgcccctggggtcccgccaggtagacgagatttgccactgcatcctagaggcttcctacccggtcacgcccccttcaggccgcttgggtctctgggtccacgcgaatattttatcccaggcacacggctgcctccccccacccatggcccacaggagtacccacctccccctgccgtgcgtgaccttctaccttccggctctagggatgagccgccgcctgcaagtcagtctacttcacaggactgctcccaggcgctgaagcagtcgccttag

SEQ ID NO: 123924 - DNA, 5547 bp, synthetic construct
  misc_feature 1..5547: note = Description of Artificial Sequence: Synthetic coding sequence
  source 1..5547: mol_type = other DNA
atggccgccgctcccggacttcttgtgtggctgctggtgctccggctgccttggcgggtgcccggtcagctggacccgtcaacgggaagacggttctccgaacataagctgtgcgccgatgatgagtgtagcatgctgatgtacaggggagaggcgctggaggatttcactggccctgattgccggtttgtcaacttcaaaaaaggcgacccggtttacgtttattacaagttagcccgtggatggcccgaggtctgggcgggtagcgttggacgtacttttggatacttcccaaaggatctgatccaggttgttcacgagtacaccaaggaagaattgcaagtgccgactgatgaaacagactttgtgtgttttgatggagggcgggatgatttccacaattataacgtcgaagagctcctgggctttctggagctctataattctgctgctacagattctgaaaaagctgtggagaaaactctgcaggatatggaaaaaaaccccgagctttccaaagagagggaacccgaaccagagccggtggaggcaaactccgaagagtccgactccgtgttttcggagaatacagaggaccttcaggaacagttcaccacacagaaacatcattcccacgccaatagccaggccaatcacgcccaaggtgagcaagcatcttttgagtccttcgaagagatgctccaagacaaacttaaagtgcctgaatccgagaacaacaaaacaagtaattcctcacaagtcagcaacgaacaagacaagatagatgcatataaactgttgaagaaagaaatgacgttggatctgaaaactaagttcggatctaccgctgatgccttggtatccgacgatgagacgactagactcgtgacgtccctcgaggacgattttgacgaagagttagacactgagtactatgctgtcggtaaagaggatgaggagaaccaggaagactttgacgaattgccgctgttaaccttcacagatggagaggacatgaagacaccagcgaagagtggagtggagaagtatcctactgacaaggagcagaactctaatgaggaagataaagtgcaactaaccgtgcccccagggattaaaaatgatgataagaatatccttacgacatggggtgataccatcttttccatcgtgaccggtggcgaggaaacgcgtgataccatggacctggaatcatctagctccgaggaggagaaggaggacgacgacgatgcgctcgtaccggattccaaacaggggaaaccccagagtgccacagattatagcgatcccgataacgtcgatgatggcttgtttatcgtcgacatcccgaagactaacaacgacaaggaggtgaatgccgaacaccacattaagggaaagggcaggggcgtgcaggaaagcaagcgagggttggtccaggataaaactgagcttgaggatgaaaatcaggaaggaatgacagtgcacagtagtgtgcactcaaacaacctcaacagcatgcccgccgctgaaaaggggaaagacacgctcaagagtgcgtatgatgatacagagaacgacttgaaaggggctgcaatccatatttctaaggggatgctccacgaggagaaaccaggcgagcagatacttgaaggggggtccgagagtgaaagcgcacagaaagcagcggggaaccaaatgaatgatagaaagatccagcaggagtctctggggagtgctcccctgatgggagatgatcatcctaacgcctctagggacagcgttgaaggtgatgccctggtgaatggcgctaagctgcacactctgtctgtggaacatcagcgggaggagctgaaagaggagctggtgctcaaaacccagaatcagcctaggttctcatcccctgacgagatagaccttccgcgcgaattagaggatgaggttcccatcctcgggaggaacctgccatggcaacaggaacgggatgtggccgctacagccagtaaacagatgtccgagaagatccggctgagtgaaggagaggcaaaggaagattccctcgatgaggagtttttccatcacaaggcaatgcaaggcaccgaggtggggcagacagaccagaccgattcaacgggaggaccagcctttttgtctaaggttgaagaagatgactacccctccgaagaactcctggaggatgaaaatgcaatcaacgcgaagcgaagcaaggagaaaaaccctggtaatcagggtaggcagttcgatgtgaatcttcaggtgccagatagggccgtgcttggtacaattcacccagatccagagattgaggagtccaaacaggaaacctcgatgatcttggactccgagaagaccagcgagacggccgccaagggcgttaatacgggtggcagagaacctaatacaatggtagaaaaggagaggcctctcgcagacaaaaaggcccagaggccattcgaacggtcagacttttccgattccattaagattcagacacctgagctgggcgaagtgtttcagaataaagactcggactaccttaaaaacgacaatcccgaagagcacctcaaaacatcaggcctggccggcgaaccagagggggagttatcaaaagaagaccacgagaatacggagaagtatatgggaacagaatctcaaggcagcgccgccgccgagccagaggatgactcttttcactggacccctcacacgtcggtggaacctgggcatagtgacaagcgcgaggacctgcttattatttccagtttttttaaggaacaacagtccctacagagatttcagaagtactttaatgttcatgagctggaagctctgctccaggagatgagctccaaattaaaatccgcccagcaggagtcactaccatataatatggaaaaagtgctcgacaaagtttttagggcctctgagagtcaaatcctgtctattgctgagaagatgctagatactagagttgcggagaaccgcgacttgggaatgaatgaaaataatatttttgaagaagccgctgtgctggacgacattcaggatcttatctactttgtgaggtacaaacattccactgccgaggagactgctacattagtgatggccccccccctggaagagggtctgggaggcgccatggaagagatgcaaccattacatgaggacaatttctcaagggagaaaacagcagaactcaacgtccaagttcctgaggaacccacgcacctcgaccagcgcgtcataggcgacactcacgcttccgaggtttcgcagaaaccaaatactgagaaagatctcgatccaggccccgtcactaccgaagacacgcccatggatgctattgatgccaataagcagccagagactgccgccgaggaacctgcttcggttacccctctcgagaacgcaatcttgctgatctacagcttcatgttttatctgaccaagtctttagttgctaccttgcctgacgatgtgcagccgggccctgacttctatggccttccctggaaacctgtattcataacagcattcctcggaattgcttctttcgccatctttttatggaggaccgtgcttgtcgtctctaatactgtgtattacgtgaccgagcagcaaatttccgaaaagctcaagacaatcatgaaagagaacactgagctggttcaaaagctgagcaactatgagcagaagattaaggagagcaagaagcatgtgcaagaaacaaggaaacaaaatatgatacttagcgatgaggcaattaagtacaaagacaaaataaagacgctggagaagaatcaggaaatcctggatgacaccgctaagaatcttcgggttatgctcgagagtgaaagggagcagaacgtgaaaaaccaggacctgctccagcaagagattgaagattggtcaaaattacacgctgaactgtcagagcagatcaaatcctttgaaaaaagtcagaaggatttagaggtggccctcactcacaaggatgataacataaatgccctgacaaattgtataacccagctcaatctactggaatgcgaaagcgaatcagaggggcagaataaagggggaaacgacagcgatgagctggcgaacggggaggtagggggcgatcggaacgagaaaatgaagaatcagatcaagcagatgatggacgtttctcggacacagactgctatatcagtagtcgaggaagacttaaagctgctccagttgaagttacgggcaagcgtgagtacaaagtgtaatcttgaagatcaggtaaaaaaactcgaagacgacagaaactccctgcaggcggctaaggctggactagaggacgaatgtaaaacgcttagacagaaggtggagatattgaatgagttgtatcagcagaaagagatggccttacaaaagaagctgtctcaggaagaatatgagagacaggaacgggagcatcggctgagcgctgctgacgagaaagcagtttcagccgctgaggaagtgaaaacttataaaagaaggatcgaagagatggaagatgagctgcagaagaccgagcgatcgtttaagaatcagatcgccactcacgagaaaaaagctcacgaaaactggctgaaggcccgggccgccgaaagggcaatagccgaggaaaagagagaggccgccaatctgcggcacaagctacttgagttgacccagaagatggctatgctccaggaagagcctgtgatcgttaagcctatgcctggaaagcccaacacacagaatccaccccgtcgggggcccctttcgcagaatggcagcttcgggccatccccagtcagtggcggcgagtgcagcccacccttaaccgtcgagccccccgtgcggcccctgagtgctacactgaaccgtcgggatatgcccagaagcgagttcggtagtgtcgatgggcctctccctcatcccagatggagtgcggaggccagtgggaagccaagccctagcgaccctggatccgggactgccaccatgatgaattcatcttctcgcggtagttctcctactagggtactggatgagggcaaggtcaatatggcgccaaaaggccctcctccgtttcctggcgtacccctgatgtcgacccccatgggcggaccagtgccccctcccatcaggtacggaccccccccacagctgtgcgggccttttggaccaagacccctgcctcctcctttcggcccaggtatgagaccacctcttgggctcagggagtttgcccccggtgtgccgcctgggcgtagggaccttcccctgcacccacgcgggttcttgcctgggcacgctccattcaggccactgggcagcctgggtccgagggaatatttcattcctggcacacgtttgcctccacccacgcacggacctcaggagtaccctcccccacccgccgtccgcgaccttctgccttcgggtagccgggatgaacccccacccgcttcgcagtctacctctcaagattgttcccaggcattgaaacagtccccttag

SEQ ID NO: 123925 - DNA, 2358 bp, synthetic construct
  misc_feature 1..2358: note = Description of Artificial Sequence: Synthetic coding sequence
  source 1..2358: mol_type = other DNA
atggacagcgtacccgctacagttcccagcatcgctgctactccgggtgaccctgagctcgttggacccttatcggttctgtacgctgcatttattgcaaagctgctcgagctggtcgccaccctgcccgatgatgttcaaccaggccctgatttctacgggctgccttggaaacccgtcttcatcactgcttttcttggcatagcctctttcgccatctttctgtggcggacagtgctggtggttaaggatcgcgtctaccaggttacggaacagcagatcagcgaaaagcttaaaaccattatgaaggagaatacggagctggtccagaagctgtccaactatgaacagaagattaaggaaagcaaaaaacacgtccaggagacaagaaagcagaacatgatcctcagcgacgaagccatcaagtacaaagacaaaataaagacgttagaaaaaaaccaggaaatattagatgacactgcaaagaacctgagagttatgctagaatctgagcgcgaacaaaacgtgaaaaaccaggatctgatatctgaaaacaagaagagcatcgagaagttgaaggacgtcatctctatgaacgcctctgagttcagcgaagtccaaattgctctgaatgaggctaagcttagcgaggaaaaggtgaaatccgaatgccaccgcgtgcaggaagagaacgcacgtcttaagaaaaaaaaagaacaattgcagcaggagatcgaagattggagcaagctgcatgccgagctgagcgagcagatcaagtcattcgagaagagccaaaaggatttggaggttgctcttacccataaagatgacaacattaacgcactgacgaattgcataacgcagcttaaccttcttgagtgtgagtcagagagtgaaggccagaataaaggcggtaacgactctgatgagctagccaatggtgaggtgggaggcgatcggaacgagaagatgaagaaccagattaagcagatgatggatgtgagtcgtacccagaccgctatttccgtggtggaagaggacctgaagctcctgcaactcaaacttcgcgcgtctgtgtcaacaaagtgcaatctggaagaccaggttaaaaagttagaggatgaccggaattccctgcaggctgccaaggctggattagaagatgagtgtaagaccctcagacaaaaggtcgaaattctcaatgagctgtatcagcaaaaggaaatggcgctgcagaagaagctctctcaggaggagtatgagaggcaggaacgggagcatcgcctgagtgcggccgacgaaaaggctgtcagcgctgcggaagaggttaaaacatataaacgtaggatagaagaaatggaagacgagctgcagaaaacggagcggagctttaagaatcaaatcgccacccatgagaagaaggcccatgaaaattggttgaaggcccgggcggccgaacgggccatcgcagaggaaaagagggaggctgccaacctgcggcataagttgttggagctgacccagaaaatggccatgttacaggaggagccagtaattgtgaaacctatgccagggaagcccaatacgcaaaacccccctagacgggggcctctgtctcagaatggttccttcgggccatcccctgtctcgggcggcgagtgcagtcctccacttacagtggagccacctgtcagaccccttagcgccactttaaacaggcgggacatgccaagatccgaatttggcagtgtagacggcccgctgcctcatcctagatggagtgccgaggcgagcggaaagccatctccctcagacccggggtccgggactgccacaatgatgaactcttcctcccggggaagctcgcccactcgagtgctggacgaggggaaagtcaatatggctcctaaagggcctccaccattccccggagttcctttgatgagcactcctatgggtggccccgtgccacctcctataaggtacggaccccctccacaactgtgtggtccttttggacctcgtcccctgcctcccccatttggccctggtatgagacctcctttaggactaagggagttcgcccccggtgtgccacccggaagacgagacttaccccttcacccacgcgggttcctgccaggccacgcaccattcagaccactgggttcccttggacctcgtgaatactttattcctggtaccaggctaccacctcccacacatggaccacaggagtaccctcctccgcccgccgtaagggatctgctcccctccggaagccgagatgagccccctcccgcctcgcagtctaccagccaggattgcagtcaggccttaaagcagtccccttag

SEQ ID NO: 123926 - DNA, 5724 bp, synthetic construct
  misc_feature 1..5724: note = Description of Artificial Sequence: Synthetic coding sequence
  source 1..5724: mol_type = other DNA
atggcggctgccccagggctcctggtgtggcttctcgttctgaggctcccttggagagttccggggcagttggacccctctaccggaaggagattttcagaacacaagttatgcgctgacgacgaatgcagcatgctgatgtataggggagaagcactcgaggacttcaccggccccgactgtaggttcgtaaactttaaaaagggtgaccctgtgtacgtctattacaaacttgccaggggctggcctgaggtctgggccggaagcgtggggcggacctttggctacttcccgaaagatctcatccaagtggtgcatgagtacacaaaggaagaacttcaggtaccaaccgatgaaacggattttgtatgcttcgacggtggtcgggatgacttccataattataatgtagaggaactgctgggttttcttgagctgtacaattcggccgccaccgactcagagaaagccgttgagaaaactctgcaggacatggaaaaaaatccagagctgagtaaagaacgggaacccgagccagagccagtagaagccaattcagaagagtccgatagtgtgttcagcgagaataccgaggatctgcaggaacagtttaccacccagaagcatcattcccatgcgaactcacaagctaatcatgcccagggcgagcaggcaagttttgagtcgtttgaggaaatgctacaggacaagcttaaggtccctgagagcgaaaacaataagacatcaaactcctctcaagtgtccaacgagcaggacaaaatagacgcatataagttacttaaaaaagagatgactttggacttgaaaacaaagtttggttccacggctgatgccctagtctccgatgacgagaccaccagactagtgacttccttggaggatgatttcgacgaagagctggacaccgaatactacgcagtgggcaaagaagacgaagagaatcaagaggacttcgatgaattgcctttactgacattcaccgatggcgaggatatgaagactccggcgaaaagtggcgtggagaagtatcctaccgataaagagcagaactccaacgaggaggacaaagtgcagctcacagtcccccctggcataaagaatgatgacaagaacatactcaccacatggggtgataccatcttttcaatcgtcacaggtggggaggagactagagacaccatggacctggagtcttcatcttctgaagaggaaaaggaggatgacgatgatgcacttgtccccgacagtaaacagggtaaaccccagagtgctacagactacagcgacccagataacgtcgatgacggcttgtttattgtcgacatacccaaaacaaataacgacaaagaggtaaacgcggagcaccatatcaagggcaaagggcgaggggtgcaggagagcaagaggggcctagtgcaagataagacggaattggaggatgagaatcaagaaggtatgacggttcactcaagcgtccatagtaataatctcaactcaatgcccgcggccgaaaagggcaaagacactctgaagtctgcctacgatgatactgagaacgacctcaaaggggcggcaatccatattagtaagggtatgcttcacgaggagaagcccggcgagcaaatccttgaaggaggatctgaatccgagtccgcccagaaggctgcaggaaaccagatgaatgataggaagattcaacaggaatctctgggttccgcaccacttatgggagatgaccacccaaatgcatccagagacagcgtggagggcgacgccctcgttaatggagcgaaactgcacacactgtctgtggagcatcagcgtgaggagttgaaagaggaattagtgctgaaaacccaaaatcagcctcggttttcatctcctgatgagatcgaccttccgagagaactggaagatgaggtgcctatacttggccgcaatctcccttggcagcaggaaagagacgtggccgcaacagcaagtaagcaaatgagcgagaagatccgcttgtccgaaggcgaagcaaaggaggactccttggacgaagagtttttccaccacaaagccatgcagggaaccgaggtggggcaaacggaccaaacagatagtacaggaggacccgcctttctcagcaaggtggaggaagacgattatccctcagaggaactcctggaggatgagaacgcaataaatgctaaacggagcaaggaaaaaaaccctggtaaccaggggagacagttcgatgtgaatttacaggttcccgacagggctgtgctgggaaccatacatccagaccctgaaatagaggagtctaaacaagaaacctctatgatattagactctgagaaaacatccgaaaccgccgcaaagggtgtgaataccggtggccgtgagcctaatacaatggtggagaaagagcgcccgttagccgataaaaaagcccaaaggcctttcgaacgatcagacttctcagactcaattaagatccagacacctgaactgggtgaggtctttcagaacaaggactcggactacctcaaaaacgacaatcctgaggagcacctgaaaacttcaggtttagccggggaacccgaaggggaactgagcaaggaggaccacgaaaacacggaaaagtacatgggaaccgagtctcaggggagcgctgctgccgagcccgaagacgattcatttcactggactccgcatactagcgtagaacctgggcactccgataagcgagaggacctcctgattatctcgtccttttttaaggagcagcagtctctacagagattccagaaatactttaacgtgcatgaattggaagcactgcttcaggagatgtcaagtaaattaaagagtgcccaacaagaatccctgccttacaatatggagaaagtgctggataaagtgttcagagcatcagagagccagatcttatccattgccgaaaagatgttggacacccgagttgccgagaatcgagatctcggtatgaatgaaaataatatcttcgaagaggcggccgtcctcgatgatatccaagatttgatatattttgtgagatataaacattctacagcagaggagactgccaccctggttatggcaccgccactagaagaaggactgggaggcgcaatggaggagatgcaacctctgcacgaggataatttttcgagggagaagacagccgagctcaacgtgcaggtccccgaggaaccaactcatttggaccagagggtaattggtgatacccacgcttcagaggtgtcccagaagcctaacacagagaaagatctggatcctggacctgtgaccacagaggatactcctatggacgctatcgacgccaataaacagcctgagacagccgcagaggaaccagccagcgtcaccccactggaaaacgcgattctgctgatatattctttcatgttctatctaactaagtcactggttgcaacactccccgacgacgtccaaccaggacctgacttctacggcctgccttggaagcctgtattcattacagctttcttaggcattgctagcttcgctattttcctatggcgcacagtgctcgtggtgagtaacaccgtgtattacgtgaccgaacagcaaattagcgaaaagctcaaaactatcatgaaagagaacactgaactcgtgcagaagctgtctaactacgagcagaaaataaaggaatccaaaaaacacgttcaagagacccgaaaacaaaatatgattctgtcggacgaggccatcaagtataaggataagattaagaccctggaaaaaaaccaagaaattctggatgacactgccaagaacctgcgcgtgatgttagagtctgaacgagagcagaatgttaagaatcaggacctgatatctgagaataagaaaagtattgagaaactgaaagacgttattagtatgaatgccagtgaatttagtgaggtgcagattgccctgaacgaagcgaaactctccgaggagaaggtgaagtctgaatgccatcgcgtgcaagaagaaaacgcacggctgaaaaaaaaaaaggaacagctccagcaggagattgaggactggtctaagctccatgcagagctgtccgagcagattaagtcattcgaaaagtctcagaaggatctcgaggtggcgctcacccacaaggacgataatattaacgcgcttaccaactgtatcacacagttaaacctgttggaatgtgagtcagagtcagaaggtcagaacaagggcggtaatgactcagatgagttggcgaatggggaggtcggtggagaccggaacgagaaaatgaaaaaccagatcaaacagatgatggacgtctcgaggactcagaccgccataagcgtcgtagaagaagacttgaaactgctccaacttaagctccgggctagcgtttctaccaagtgcaatctggaagatcaggttaaaaaactggaggacgatagaaacagcctgcaagctgccaaagccggcctggaagatgaatgcaaaactcttaggcagaaagtggagatcctgaacgaactttaccagcagaaggaaatggctctgcagaagaagttgagtcaggaggagtacgagagacaggagagggagcacaggctcagcgcagctgacgagaaggccgtgagtgccgctgaagaggtgaagacgtacaagaggaggattgaagagatggaggacgagctccagaagactgagcgctctttcaagaaccagatcgccacccacgagaagaaggcgcacgaaaactggctgaaagctcgagcagccgagagggcaattgcggaggaaaagagggaggcggccaacctcagacacaaactgctggagctaactcagaaaatggccatgctgcaagaagaacctgtgatcgttaaacccatgccaggcaaaccaaacacccaaaatccccctagacgggggccactctcacagaatggatcgtttgggccctctcccgtgtcaggcggggagtgcagcccccccctgactgtggagcccccggtgcggccactgagtgctacactgaatcgacgggacatgcctaggtccgaattcggcagtgtagatggtcctttgccccaccctcgctggtctgccgaagcaagtggcaagccgagtccatctgatccagggagcggcacagccacaatgatgaattcctcatccagaggaagctcacctacccgggtactagacgaagggaaggtcaacatggccccaaagggcccccctccctttccgggtgttcccctgatgtcaacacccatggggggacccgtgcccccccctattaggtatggccctcccccgcagttgtgtggcccattcggtccacgtcctttgccccccccctttggtcccggcatgcgccccccactgggcctgagagaattcgcacccggcgtgccccctgggagacgcgacctgccattgcatcctcgggggttcctccccgggcatgccccattccggcccctcggatcactgggccctcgggagtattttattcctggcaccaggctaccaccccctacccatggccctcaggagtatccacctccccctgccgtccgggacctgctccctagtgggtcacgcgatgaacctccaccagcctcgcagtctacttctcaggattgcagccaggccttgaagcaatccccatag

SEQ ID NO: 123927 - DNA, 1503 bp, synthetic construct
  misc_feature 1..1503: note = Description of Artificial Sequence: Synthetic coding sequence
  source 1..1503: mol_type = other DNA
atggccgcggccccgggtctgttggtttggctgctcgtgttgaggctgccctggagagtcccaggccaactcgatccaagtactggaaggcgcttctccgagcacaaactgtgcgccgacgacgaatgttctatgctcatgtaccgcggcgaagcactggaagacttcactggtcctgattgccgattcgtcaatttcaaaaaaggagaccccgtgtacgtgtattacaaactcgctcgaggttggccagaggtatgggccgggagcgttgggagaaccttcgggtattttccgaaggatctgatccaggtggtacacgaatacacaaaggaagagttacaggtcccaacagacgagactgactttgtttgttttgacggcgggagagacgactttcataattataacgttgaagaactgctgggctttctcgagctctacaattcagctgcaactgattccgaaaaggccgtggagaaaactctacaagacatggagaagaatcctgagctcagtaaggagcgggaacccgaacctgaacctgtcgaggcaaactctgaagaatcagatagcgtgttttccgaaaacaccgaggacctccaggagcaattcactacacaaaagcaccacagtcatgctaatagtcaggctaatcatgcgcaaggcgaacaagcttcctttgagagttttgaagagatgttacaagataagctgaaagttcctgaatccgagaacaacaagacatccaactcatctcaagtctcaaatgagcaagataagattgacgcctataagttgttaaaaaaagagatgactttggacctgaaaactaagttcggttcaactgcggatgccctggtgagcgacgatgaaacaactcgacttgtcacaagcctcgaggatgattttgatgaagaactcgatactgagtattacgcagtcggcaaagaggacgaagaaaaccaagaagactttgatgaactacccctactgacgttcacagatggcgaggacatgaaaacgccagcaaagtcaggcgtggagaagtaccctaccgataaggagcagaactccaacgaggaggacaaggtgcagctcactgtccctcccgggattaagaatgacgacaagaacatcctcacaacatggggagataccatattttccatcgtgacgggcggagaagagacgcgcgacactatggatttggagtcatcgtctagtgaagaggagaaggaggatgacgatgatgctctggtacctgattctaagcaggggaagcctcaatcagctactgactactctgaccctgataacgttgatgacggtctatttatcgtcgatattccaaagacaaacaatgacaaggaggtcaatgctgaacaccacattaaaggtaagggacgcggtgtacaggaatccaaacgcggcctggtgcaagataagactgaattggaggacgaaaatcaagagggtttcaaaaccgaacctatcaagttgtag

SEQ ID NO: 123928 - DNA, 5724 bp, synthetic construct
  misc_feature 1..5724: note = Description of Artificial Sequence: Synthetic coding sequence
  source 1..5724: mol_type = other DNA
atggcagcggccccaggccttctggtgtggttacttgtactgcgcctcccatggcgagtgcctgggcagctggacccttctaccgggcgaaggttctccgagcataagctctgtgctgacgatgagtgcagtatgctgatgtatcgaggggaagctctcgaagattttaccggacccgactgtcgcttcgtgaactttaagaagggtgatcctgtctatgtgtactacaagttggcacggggctggcctgaagtctgggcgggtagcgtgggaagaacgttcggctattttcctaaggacctgatccaggtcgttcatgagtatactaaagaggagctgcaagtgcctaccgacgagacggactttgtttgcttcgacggaggccgggacgatttccacaactacaacgtcgaggagctactggggttcctggagctgtacaatagcgccgctacggatagcgagaaggccgtcgaaaagacactgcaggacatggagaaaaatccggaactgtctaaggaacgcgagcccgaaccggagcctgtggaggctaacagcgaggagtcagactctgtcttctccgaaaataccgaggatctgcaggagcagtttacaacacagaaacatcacagtcatgcaaacagccaggcaaaccacgcccagggcgagcaggcaagttttgagagcttcgaggagatgttgcaggacaaactaaaggtgccagagtccgaaaacaataaaacctctaattccagccaggtaagcaacgagcaagataagattgacgcatacaaactgctgaagaaagaaatgacacttgacctgaagacaaaatttggcagcactgccgatgccttggtgtctgatgacgaaactacccgactcgtgacatcactggaagatgacttcgacgaggagctagacacagagtactacgccgtgggtaaagaggacgaggagaaccaggaggactttgacgagctacctctactaacatttacggatggcgaggacatgaaaacacctgccaagtccggtgtcgaaaagtatcctacggataaagagcagaacagcaacgaggaggataaggtgcaactcaccgttccacctgggattaagaacgatgataagaatattctgaccacatggggtgataccatcttctctattgtcaccgggggagaggagacaagagataccatggacctcgaaagttcttctagcgaggaggaaaaagaagatgacgatgatgctctggtacctgactccaagcaagggaaacctcagtctgcaacagactacagcgaccctgacaacgtggatgacggattgtttatcgtcgatatcccaaagacaaacaacgacaaggaggttaacgccgaacatcacataaaaggaaaaggcaggggcgttcaagagtctaagcgaggcttggtgcaagacaagaccgagctagaggacgaaaatcaggaagggatgactgtgcactcatcagtacactccaataaccttaacagtatgcccgcagcggaaaagggtaaggacacactaaagtcagcatacgatgatactgagaacgacctgaagggggctgctatccacatctctaagggcatgctacacgaagagaaaccaggcgagcagatcctcgaaggaggatcggagagcgagagtgctcaaaaggcagcggggaaccagatgaacgacaggaagatacagcaggaatctctgggctcagcacctctaatgggggatgaccacccaaacgccagtcgagactccgttgagggtgacgctcttgttaatggcgctaaattgcacactctaagcgtcgagcaccagcgcgaagagttaaaggaggaactggtactgaagactcagaatcaaccaagattttcttctccagatgaaattgatttgcccagagaacttgaggacgaagtgccgatactcggtaggaatctgccctggcagcaggagcgggacgtggccgcaaccgcaagtaagcagatgagcgagaagatccgcttgtctgagggagaagcaaaagaggattcgttggacgaagaattttttcatcacaaggccatgcaaggcaccgaggtcgggcagacggaccagactgattctactggaggacctgctttcctgtcgaaagttgaggaggacgactaccccagtgaagaactgttagaggacgaaaatgctattaatgcgaaaagatccaaagagaaaaaccctgggaatcagggcaggcagttcgacgtgaatctgcaggtcccagacagagctgtgctgggcaccattcatccagaccccgaaattgaggagtcaaaacaggagacgtccatgatccttgacagtgagaagaccagtgagaccgcagcaaagggcgtaaatactggtggaagggagccaaacacgatggttgagaaggagcgcccacttgctgacaaaaaggcccagagacctttcgagcggtcagacttcagcgactctatcaaaatacagacccccgagctgggcgaggtgttccagaataaggactccgactacctgaagaacgataatccagaggaacacctgaagacctctgggctggccggagagcccgagggagagttgagtaaggaggaccacgaaaatacagagaaatacatgggcacagaaagccagggatctgctgccgccgaacctgaagacgatagtttccactggacccctcacaccagcgtcgaaccagggcactcagataaacgggaggacctcctgattatatctagtttctttaaagaacaacaatcattgcaacgcttccagaagtactttaacgtgcatgaactggaggccttgctacaagaaatgtcgtctaagctgaaaagcgcccagcaggaatccttaccatacaatatggagaaggttcttgacaaagtctttcgcgcttccgaaagccagatcctgtctattgcggaaaaaatgctggacactagggtggccgaaaaccgagacctgggcatgaatgagaacaacatttttgaagaggctgccgtcctggacgatatccaggacctgatttacttcgtgcggtacaagcacagtaccgcagaggaaactgctacacttgtaatggctcctccattagaggaagggctcggcggagccatggaagaaatgcagccgctgcacgaagacaatttttctagggagaagactgctgagctcaatgtccaggtgcccgaagagcctacccatctggatcaacgagtgataggcgatacacatgccagcgaggtgagccagaagcccaacacagaaaaggacctcgacccagggccagtaacaactgaggatacacctatggacgccatcgatgcaaataagcagcctgagacagccgctgaggagcccgcctcagtgacgccactggaaaatgccatcctgttaatctattcattcatgttctacctgaccaagtccctcgtggctactctccccgacgacgtgcagcccggcccggacttctatggcctaccctggaagcccgtgtttattacagcctttcttgggatcgccagttttgccatcttcctttggcggacagttctggtcgttaaggaccgagtgtaccaagtaacagaacagcagatttccgaaaagctgaaaaccatcatgaaggaaaatacagagttagtgcagaagctctctaactacgagcagaagattaaggaaagtaagaaacatgtccaagaaacgagaaagcagaacatgattttatctgacgaagcaatcaagtacaaggacaaaatcaagacattagagaagaatcaagagatattggatgacactgctaaaaacttgcgtgttatgctcgaatctgagagggaacaaaacgtaaaaaatcaagatctgataagcgaaaacaagaaaagcatcgagaaattgaaagacgtgatctctatgaacgccagcgaattctcagaagtgcagatcgcactcaatgaagccaagctgagtgaggaaaaggtgaagtccgagtgtcatcgggtgcaagaggagaacgctcggctgaaaaaaaagaaagaacagcttcagcaggagatcgaagactggtctaagctgcatgccgagctctctgagcagataaagagttttgagaagagtcagaaagatctggaggtggcgcttacgcacaaggacgacaacattaacgccttgacaaactgtataacccagttaaacctgctggagtgcgagtcagaatccgagggccagaacaaaggaggaaatgacagcgatgaattggccaatggggaggtgggtggcgatcgcaacgaaaagatgaagaaccagattaaacagatgatggatgtatccaggacccagactgccatctcggtggtcgaagaagatctcaagctcctccagttgaagctcagagcctccgtgtcaactaagtgtaaccttgaggaccaggttaaaaaactggaagacgacagaaattctctgcaggccgctaaggctgggctcgaagacgaatgcaagactttgcgacagaaggtcgagattctcaacgagctttaccagcagaaggaaatggctcttcaaaaaaagctgtctcaagaagagtacgaacgccaggagcgagagcaccgcctgagcgcagctgatgagaaagccgtgtccgcagccgaagaagtgaaaacatataagcgacgaatcgaggagatggaggatgaactccagaaaacagagcgctcgtttaagaatcagattgccacccatgaaaagaaagcgcatgaaaattggctgaaggctcgcgccgctgaaagggcgattgccgaagagaagcgtgaagctgccaacctccggcataaactcctcgagctgacgcagaaaatggccatgctgcaagaagaacccgtcatcgttaagcccatgcccggaaagcccaacactcaaaaccctccgaggaggggtccactttcacagaacggcagttttggccctagtccagttagtggcggggagtgttctccgcctctcacagttgaaccacccgtgagaccgctgtctgccaccctgaaccgtcgggacatgccacgctcagagttcggtagtgtggacggtcctctgccacaccctaggtggtcagccgaagcctccgggaagccctcccctagtgatcccgggtctggtactgctactatgatgaatagttcgtccaggggcagtagccccacccgtgttttagatgaaggcaaggtgaacatggcgcctaaagggccaccccccttccctggggttccactgatgagcactcctatgggcggcccagtaccccctccgattaggtacggccctccaccgcagttatgcggcccattcggacctagaccactgcctcctcctttcggtccgggcatgcgtccacctctcggtctccgcgaattcgctccaggagtgccccccggaagaagggacctgcctcttcatccgagggggttcttacccggacatgctccgttccggcccctaggctcactgggaccacgggagtactttattcccggaactagacttccacctcccacccatgggcctcaagagtaccccccgccaccagctgtcagggacctgttaccaagcggatccagggatgaaccccctcctgcatctcagtctacaagccaggactgtagccaggccttgaagcaaagtccttag

SEQ ID NO: 123929 - DNA, 3051 bp, synthetic construct
  misc_feature 1..3051: note = Description of Artificial Sequence: Synthetic coding sequence
  source 1..3051: mol_type = other DNA
tagcttgtcccagatagcaagcagggtaagccgcagagcgcaacagactacagtgaccccgacaacgtggatgacggtctcttcattgtagacatcccgaagaccaacaatgacaaggaagtgaatgcagaacatcatattaaagggaagggtaggggagtccaggagtctaagaggggccttgttcaggacaaaaccgagctcgaggatgaaaatcaggagggtatgacagtgcatagctccgtacacagtaataacctgaacagcatgccggctgcggagaagggaaaggacacattgaaatccgcatatgatgatactgaaaatgatctcaaaggggcagccatccacattagtaagggaatgttgcatgaggagaaaccaggtgagcagatcctcgaaggaggatctgagtccgaatcggcacagaaggcggcgggcaatcagatgaatgacagaaaaatccaacaggagtccttggggagcgcccctctgatgggtgacgaccaccctaatgctagccgagactctgtggagggcgacgcactggtcaatggcgcaaaactgcataccctgtcggtagaacaccaacgagaggagttgaaagaggaactagtgctgaagacacagaatcagccccgcttctcaagtcccgacgagattgatctgcctagagaacttgaggacgaggttcccatactagggaggaaccttccgtggcagcaggagcgagatgtggctgcaacggcctccaagcagatgtctgaaaagatacgcctgtccgagggcgaagctaaagaggattcacttgacgaggaattttttcaccataaggccatgcagggaaccgaggttggtcagaccgatcagactgacagcactggggggccagcctttttgtctaaggtggaagaggatgactaccctagtgaggaactgctcgaggacgaaaacgctattaacgctaagaggagcaaagaaaagaaccccgggaaccaggggcgacagtttgacgttaatttacaggttcccgatcgcgctgttctggggaccatccatcccgatcccgagattgaagagtctaagcaggaaacctccatgatcctagacagcgagaaaactagtgagacagcggccaagggcgtcaacacaggcggccgtgaaccaaataccatggtcgaaaaagagagaccgttggcagacaagaaggcccaaaggcctttcgagcgctcggacttcagtgacagtattaaaatccagacaccggagttgggggaggtctttcagaataaagactcggactatctcaaaaacgacaaccccgaagagcatctgaagacgagtgggctagcgggcgagcctgaaggtgaactaagtaaagaggaccatgagaacactgaaaagtatatggggactgaatcccagggctccgctgccgccgaaccggaggatgatagtttccactggacaccacatacgagtgtcgagccaggacatagtgataagcgagaagacttactgataatttcatccttctttaaagaacagcagtccctccagcgtttccaaaaatactttaatgtccacgagctggaggccctgctccaagagatgtcttcaaaactgaaatctgcacaacaggaatcgttaccatataacatggagaaggtccttgacaaggtcttccgtgccagcgagtctcaaatccttagcatagcggaaaaaatgctcgacacaagggtggctgagaatagagacctgggcatgaacgaaaacaatatcttcgaagaagcagccgtcttggatgatatccaagatctgatctattttgttagatacaagcactcaacagccgaggagaccgccaccctggtcatggccccaccactggaggaagggctaggcggtgctatggaagagatgcagccgctccacgaggacaattttagccgggaaaagactgccgagcttaacgtccaagtgcccgaggagcctacccatctggaccagagggttatcggagacacacatgcttctgaggtttcacagaagccaaatacagaaaaggatctggatcccggccctgtaaccactgaagacacaccgatggacgctatagatgcaaacaagcagccagagaccgccgccgaagagccggcatctgtgacccctttggaaaatgctatcctcttgatttactcctttatgttctacctaacaaagtcactggtggccacgctcccagatgatgttcaacctggtcctgatttctatgggctaccgtggaaacctgtgtttataacagcctttctgggtatcgcctcttttgccatctttctctggcgtaccgtattagtggtcaaggacagggtgtaccaggtcacggagcagcagatcagtgagaagttgaaaaccattatgaaggaaaacactgagctggtccaaaagctgagcaactatgagcagaagatcaaggagtctaaaaaacatgtacaggaaacgcgaaagcaaaatatgatactcagcgatgaggccatcaaatataaagacaagatcaagactctggagaaaaatcaggaaatccttgatgacactgcaaagaacctgagggtgatgctggaaagtgaacgagaacagaacgttaaaaaccaggacttgttgcagcaggagatagaagattggtccaaattgcatgccgaacttagcgagcaaatcaagagctttgaaaagtcacagaaggacctggaagtggcactcacacacaaggatgataacatcaatgcactgactaattgtattacgcaactcaatttgctagaatgcgaatccgaaagcgaagggcagaacaaaggggggaacgattctgacgaattagcgaatggagaggtcggcggcgacagaaatgagaagatgaagaatcagattaagcagatgatggatgtctccaggacacagaccgcaatttcagtggtcgaggaggatctaaaactgctccagttaaaacttagagcttcagtctctacaaagtgtaatctggaagatcaggtttag

SEQ ID NO: 123930 - DNA, 324 bp, synthetic construct
  misc_feature 1..324: note = Description of Artificial Sequence: Synthetic coding sequence
  source 1..324: mol_type = other DNA
tgaagcgccgaggcctctggcaagccttccccttctgaccctggatctggaaccgccacgatgatgaattcctcctctcgcggtagttctccaactagggtccttgatgaaggcaaagttaatatggcccccaaaggccccccaccctttccgggggtacctctaatgagcacacccatggggggacccgtgcccccacccatccggtatggtcctcccccccagctctgtggaccatttgggccaagaccactgccaccaccatttgataaagatgggcgccccggtacagtcgcgcatgcgtgtaacccatccactttgtag

SEQ ID NO: 123931 - DNA, 1803 bp, synthetic construct
  misc_feature 1..1803: note = Description of Artificial Sequence: Synthetic coding sequence
  source 1..1803: mol_type = other DNA
atgggtaagaaactggacctgtctaagctcaccgatgaggaggcccagcacgtgctggaggtggtgcagagggattttgatctacgcaggaaagaggaagaaagactagaagcacttaagggcaaaattaaaaaggagtcgagcaaacgcgaactactctctgacaccgctcatcttaatgagacgcactgcgcccgctgcttgcagccctatcagctgttagtcaactctaaacgccaatgcttggagtgtggtctgttcacctgcaagagctgcggacgggtgcaccccgaggaacagggatggatttgcgacccatgccatctcgctcgcgtggttaaaatcggttctctcgaatggtactatgagcacgttaaggcgaggttcaaacggtttggaagcgcgaaagtcatccggagtttacatggacgtctgcagggcggcgctgggccagagctaatatctgaggaaaggtctggggattcggatcagaccgatgaagatggcgaacccgggtcagaagcccaggcgcaggcccaaccatttggttccaaaaagaagaggctgctttcagttcacgacttcgacttcgagggcgattctgacgattccacccagcctcaaggtcatagtctgcacctatcatctgtgcctgaggctagagacagcccccagagcctcaccgacgaaagttgtagtgaaaaagccgccccgcataaagcagaggggttggaggaagcagatacgggcgcttccgggtgtcactctcacccagaagagcaacccacgtcaatctctccttcacgccatggcgctttggccgaattgtgccccccgggcgggtcccaccgcatggctttgggcaccgcagcagcgcttgggagtaatgtgatccggaacgagcagctgccattgcagtatcttgcggacgtcgacacatcagatgaggagtcaattcgggcccatgtcatggcctcccaccactctaagaggcggggacgcgccagctccgagtcccaaatattcgagctgaataagcacatcagtgcagttgagtgccttctgacatatttggagaacactgtggtaccaccactcgccaaaggcctcggggcaggagtgcgtactgaggctgatgtcgaagaggaagctttgcggaggaaactagaagaattgacgtccaatgtcagcgatcaggaaacctcttctgaagaggaagaagcaaaggatgaaaaagccgaaccaaatagagataagtcagtgggaccacttcctcaggcggatccagaagtgggcaccgcagcacaccaaaccaaccggcaagagaagtcgcctcaggaccccggagaccccgtgcagtataaccggactaccgacgaggagctgagcgagctggaggaccgggttgccgtgaccgcctctgaagtgcagcaagctgaaagtgaagttagcgacattgaatcacggattgcggccttgagagcagccggcctgacagtgaagccgagcggtaaacctcggcgcaagtcgaatctgcccatcttcctaccgcgagtggcaggaaaactgggaaagcgccccgaagacccaaatgccgacccttcgtctgaggcaaaggccatggctgttccctatctgctgagaagaaaattctctaactctctgaaaagtcaggggaaggatgatgattcttttgatcggaaatcagtgtatcgcggttccctcactcaacgcaacccaaatgcgcgcaaaggtatggccagccacacattcgctaagcctgtggtagcacatcagagttag

SEQ ID NO: 123932 - DNA, 1719 bp, synthetic construct
  misc_feature 1..1719: note = Description of Artificial Sequence: Synthetic coding sequence
  source 1..1719: mol_type = other DNA
atgggaaaaaagctggatctgagcaagctcactgacgaggaggcccagcatgtgctggaggttgttcagcgcgatttcgacctgcgaaggaaggaggaggaacgattggaagcccttaaggggaagatcaagaaagaatcttcaaagagggagcttttatctgacacagcccacttaaatgaaacgcactgtgcaaggtgcctccagccctaccaactgcttgtgaattcaaagcgtcagtgccttgagtgcggcttgtttacatgtaagagttgtgggagggtccatccggaagaacaggggtggatatgtgacccttgccacctggcacgcgtagttaaaattgggtccctcgaatggtactatgagcatgttaaagcccggttcaagaggttcgggagcgcaaaggtgatcagatcattgcacggccggctgcagggtggcgccggtccagaactgatttcggaagaacgctcaggagattcggaccagacagacgaggatggggagcccggctccgaggcacaggcccaggcccagccttttggatcaaagaaaaaaagactgctgtctgtccacgactttgacttcgaaggcgattccgatgattccacgcagcctcaggggcacagcctccacctcagttccgtccccgaggcccgagattcacctcagtccctgaccgatgagtcttgctcggagaaggctgcccctcataaagcggaaggcctggaggaggcagacaccggggctagcgggtgtcactcccatcctgaggaacagccgaccagtatctctccctcaaggcacggtgctcttgcggaactgtgccccccaggcgggtcgcacaggatggctcttgggaccgctgccgccctcggatccaacgttattaggaatgagcagctccccctccagtatctggccgacgttgacacaagtgatgaggaatcaattcgagcacacgtgatggcttctcatcatagcaagcggcgcgggagagcctcctctgagtcacagggtttgggcgcaggagtgcgaacagaagcagatgtcgaagaggaggcacttcgacgcaagttagaagaactgacctcaaacgtttctgaccaggaaaccagcagtgaggaagaagaggctaaagacgagaaggccgaaccaaaccgcgacaagtctgttggccccctgcctcaggccgatcccgaggtgggtaccgccgcacaccagacgaaccgccaggaaaagtccccacaggatcctggagaccccgtgcagtacaatcgaacaaccgacgaagagttgtcggaactagaagatagagtcgccgttactgcctctgaggtgcaacaggccgagtctgaggtaagtgacatcgagagcagaatcgcagcattgcgggcggctgggctgactgttaagccatccggtaagcctcgacgcaagagcaacctgccgattttcctgccccgtgtggccggcaaactgggcaagaggccagaagacccgaacgcggaccccagttcggaggctaaagctatggctgtcccataccttcttcggaggaagttctctaattcactaaaaagccagggtaaggacgacgactcatttgatagaaaatcggtgtatcggggttccctcacccaacgaaaccccaacgcaagaaaaggcatggcctcacacaccttcgctaaacccgtagtggcccaccagtcttag

SEQ ID NO: 123933 - DNA, 396 bp, synthetic construct
  misc_feature 1..396: note = Description of Artificial Sequence: Synthetic coding sequence
  source 1..396: mol_type = other DNA
atgggtaaaaagcttgatctcagcaagcttacagatgaggaggcccagcacgttctggaagtagtccagcgcgattttgatctgcgccggaaggaagaggagaggctggaggccctgaaggggaagatcaaaaaagagtcctctaaacgggaactactcagtgacacagcccatctgaatgagacccactgcgcacgctgcctccagccctatcagcttctcgtcaattctaaacggcagtgtctggagtgcggtctgtttacatgcaagagctgcgggcgtgtgcacccggaggagcagggatggatctgcgacccttgccacctcgctcgggtggttaagatcggctccctcgaatggtactatgagcatgtgaaggcccggttcaagagatag

SEQ ID NO: 123934 - DNA, 213 bp, synthetic construct
  misc_feature 1..213: note = Description of Artificial Sequence: Synthetic coding sequence
  source 1..213: mol_type = other DNA
atgggcaagaaactggatctgagtaagctcacagacgaagaagcccagcacgttctggaggttgtacaacgagatttcgaccttcgtcggaaggaagaagagcgcttggaggctctgaagggaaaaatcaaaaaggaatcgtcaaaacgtgagttgctctctgacaccgcccatcttaacgagactcactgcgcaagatgtttgcagccttag

SEQ ID NO: 123935 - DNA, 1656 bp, synthetic construct
  misc_feature 1..1656: note = Description of Artificial Sequence: Synthetic coding sequence
  source 1..1656: mol_type = other DNA
atgggcaaaaaactagacctctcaaaactgaccgacgaggaggctcaacatgtcctcgaagttgtgcagagagatttcgatttacggagaaaagaagaagaaagattggaagcgctgaaaggaaaaatcaaaaaggaatcttccaaacgggagttgctgtcagacaccgctcatctgaatgagactcactgtgcgagatgcctacaaccctaccagctactggtgaattccaaaaggcagtgccttgaatgtggcttatttacttgcaagtcatgtggacgcgttcatcccgaggagcagggctggatctgtgatccctgccaccttgctcgagtggttaaaatcggaagcctagagtggtattatgaacatgtgaaggctcgtttcaaacggttcggttctgcgaaagtcattaggtccttgcatggcagactgcaaggcggagccgggccagaactaatctctgaagagaggagcggcgatagtgatcagactgacgaggacggcgaaccaggcagtgaggcccaggcccaggctcaaccctttggttcaaagaaaaaacgcctgctgtctgtccacgacttcgactttgagggagacagcgatgattccactcagccacagggccacagcctgcacctctccagtgtccctgaggcaagagattcaccccaatccctgacggatgagagttgcagcgagaaagcggccccccataaggctgaaggcctggaagaggccgacacaggtgcttccggatgccactcgcaccctgaagagcagccaacttctatcagcccgagccgacacggtgcgctggcagagctgtgcccccccgggggcagccaccgtatggcccttggcacagccgcagcccttggttctaatgtcatcaggaatgaacagctgcctctgcaatacctcgcagacgtcgatacctcagatgaggagtctattagagcccacgttatggctagtcaccacagcaaacgccgcgggagagcttctagtgagtcccagatattcgagctgaacaagcacatcagcgccgtggagtgtttgttaacctatttggaaaataccgtggtgcctcccctggccaaggggcttggcgctggggtccgcaccgaggctgatgtggaagaggaagccttgagacgaaagctagaggagttaactagcaacgtgagtgaccaagagacaagttccgaggaggaagaggcaaaagatgaaaaggccgaaccgaaccgtgacaagtcagtgggacccctcccccaggcagatccagaagtcgggaccgctgcccatcagacgaatcgccaggagaagtcaccccaggaccccggggaccccgttcagtataataggacaactgacgaagagctctctgagctagaggatagggtggccgtcacagcgagcgaagtccaacaggccgagagcgaagtgagtgacatagagagtcgaatcgcggcgctgcgtgccgctgggctaacagttaaaccatccggcaagcctcggaggaaaagcaatctgccagcactatatgaagggacattgagtttgtgttctgaagacctgaagcatactcacccagatagcgtgaaaagtaaacggtctagactcaatcacgtggcaagctgtgggaacccctag

SEQ ID NO: 123936 - DNA, 675 bp, synthetic construct
  misc_feature 1..675: note = Description of Artificial Sequence: Synthetic coding sequence
  source 1..675: mol_type = other DNA
atgggcttacgcgattggttacgaacagtgtgttgctgttgtggatgcgaatgtcttgaagagcgagcactacctgagaaagagcccctagtctctgataacaatccctacagtagctttggagcaactctggtgagagacgacgaaaagaacctgtggagcatgccacacgacgtgtctcacaccgaagcggacgacgacagaactctttataacctgattgtcatccgcaaccaacaggcgaaagattccgaagagtggcaaaagctgaattacgatattcatacgttgcgccaagtcagaagagaagtacgtaatagatggaaatgcattctggaggatctcggtttccagaaggaggccgattccctcttgagcgttaccaaactatccaccatctccgattccaagaacacacgcaaggcccgagaaatgctcctcaagctggctgaagagaccaacatcttccctacctcctgggagctttccgaaaggtacctgttcgtggtggataggttgatcgccctagatgctgccgaggagtttttcaaattagccaggcgcacctaccccaaaaaaccaggcgtgccttgcttagcagacggccagaaagaacttcatctgtggggcgacctgagctgtagattagcgcacatgcagggggttctgcattag

SEQ ID NO: 123937 - DNA, 645 bp, synthetic construct
  misc_feature 1..645: note = Description of Artificial Sequence: Synthetic coding sequence
  source 1..645: mol_type = other DNA
atggggctgagggactggctgcggacagtgtgttgctgctgtggatgcgaatgtttggaggaaagagctctgcctgagaaggaaccactcgtatcagataacaacccctatagctcctttggagccactctcgttcgtgatgatgaaaaaaatctctggtctatgccccacgacgtttcacacactgaagccgacgacgaccggaccctctacaacctgatcgtgataaggaaccaacaggctaaggattctgaggaatggcagaaattgaattatgacatccacactctccgccaggtgcgccgtgaggtacgcaatcggtggaaatgcattctggaggacttgggattccagaaagaggctgattcactgttgagtgtgaccaaactctccaccatctccgactcgaaaaatactcggaaggcccgggagatgctcctgaagctggcagaagagaccaatattttccccacaagttgggagctgtccgagaggtatctattcgtggttgaccggctgatcgcgctcgacgcagcagaagaatttttcaaactggcgaggcggacgtacccaaaaaagccaggcgtcccttgtttggccgatggacagaaagagctgcactacttacctttcccatcgccgtag

SEQ ID NO: 123938 - DNA, 645 bp, synthetic construct
  misc_feature 1..645: note = Description of Artificial Sequence: Synthetic coding sequence
  source 1..645: mol_type = other DNA
atggggctaagagactggctccgaactgtgtgttgctgttgtggatgcgagtgcctagaggaaagagcactgcccgagaaagaacctctggtgagcgataataacccatatagtagtttcggcgccactctggtcagagacgatgagaaaaatttatggagtatgcctcatgacgtaagtcatacggaggctgacgatgaccggacactgtacaacctgatagttattagaaaccagcaggccaaagatagtgaggagtggcagaagctgaactatgatattcacacattaaggcaggttcgccgcgaggtccgaaacaggtggaagtgcattctggaagatctggggtttcagaaagaggccgattcactgctaagcgtgacaaagctgagcactatttctgatagtaagaatacacgcaaggctagggaaatgctgctgaaactagcagaggagaccaatatcttccctacaagttgggagctgtcggagcgatacctgtttgtcgtggacaggctgatcgcgctggatgccgctgaggaatttttcaaacttgcccgtcggacataccctaagaaacctggagtcccttgcctcgctgatggccagaaagaactgcattacctgccgttcccttccccatag

SEQ ID NO: 123939 - DNA, 1053 bp, synthetic construct
  misc_feature 1..1053: note = Description of Artificial Sequence: Synthetic coding sequence
  source 1..1053: mol_type = other DNA
atgcagggaaacgggtctgccctgcccaacgcttcgcagcctgtgttgaggggagatggggccagacccagttggttggcttcagctctggcttgtgtcctgatttttactatcgtggtggacattctcgggaacttgcttgttattttgtcggtgtaccgcaacaagaaactacgcaatgctggcaacatcttcgtcgtgtctctcgcggtggccgacttagtggtggctatttacccgtacccccttgttctcatgtctatttttaataatggatggaatctagggtacctgcactgtcaggtatcgggatttctgatgggcttatctgtgatcggcagtatcttcaacatcacgggaatcgccatcaatcgttattgctatatatgtcacagcctgaaatacgataaactgtatagctccaagaactctctctgctatgtgttgctaatatggcttctgacactggcagccgtcctgcctaatctacgcgcgggtacattgcagtatgaccccagaatctactcttgtactttcgcacagtccgttagcagtgcatatactattgcagttgtggtgtttcacttcctggtccctatgataatagtgattttctgttaccttaggatctggatcctcgtgttacaagtacgccaacgggtaaagcccgaccggaaaccgaaactcaaaccccaagacttccggaatttcgtaaccatgtttgtggtctttgttttgtttgctatatgctgggcacctctcaatttcatcggtctggctgtggcgtctgaccctgcttccatggtgccgcgcatcccagagtggctgtttgtggcctcatactatatggcttactttaattcttgtctgaacgcgatcatttacggactactgaatcagaactttcgtaaggagtaccggcgaatcatcgtctccttgtgcacggcccgtgtgttcttcgtggatagttctaatgacgtggcagatcgtgtgaaatggaagcccagccctctgatgactaacaataatgtggtcaaagtggattcagtgtag

SEQ ID NO: 123940 - DNA, 1089 bp, synthetic construct
  misc_feature 1..1089: note = Description of Artificial Sequence: Synthetic coding sequence
  source 1..1089: mol_type = other DNA
atgtccgagaacggctcatttgcaaactgttgcgaggccggtggctgggctgtgaggcccggatggagtggagcaggaagcgcgcggccaagccgcactcctcgcccaccctgggtggccccggccttgtcggccgtgctcatcgtcacgacagcagtcgatgtagtggggaatctgctcgttattctgtccgtactacggaatcgcaagctgagaaatgctggaaatttatttcttgtcagcttagcgctagccgatctagtcgtggccttctatccctatcctctaattctcgtcgcaattttctatgatggatgggcattgggcgaagaacactgtaaggcatccgcctttgtgatgggactgtccgtaatcggaagtgtgttcaatatcactgctatcgccataaacagatattgctatatctgccactcaatggcgtatcatagaatataccggcgctggcacacaccactgcacatttgtctcatctggcttttgacagttgtggcactgttacccaatttttttgtcgggtccctggagtacgacccacgcatctattcttgcacattcattcaaacagcctcaacccaatatacagccgcggtcgtagtgatccatttcctgctgcccatcgctgtcgtgtctttttgctacttgcgtatttgggtgctggtgcttcaggcgagaaggaaagcaaaaccggaatctcggctgtgccttaaaccttctgatctccgctcttttctgactatgttcgtggtattcgtgatcttcgctatttgttgggcccccctgaattgcatcggattagccgtggccataaacccacaagagatggctccacagatcccagagggactcttcgtgacatcctaccttctggcatactttaattcctgtctcaatgctatcgtctatggtctgttgaaccagaacttcaggcgagagtataagcggatactgctggctttatggaacccacgccactgtatccaggacgcctcaaagggctcacatgccgaaggcctccagagcccagccccgccaattatcggggtccagcaccaggctgacgccctgtag

SEQ ID NO: 123941 - DNA, 3864 bp, synthetic construct
  misc_feature 1..3864: note = Description of Artificial Sequence: Synthetic coding sequence
  source 1..3864: mol_type = other DNA
atgtccaaggtaattcagaagaagaatcactggaccagtagagtgcacgagtgtactgtgaagagaggaccacagggagagctcggtgttactgtgttggggggcgctgaacacggggaattcccctacgtgggagcagtcgccgctgtggaggcagccgggcttccgggcggaggcgagggacccagactgggtgagggggaactcttactggaggtgcagggggtgagagtgagcggccttccccgttacgacgtcctgggggtgattgactcatgtaaagaagccgtgaccttcaaagccgtacgccagggtgggcggctcaataaagatctacgacattttctgaaccaaaggtttcagaagggttcacccgaccacgagctgcagcagactattcgtgataacctgtacaggcacgctgtgccctgtaccactcggtctccccgagagggagaggtgccgggcgttgactacaacttcctcacggtaaaagagttcctcgacctcgagcagagcggcaccctgttagaagtgggaacttacgagggtaactattatgggacccccaaaccgcccagtcagcctgtgagtgggaaagtgattactactgatgctttgcatagcttgcaatcggggagcaaacagtcaaccccgaaaagaacaaagtcttataacgatatgcagaacgctggaattgttcatgcagaaaatgaagaagaagatgatgtcccagagatgaattccagcttcaccgcggactcaggcgagcaagaagagcacaccttgcaggagacagctctgcctccagtcaactccagcattatcgcagccccaatcacggatccatcacagaagtttcctcagtaccttcccctgagtgccgaagataacttaggccctctcccagagaattgggagatggcgtacacagagaatggtgaagtatatttcattgatcacaataccaagactacaagctggctggaccctcgctgcctaaacaagcagcagaagcctctcgaggaatgcgaggatgacgagggcgtgcacaccgaggagctggatagcgagctcgagcttcctgccggatgggaaaaaatagaggatccagtctatggcatctactacgtcgaccacataaatagaaagactcagtacgagaatcctgtcctcgaggccaaaagaaaaaagcaactggaacagcagcagcagcagcagcaacagcagcagcagcagcagcagcaacagcaacaacaacagaccgaggagtggacagaggatcacagtgcccttgttccccctgtgatccctaatcaccctcctagcaaccccgagcccgcacgcgaagttcccttgcaggggaaaccatttttcaccaggaatccttcagagctaaaaggtaagtttattcacacaaagctgagaaagtcatcacggggctttgggttcaccgtggtggggggtgacgaaccagatgagttcctgcaaataaagtcactcgtgctggacggccccgcagctctggatggtaaaatggagacaggagacgtgatcgtttcagtgaacgatacatgtgtcctggggcacactcatgcgcaggtagttaagatcttccagtcaatccctatcggggctagcgttgatctagaactttgccgcggctatccgttgccctttgatccagatgaccccaatacgtcccttgttactagcgtggcaatcctggataaagagccaattatcgtgaacggccaagagacatatgactcccctgcgtcccactccagcaagaccggcaaagtgaatggtatgaaagatgccagaccctcatctccggccgatgtggcctccaacagctcgcacggataccctaatgataccgtgtccttagctagcagtattgctacacagccagaactgataaccgtgcatattgtgaaggggccaatgggcttcggctttacgatcgctgattctccaggaggcggcggccagcgggtcaagcagattgtggacagtccaaggtgcagaggcctgaaggagggcgacttgattgtcgaggtcaataagaaaaatgtccaggctctgacacacaatcaggtcgttgacatgctggtcgaatgcccaaaagggagcgaggtgacactgcttgtgcagagaggcggattacccgtccccaagaagagtccaaagtctcagcctcttgagcgcaaagactcacagaattcaagtcagcattccgtgtcctcccaccgatctctccataccgcaagcccctcccacagcactcaggtgcttccagagtttccccctgccgaggctcaggcccccgaccagacagattccagcggccaaaagaaacctgacccctttaagatttgggcccagagccggagcatgtatgagaatcggcctatgtctccatcccctgcgtcagggctgagcaagggggagcgggagcgtgagattaattcgacaaactttggcgagtgccccatcccggactatcaggagcaggatatctttctttggagaaaagagaccggctttggcttccggattttgggcgggaatgagcctggtgagccaatttatatcggacacatcgtgccccttggcgctgccgataccgatggacgcctgaggagcggggatgagctgatctgtgtggacggcacacctgtaatcggaaaaagccaccagctggtcgtccagttgatgcagcaggccgctaagcaggggcatgtgaatctcacagtgcggagaaaggtcgtgttcgccgtgcccaaaacagagaacgaagtgccttctcctgcatcttctcaccattcatcaaatcagccagctagcctgaccgaagaaaaaagaacacctcagggttcacaaaactccttgaacaccgtaagcagtggctctggctcaacatccggaatcggatctggcggggggggaggttccggcgttgtctcgacagtggttcagccctacgacgtagagatcaggagaggtgaaaatgaagggttcggtttcgtgattgtgtctagcgtcagccgccccgaggcgggaacgacattcggaaatgcctgcgtggctatgccacataagataggcaggatcattgagggaagccctgctgaccgctgcgggaagttgaaggtaggtgacagaatcctcgctgtaaacgggtgtagcatcacaaacaaaagccactccgatatcgttaatttaatcaaagaggcagggaacacagtgaccctgcgcattattcctggcgatgaatctagtaatgcaacccttctcaccaacgccgagaaaatagctactatcacaacaacgcatactccctctcagcaggggacgcaagagaccagaaataccactaagccgaagcaggagtctcagtttgaatttaaagctccgcaagccacacaagagcaggacttctatactgttgagctcgaacggggtgcaaaggggtttggcttcagtctcagaggcggacgcgagtataacatggatctatatgttttgcggctggccgaagatgggcccgccgagcgatgtgggaagatgagaattggcgacgaaatcctggagatcaatggagaaactaccaaaaacatgaagcactccagggccattgaactgattaagaatggcggccgccgggtgcggctgtttctgaagcgcggtgacggatctgtccctgaatacgccatgattcctcccaatattgccgcctgtatgcgcaacgagaagttgggtgaagcctgtttctacctgatgggccataatcagaccaccactcccgccgccacggccacagctccaccacctgtgcataaagtgtttaggaagtag

SEQ ID NO: 123942 - DNA, 4389 bp, synthetic construct
  misc_feature 1..4389: note = Description of Artificial Sequence: Synthetic coding sequence
  source 1..4389: mol_type = other DNA
atgtccaaggtaatccaaaagaaaaatcactggacctctagagtccacgagtgcactgtaaagcgaggccctcagggagagttaggggtgacggtgctgggtggagctgagcacggggagttcccctatgtgggcgccgtcgctgcagtcgaagccgccggattgcctggtgggggggaaggccctcgtttaggagagggggagctccttctggaggttcagggcgttagggtcagcggcctgcccagatatgacgtgctcggtgtgatcgactcatgcaaggaggccgtcacattcaaggcagtgcgacaggggggtaggttgaataaagatctgcggcatttcttgaatcagaggttccagaagggaagcccagatcatgagttacagcaaaccataagagacaatttgtatcgccacgccgtgccatgcaccaccaggtctcctcgggagggggaagtgccaggagtggactacaatttccttaccgtgaaagaattcttagacctggaacagtcaggcaccctgcttgaggtggggacgtatgagggcaattattacggcaccccaaagcctccaagtcagcccgtcagcggaaaagtgattactaccgacgccctgcatagcctacagtcaggatctaaacagagtacaccgaaacggaccaaaagttacaatgatatgcagaacgccgggatcgtgcatgcagagaatgaggaggaggacgacgtgcctgagatgaattccagttttacggctgatagcggcgagcaagaggagcatacccttcaagagacagcactgcctccggtcaactcgtcaattatcgccgcgccaattacagatcctagccaaaaattccctcagtacctcccattgagtgctgaggacaatttgggccctctacctgaaaattgggaaatggcctatacagaaaatggggaagtttacttcattgaccataacacgaaaacaacatcatggctggacccgcgctgccttaataagcagcagaaacccctcgaagagtgcgaggacgatgagggagtgcacacggaagagctcgactctgaactcgagctgcctgccgggtgggagaaaattgaggaccctgtgtatggcatctattacgtggatcacattaatcgcaaaacacagtatgagaatcccgtcttggaggcaaaacggaagaaacaactggagcagcagcaacaacagcagcaacagcagcaacaacagcaacaacagcagcaacagcagcaaactgaagagtggactgaggaccattccgcattggtgccgcccgtgatcccaaatcacccgccgtcgaaccccgagcctgccagagaggtcccactgcagggaaagcccttctttactagaaatccctccgagcttaagggaaagtttatccacaccaagctgaggaaatcttctcgaggattcggatttacagtggtcgggggagacgaaccagatgagtttctccaaataaaatctctggtgctcgatggacccgcagcattagatggaaagatggagacaggagatgttatagtttctgtcaacgacacgtgtgtcctgggtcacactcatgcacaggtggtgaaaatcttccaatcaattcccataggggctagcgtagacctggaattgtgcagaggctaccccttgccgtttgacccagatgaccccaatacctctctggtcacatccgtggccatattagacaaggagcccattatcgtaaatggtcaagagacctacgactcccccgcttcacactcttctaagactgggaaggtgaatggcatgaaggacgctcgcccctcctctccggcggacgtcgcgtccaactcaagccacggatatccaaacgatacagtttctctagccagctcaatcgctacacagcctgagctaataacagttcacattgtgaagggacccatgggattcggcttcaccatagctgacagccctggggggggcggtcagcgtgttaagcaaatagttgactctccccgttgccggggactgaaggagggagatctgatagttgaggtcaataagaaaaatgttcaagcccttacacataaccaggtggtggatatgcttgtagaatgccccaaggggtcggaagttactctgcttgtacagcgcggcggactgccggtcccaaaaaaatcaccaaagagtcagccactcgagcgaaaagatagtcagaacagctcacagcactctgtctctagccatcgctctctgcatacagccagtccgtcacattcgactcaggtcctgccagaattcccacctgctgaagcacaggcccctgatcagaccgattcttctgggcagaagaaacctgacccttttaagatttgggcacagtctagatctatgtacgagaatcgtctgcccgattaccaggagcaggacatcttcttatggcgcaaggaaaccggatttgggttcagaatcttaggcggcaacgaaccaggagaaccaatctatattggccacatcgtgcctctgggtgctgccgacacagatgggcgactccggtcaggggacgagctgatatgtgtggacgggaccccggtgattggcaagagtcaccagctcgtggttcaactcatgcagcaagccgctaagcaaggacacgtaaacttgactgttcgcagaaaggttgtgtttgctgtccccaagacagagaacgaggtaccgagcccagctagctcgcatcactctagtaaccagcccgcttcacttaccgaagagaagcgtaccccccagggcagtcaaaattcactgaacacggtatcttccggcagcggctccacttccgggattggctcaggtggggggggcggctctggcgtagtatcgactgtggtccagccttatgatgttgagattcgacgtggcgagaacgaagggttcggatttgtgatcgtttcaagtgtgtcgcgcccagaggctgggaccacctttggaaacgcatgcgttgctatgcctcacaagattggtcgaatcatcgaaggaagccccgccgaccgctgtggcaagctgaaggttggggaccggattcttgcggtgaacgggtgcagcattacaaacaaatcccacagcgacatcgtgaacttgattaaagaggctggaaacactgtgactcttcgcataatccccggggacgagtcatccaatgcgactctgctcactaacgctgaaaagatcgccactataacaaccactcatacacctagccagcaggggacgcaggaaacccggaacacaaccaagccaaagcaggaatcccaattcgaatttaaagctccccaggctacacaggagcaagacttctatactgtggagctggagaggggtgctaaaggcttcggttttagcctaaggggcgggcgagaatacaacatggacctgtatgtattgaggctggccgaggatgggccagccgagagatgcggtaaaatgaggataggagatgaaatccttgaaattaacggcgagacaacaaagaatatgaaacacagccgagccatcgagctgataaaaaacggcggtaggagagtccgattgtttcttaagaggggggacggcagcgtgcctgagtatgacccctcgtcagacaggcacggaccagcaaccggtccacagggcgtccctgaggtacgggctggtcctgacagacgacagcatccttcactcgagagttcttatccaccagacctccacaagtcctccccccatggcgagaagagggcccacgctagggaccccaaggggtcacgagagtatagtcgtcagccaaacgagcatcatacctggaatgggacatcccgaaagccagatagcggcgcatgcaggccaaaagacagagctcccgaaggacgcagagatgcacaggccgaacgagcagctgctgcaaatgggcccaaacgccgatcccccgaaaaacggagggaggggacccgctccgctgataatacactagagcgccgagaaaagcatgagaaaaggagagacgtgtctccagagcgccgtcgagaacgtagtccgaccaggaggagggatggatctccttctagacgccgccggtctctcgagagactcctcgagcagagacgcagtccggaacgccggaggggggggagtccggaaaggagggcaaaaagtactgacagaagaagagctcgtagtccggagcgtagaagagaacgcagccttgacaagagaaaccgagaggatagggcttcacaccgggagcgggaggaagctaatctgaagcaggatgctggcaggagtagccgacacccccccgaacaaagaagacggccatacaaggagtgctctactgatctctccatatag

SEQ ID NO: 123943 - DNA, 3552 bp, synthetic construct
  misc_feature 1..3552: note = Description of Artificial Sequence: Synthetic coding sequence
  source 1..3552: mol_type = other DNA
ggggggcgcctgaacaaggatcttcgccacttcttgaatcaaagattccagaaaggcagcccggatcatgagctgcagcagaccattcgggacaacctctacaggcatgccgtcccttgtactactagatccccacgtgaaggagaggtgcctggcgtggattataacttccttactgtcaaagagttcttagacttggagcagtcaggaacacttctagaagtcgggacctatgagggaaactactatggaacccccaagcctccctcccagcctgtatcaggtaaagtgattaccacagatgctctccactcactgcagtccggatctaagcagagtacgcccaagcgaacaaaaagctataatgatatgcagaatgcgggcattgtccatgctgagaacgaagaagaggatgacgtgcctgagatgaacagctcctttaccgcagactcaggggagcaggaggaacatacactgcaggagaccgctctgccacccgttaactctagtatcatcgcggcacccattaccgatcccagccaaaagtttccacaatatcttccattatcagcagaagacaatttgggccccttacctgaaaattgggagatggcgtataccgagaacggagaggtttatttcatcgatcacaacaccaagaccacatcgtggttagacccacgctgccttaataagcagcagaagccattagaagagtgcgaggacgatgaaggagtacatactgaggaacttgactctgagcttgaactccccgccggctgggagaaaatcgaggaccccgtttacggaatatattacgtggatcacattaatagaaaaacccagtacgaaaacccggtattggaggcaaagcgcaagaagcaacttgaacagcagcaacagcagcagcagcagcagcagcagcagcaacagcagcaacagcagcaacagacagaagagtggaccgaagaccactccgctctggtgccacccgtgatccccaatcaccctccatcaaatccagagcctgcccgcgaggtccccctccagggaaagccattcttcaccaggaacccgtcagagttgaaaggcaagtttatacacaccaagctccggaaatccagtcggggctttggctttactgttgtggggggcgatgagccagacgagttccttcaaattaagtccctggtcttggacggccctgcagcattagatgggaaaatggagactggggatgtgatcgtcagcgtaaatgacacatgcgtactgggccacacacacgcacaggtggtgaagattttccaatctatcccgatcggcgcaagcgtggatcttgaattatgtagaggatatccactgcccttcgacccggacgatcccaacacctctttagtgacctctgtcgctatcctggacaaggaaccgatcattgtgaatggtcaggagacctacgactcaccagctagccactcatcaaaaaccgggaaggtcaatggaatgaaagacgccagaccttctagtccagcagacgtagcatcgaacagcagccatggctaccctaatgacaccgtctccttggcaagctctattgctactcagcctgagctgataacagttcatatcgtgaaagggccgatgggctttggattcacaatcgcagattcgccaggcgggggaggccagagagttaagcaaattgtagatagccccaggtgtcggggactgaaggaaggagatctgattgtggaggtcaacaaaaaaaacgtccaggctctgacccataaccaggtagtcgacatgctggttgaatgtccaaaaggaagcgaagtaacccttctggttcagcgtgggggactcccagtccctaagaagtcccccaagtctcagccactcgaaaggaaggactctcagaactcgtctcagcactctgtctctagccatcgctcactacacacagcgtcgccatcacacagcacacaggttctgcctgagttccctccagcagaggctcaggctccagatcagactgattcttctggtcagaagaagcccgacccctttaaaatttgggctcagtccaggtcaatgtacgagaaccgtcccatgtcaccctctcccgcaagcgggttgtctaagggagagcgggagagagaaatcaattcaaccaactttggggaatgccccatccccgactaccaggagcaggatatcttcctgtggaggaaagaaaccgggttcggtttcagaatcctgggtggaaacgagccaggagaacccatttatatagggcatatcgtgcctctcggcgccgcagacactgacggccgcctgcgaagcggcgatgagctcatatgcgtcgacggtactcccgttatcgggaaaagccatcagctcgtggttcaacttatgcagcaggctgcaaaacaaggccacgtgaaccttactgtgcgccggaaagtggtctttgcggtccctaagacagaaaacgaggtgcctagccccgcctcaagtcatcacagttccaatcaacccgctagtctgacagaggaaaagagaacaccccagggcagccagaattccttgaatacagtgtccagtggctccggaagcacgtcaggtatagggtccggaggcgggggcggtagcggagtggtatctactgtagttcagccctatgatgtggagatcagacggggggagaatgaaggcttcggttttgttatcgtgtcatcggtctcccggccagaagctggtacgacatttggcaacgcatgcgtggccatgccgcacaagatcgggcggatcattgagggaagccccgcggacagatgtgggaagctaaaagtgggagataggattctggcagtaaacggttgctctattacaaacaagagtcattctgatatcgttaatttaatcaaagaagccggaaacacagttacgctgagaattattcccggcgatgagagttcgaatgctacccttctgactaacgcagaaaagatcgctacaataactaccactcacaccccatctcaacagggcacacaggagacacgtaacaccaccaagcccaagcaggaatctcaatttgaattcaaggcacctcaggccacacaggagcaggatttctacaccgttgaattagagcgaggcgctaagggctttggtttctccttgagagggggtcgcgagtacaacatggacctgtacgtgctgcggttagccgaggacggcccggcagaaaggtgtgggaaaatgaggatcggtgacgaaatcctcgagataaacggtgagactactaagaacatgaaacattccagggcaatagagctgatcaagaatggtggcaggcgggtgcggctgtttttgaagcgcggcgacgggtctgttccagagtatgcaatgattcctcccaatatagccgcgtgtatgcgcaacgaaaagcttggtgaggcatgtttctatctgatgggtcacaatcagacgacaaccccggctgccacggccacagccccaccgcctgtccacaaagtgtttcgcaaatag

SEQ ID NO: 123944 - DNA, 3771 bp, synthetic construct
  misc_feature 1..3771: note = Description of Artificial Sequence: Synthetic coding sequence
  source 1..3771: mol_type = other DNA
atgagcaaagtaatccaaaagaaaaaccactggacctctcgggtacacgagtgcacagtcaagcgagggccccaaggtgagctcggcgtcacagtgctggggggagctgaacatggcgaattcccgtacgtaggtgcagtagcagccgtggaggctgcaggattgccgggtggaggggaagggccgcgactgggggaaggcgagcttttgctggaggtgcagggcgtcagagtgtcaggattaccccgctacgatgtccttggagtgatcgacagctgtaaagaagctgttacatttaaagcagtacggcagggcggccggctgaataaagatttgcgacatttcctgaatcagcggtttcagaaagggagcccagaccatgagctacaacagactatccgggataacctataccgccacgctgtcccatgcactactcggtcaccccgagagggcgaggtacctggcgtggactataattttcttaccgttaaagagttcctggacctcgaacagagcggcactctgctggaagtgggaacatacgaggggaactactacgggacgcctaaacccccgagccagcccgtatctggcaaagtcatcacgacagacgctctccacagccttcagagtggctctaaacagagtacccctaaacggacaaaaagctataatgatatgcagaacgcagggattgttcacgccgagaatgaggaggaggacgatgtgcctgagatgaactcgtccttcactgctgacagcggcgagcaggaagagcacactttgcaagagaccgcgctgcctcccgtcaatagttccatcattgccgcccccatcactgacccttcccaaaaattcccccagtacctgccactgtcggccgaagacaacctgggtcccttgcctgagaactgggagatggcttataccgagaacggagaagtctatttcatcgaccacaacaccaagactacttcttggttggacccacgctgcttgaacaagcagcaaaaaccgcttgaagaatgcgaagacgatgaaggcgtacataccgaagaattagatagtgaactagagctgcctgctggatgggagaagatagaggaccccgtgtacggaatctattacgtggatcatataaatcgaaagactcagtatgagaatcccgtgttggaagctaaaaggaagaagcagctggagcagcagcagcaacagcagcagcaacagcaacagcagcagcagcagcagcagcaacagcagacagaagaatggacagaagaccactctgccttggtgccccccgtgattcccaaccacccaccgtctaatccagaacccgcaagagaggttccgttacagggtaagcctttttttacccggaaccctagcgaactcaaagggaaatttattcacactaagctgcgaaaatctagtaggggattcggcttcaccgttgtgggaggagacgagccggatgagtttttacagattaagtcactggtactggacgggccagccgctcttgacggcaaaatggagaccggcgacgtgatcgtgagcgtcaacgacacatgcgtgttgggacatactcatgctcaggtggtgaagattttccaaagcatcccaataggggcctctgttgatctggaactctgtcgcggttacccactacccttcgatcctgatgaccctaacacttccctcgttacaagcgtggctatcctggataaggaaccaatcattgtgaatggccaagaaacttatgatagtccagcaagtcattcgtcaaaaaccggtaaagtgaacggtatgaaagacgcaagaccaagctcccccgcagacgtggcctccaattcctcacatggttacccaaacgataccgtttcactggcttcctcaatcgctacacaacccgagttgatcacggttcacatcgtcaagggtcctatgggattcgggtttactatcgctgattcaccaggaggtggggggcaacgcgtgaaacagattgtggattcccctcggtgccggggcttgaaggagggagacctcatcgtggaggtgaataaaaagaatgtacaggcgctcactcataaccaggtggttgatatgctggttgagtgcccaaagggttctgaagttacattgctggtacaaaggggcggcctgccagtgccaaagaaatcacccaagagccagccactggaacggaaggattcgcaaaatagttctcagcactcagtgtcctcccacaggagcctccacaccgcatctcccagtcacagcacccaggtgctgcccgagttcccacctgccgaggctcaggcaccagatcagactgactccagtggtcagaagaaacccgaccccttcaagatctgggcacagagtaggtccatgtacgagaaccggcctatgtcacccagccctgcttctggactgtccaagggcgaacgcgaaagggaaatcaacagcactaatttcggagagtgcccgatacctgactaccaggagcaggacattttcctgtggagaaaagaaacgggttttggattccgcattctgggtggcaatgagcccggcgaaccaatttacatcggacacatcgttccactgggggcagccgataccgatggccgcttgagaagtggcgatgagctcatttgtgtggacggcactcctgtcattggcaagagccatcagctcgtcgtgcagctgatgcagcaggcagcaaaacaaggacatgtgaatcttactgtgaggagaaaggttgtgttcgctgtgcctaagacggagaatgaggtgccttccccagcctcatcacatcattctagtaaccaaccggcctcactaacagaggaaaaacgcacgccccagggatcacaaaactcattgaacactgtgtcctccggttccgggagcacaagtggtattgggtctggaggaggtggcgggtcaggcgtggtctctacagtggtccagccgtatgatgtcgagattagaagaggcgaaaatgagggttttggatttgtaattgtcagttctgtgagtcgtcccgaggcagggaccacattcgccgggaacgcatgcgttgccatgcctcacaaaatcgggcggattatagaggggagcccggctgaccgctgcggtaaactaaaggtgggggatcgtattctcgcggtgaacggctgctccatcaccaataagagccattctgacattgtgaacttaatcaaggaagccgggaacaccgtgaccctccgaatcatccccggtgacgagtccagcaatgccaccttattgactaatgcagaaaaaatagccactattacaactactcataccccatcccagcagggcactcaggaaacacggaacaccacaaaacctaagcaagagtctcaatttgagtttaaagcgccccaggcaactcaggaacaggatttttacactgtcgaacttgagcggggtgcaaaaggtttcggcttttccttgagggggggccgggagtataacatggatctgtacgtgttgcgtttggcagaagatggtcctgccgagagatgtggcaagatgagaattggggatgagatcttggaaattaacggcgaaaccaccaagaacatgaaacattcacgggcaatcgagttgatcaaaaacggaggtcgccgggtgcggttgtttttgaagcggggagatggatcagttccagagtacggcgggtcaaactatgagaatatcccaagctttcccggtatgaccccctag

SEQ ID NO: 123945 - DNA, 1488 bp, synthetic construct
  misc_feature 1..1488: note = Description of Artificial Sequence: Synthetic coding sequence
  source 1..1488: mol_type = other DNA
atggcggccgagcctcaaccatcgtccctcagttaccggaccactgggagcacatacctgcatcccctctccgagctgctcggaatccctctcgaccaagttaattttgttgtctgccagttagtagccttgtttgcagccttctggttcaggatctacttgcggccgggcacaacgagtagcgacgtgcgccatgctgtggctacaattttcggcatttatttcgtaattttttgtttcgggtggtacagtgtgcatctgttcgtgctggttctcatgtgttatgctataatggtcaccgctagcgtgtctaacattcatcgctattctttttttgtcgcgatggggtacttgacgatttgccatatatcccgcatctacatatttcactacggcatcttgaccacagatttctcggggccgttaatgatcgtgacacaaaagatcaccacattggcctttcaggttcatgatggtctgggcaggcgggctgaagacctatctgcagaacagcacagacttgctataaaggtcaagccatcgtttctggaatatctaagctatttacttaatttcatgtccgtcattgccggcccatgtaacaacttcaaggactacatcgccttcattgaaggcaagcacatccacatgaaattgctggaagtcaattggaaacgcaagggattccacagcctgccagaaccttcacccacgggtgccgtgatccataaactcggcattacactggtgtccttgcttctatttctgacactgaccaagacatttccagtcacttgcctagtcgatgattggttcgtgcataaggccagcttccctgcgagactgtgttatctctatgtcgttatgcaggcttctaagcctaagtattattttgcttggactcttgctgatgcagtcaacaatgcagcgggatttggctttagcggggtggataagaatggaaacttctgttgggaccttctgagtaatctgaatatttggaaaatcgagacagccacctcgttcaaaatgtatttggagaattggaatattcagacagctacttggttgaagtgtgtgtgttaccagcgggtgccttggtaccctaccgttctgacgttcatcctaagcgccctatggcacggagtatacccagggtattattttacctttctgacagggattctggtgaccctagctgctcgtgctgtgagaaacaattaccgccactacttcttaagctccagagccctgaaagctgtgtacgacgctggaacttgggcagtgacacagcttgccgtgagttacacagtggcgccctttgtcatgctagctgtggagcccaccatctccctgtataaatcaatgtatttttacttgcacattatttcactactcataattctgtttctgccaatgaaaccacaggcacatacgcagagacgccctcaaaccctcaactccataaacaaacgaaagacagattag

SEQ ID NO: 123946 - DNA, 726 bp, synthetic construct
  misc_feature 1..726: note = Description of Artificial Sequence: Synthetic coding sequence
  source 1..726: mol_type = other DNA
atggccgctgaaccccaacctagttccctaagctatagaaccacaggctctacctacctgcacccactatccgaacttctcggcataccgctggatcaggtcaattttgttgtgtgccagttggttgccctgtttgccgcattctggtttaggatatacttgcgccctggaaccacctcctctgatgtaaggcacgcggtagcgaccatattcgggatctactttgtcattttttgcttcgggtggtattcagttcacttgttcgtgttggtcctgatgtgttacgccatcatggtgactgcttctgtgtctaacattcatcgatatagtttctttgtggctatggggtacctcactatctgtcatatcagcagaatttatatcttccactacggtattttgacaacagactttagcggccccctgatgatagtgacacagaaaatcacaaccctggcctttcaggttcacgacggactcggacgaagggccgaggacctctctgctgaacagcataggcttgctattaaggtgaaaccttcattcttagaatatctctcatatttactgaactttatgtccgtaattgcggggccatgtaataatttcaaggattatatcgcgtttattgaaggaaaacacatccatatgaaattactcgaggtaaactggaaaaggaaggggttccattctttacctgaaccttctccgactgggcatctctag

SEQ ID NO: 123947 - DNA, 1041 bp, synthetic construct
  misc_feature 1..1041: note = Description of Artificial Sequence: Synthetic coding sequence
  source 1..1041: mol_type = other DNA
atggagttctccctgcggatttttttagggctcggacgccgggccgaggatttatccgcagagcagcaccgattggccataaaagtcaagcctagctttctggagtacctgtcttacttgctgaatttcatgtcagtgatcgccggcccgtgtaacaacttcaaggactacattgccttcattgaagggaagcacattcatatgaaactgctagaagtcaattggaaacggaagggattccactcactgcctgagccttcacctacaggggccgtaatacataagttagggattactctcgtgtctttgttactgttcctcaccctgaccaagacgttccccgtcacatgcctggtagatgactggttcgttcataaagcgtcgttccctgccaggctgtgttatttatacgttgtcatgcaggcttcaaaaccgaaatactacttcgcttggaccttagctgacgccgtgaataatgccgccggcttcggcttttctggggtcgacaagaacgggaacttctgctgggaccttctgagtaatttgaatatttggaagattgagacagccaccagctttaagatgtacctggaaaactggaacatacagaccgctacttggctcaagtgcgtctgctatcaacgggtgccttggtatccaacagtactcacttttattctgtccgcgctgtggcacggcgtgtacccgggatactatttcacattccttacagggattctcgtcaccttggctgcaagagcggtgcgtaacaactaccgtcactacttcctgtcctcccgggcgttaaaagccgtgtatgacgctggtacctgggccgtgactcaactggccgtgagctacacagttgcccctttcgttatgttggctgtggagcctaccatttcactatacaaatccatgtatttttatctgcacataattagtctgcttatcatcctgttcctgcctatgaagccccaggcccatacccagcgacgaccccagaccctcaacagtatcaacaaacgcaagactgactag

SEQ ID NO: 123948 - DNA, 1563 bp, synthetic construct
  misc_feature 1..1563: note = Description of Artificial Sequence: Synthetic coding sequence
  source 1..1563: mol_type = other DNA
atggccacgacatccactactggctccactttactccagcctctgtctaacgctgttcaactcccgatcgaccaagtgaatttcgtcgtgtgtcagctgtttgctctgttggccgcaatttggtttcgcacttacctgcactccagtaaaacaagtagtttcatcaggcatgtggtcgcaactctcctggggctgtacctcgctcttttctgctttggttggtacgcactgcattttcttgtccagagcggaatctcttattgtatcatgattatcataggggttgagaatatgcataattattgctttgtctttgctctgggctatttaacagtgtgtcaggttaccagagtttacatttttgattatggtcaatatagtgccgacttttcaggtcctatgatgattataacgcagaaaatcacatctctggcttgcgagatccatgacggcatgttcagaaaggatgaggagctcacttcttcacaaagagatctcgccgtgcgcaggatgccatccttgctcgagtaccttagctacaattgtaactttatgggcatcctcgctgggcccttatgttcctacaaagactatattacgttcatcgaagggagatcttaccacatcacacaaagcggggaaaacgggaaggaagagacacagtatgaaaggactgagccttctcctaacaccgctgtggtccaaaagctgctcgtgtgtggtcttagcctgctgtttcatttgacaatctgtacaacactcccggttgagtacaacatcgatgagcacttccaggccaccgcgagttggcccactaagattatttacctctacatctcactcctggcagccaggcccaaatactattttgcttggaccctggccgatgctataaataacgccgctggatttgggttccggggatacgatgaaaatggcgctgctagatgggatctgatctccaacttgcggattcagcagattgagatgtccacctctttcaaaatgtttttggataactggaacatacagactgctttgtggctcaagagagtgtgctacgaaagaacaagtttcagtccaacgatccaaacgttcattctgtccgccatctggcacggggtgtatcctggttactatctgacattccttacaggagtcctcatgacactcgcagctcgagcaatgcgaaataacttccggcactattttatcgagcctagccagttgaagctgttttacgacgtaataacatggatagttactcaagttgccattagctacactgttgtgccatttgtgctcctgtccatcaaaccttccttgacattctatagcagctggtactactgcctccatattctcgggatactcgtactcttattacttcccgtgaagaaaacccagcgccggaagaacacccacgaaaacattcaactcagccaaagcaaaaaattcgacgaaggtgagaactcactcggacagaactctttcagcacaacgaacaacgtatgtaaccagaatcaggagatagcttctcggcatagttcattgaagcaatag

SEQ ID NO: 123949 - DNA, 1308 bp, synthetic construct
  misc_feature 1..1308: note = Description of Artificial Sequence: Synthetic coding sequence
  source 1..1308: mol_type = other DNA
atggagtggctctggcttttctttctgcaccctatctctttttaccagggcgccgctttcccattcgctctgctattcaactatctttgtatcatggactctttctccacccgcgctcgatacctttttctccttacagggggtggtgccttggccgttgctgcaatgggatcttacgcagtgctggtcttcacacctgccgtgtgtgccgtggccctgttatgttcactggccccgcagcaggtgcatcggtggaccttttgctttcaaatgtcatggcagacgctctgccatctgggcctccactacactgagtactatctgcatgaaccacctagcgtgcgcttttgtattacgttaagcagcctgatgctccttacacaaagagtgacctctctatcccttgatatttgcgaaggaaaagtgaaggcggcctctggtggcttcaggtcacgcagctctttgtccgaacatgtgtgcaaggcattgccatattttagttatcttctttttttcccagccctgctgggaggttccttgtgttcctttcagcggttccaggcccgcgtgcaggggagctctgccttacatccaagacactctttttgggccctgagttggagagggcttcagatcctcgggctcgaatgtctgaacgtcgctgtgtctagggtggtggacgctggtgctggactcactgattgtcagcaattcgagtgcatctacgtggtgtggactaccgccggtctgtttaaacttacttattattctcactggattctggatgactctttactgcacgcagcaggattcgggcctgaactgggacagtcccctggtgaagaaggttacgtgccagacgcagatatctggacgttggagagaactcaccgaatctccgtcttctcacggaagtggaatcagagcacagcccgatggcttcggcggctggtgtttcagcattctagggcttggcctctgctgcagactttcgctttcagtgcctggtggcatggcctgcacccggggcaggtgtttggcttcgtatgttgggccgtgatggtggaggctgactatttgatacatagttttgcgaatgaattcatcagaagctggcctatgcgattgttctataggactctaacctgggcacacacgcagctgattatagcatatattatgcttgctgtagaggtgcgttcactctcttctctctggctcctgtgcaattcctacaatagcgtgttccctatggtgtactgcatccttctactgctgcttgccaagcgcaaacacaagtgcaactag

SEQ ID NO: 123950 - DNA, 1341 bp, synthetic construct
  misc_feature 1..1341: note = Description of Artificial Sequence: Synthetic coding sequence
  source 1..1341: mol_type = other DNA
atgactctgaaagcttctgaaggcgagtctgggggctcaatgcacacagctctctctgatctgtatctggagcaccttctccagaagaggtcacggcctgaagccgtcagccacccactcaacaccgtgacagaggatatgtatactaatggttctcccgcaccagggagtccagcccaagtaaagggacaagaggtacggaaggttcgtcttatacagtttgagaaggtaactgaagaacccatgggtattaccttaaagctcaacgagaaacaatcctgcaccgtggccaggattctccacggcggaatgatacatagacagggttccctacacgttggtgacgagattctggaaatcaatggcactaacgtgacgaaccattccgtagaccagctccagaaggccatgaaagagaccaaaggaatgatcagcctaaaggttataccgaatcaacagagccgcctccccgctttgcaggaggctgggttaaagttcgcaactggcgatatcatacagatcatcaacaaagacgactctaactggtggcagggcagagtggaaggaagttccaaagagtctgccggattaatcccctctcctgaacttcaggagtggcgcgtcgcctccatggcccagagtgcaccttctgaagctccaagctgttctccttttggaaagaaaaagaaatacaaagataaatacctcgctaagcacagctccatatttgaccaactcgatgtagtgtcatacgaggaggtcgtgcgcctgcctgctttcaaacggaagaccttggtcttaatcggtgcgtccggagtcggacgcagccatataaaaaacgcgcttctgagccagaatcccgagaaatttgtctatcctgtcccctacacgaccagaccccccagaaaaagcgaggaggacggaaaggaataccatttcatctcaaccgaggagatgacacgtaatatctccgcaaatgaatttcttgagtttggttcatatcagggaaacatgtttggcactaagttcgagacagtgcaccagatacacaagcagaataaaatcgcgattcttgatattgaaccacagaccctgaagattgtgcgcacagccgagctaagtccattcattgtgtttatcgctcccaccgatcagggaactcaaacagaagctttgcagcagttacagaaagatagcgaagccatacgttcccagtacgctcattatttcgatctctccctggtgaacaatggagtggacgagaccttaaaaaaactgcaagaggcttttgatcaggcatgtagcagcccccagtgggtccccgtgagctgggtctactag

SEQ ID NO: 123951 - DNA, 1401 bp, synthetic construct
  misc_feature 1..1401: note = Description of Artificial Sequence: Synthetic coding sequence
  source 1..1401: mol_type = other DNA
atgactctcaaagccagcgagggcgagtcaggcggaagcatgcacacggccctgtccgacttatacctcgagcatctactgcagaaaagatctcgccctgaggccgtttcccatccattaaataccgtcaccgaggacatgtacaccaacgggagcccagcccccggctcacccgctcaagtaaaaggccaggaggtgaggaaagtcagactcatccagttcgaaaaggtaacagaggagcccatgggaatcacgcttaaactgaatgagaaacagtcctgcaccgttgcccggattttacacgggggcatgatacatcgccagggatcccttcacgtcggcgacgagatccttgagatcaatggcaccaatgtgacaaaccattctgtggaccagctgcagaaagctatgaaggagactaaaggcatgattagcctcaaggtaatccctaaccagcaatctaggctacccgccctccaaatgttcatgcgtgcccagttcgactatgatcctaaaaaggataatcttattccttgtaaggaggctggactgaaattcgccactggtgatattattcagataattaacaaagacgacagtaactggtggcaaggccgggtggaagggtcttccaaggagtccgccggcttgattcctagccctgaactccaggaatggcgagtagcatccatggcacagagcgctcctagtgaagccccctcctgcagcccctttgggaaaaaaaagaagtacaaggacaaatacttagccaagcactcttctattttcgaccagcttgacgtggtcagctatgaggaagtcgtaagacttccagcctttaagcgaaagacccttgtgctgatcggggcgtctggcgtaggccgatcccacataaagaacgcactgctgtcgcagaaccctgaaaagttcgtgtatccggtgccctacacaactaggccgccaaggaagagtgaggaggatggcaaggaatatcatttcatcagcactgaggagatgacccgcaatattagcgctaatgagtttctcgagtttggttcataccagggaaatatgtttggcaccaagttcgagactgtccaccagatacacaagcagaacaaaatcgctattctggacatcgagccacagaccctgaagatcgtgcgaacagctgaactctccccattcatagtcttcatagccccaacggatcaggggacccagacagaagccctgcagcaattacagaaagactcagaggcgatccgctcccagtatgctcattacttcgatctgtccctcgtgaataatggagtggatgagacccttaagaagcttcaggaagctttcgaccaggcatgcagctctcctcagtgggtgcccgtatcctgggtttactag

SEQ ID NO: 123952 - DNA, 1311 bp, synthetic construct
  misc_feature 1..1311: note = Description of Artificial Sequence: Synthetic coding sequence
  source 1..1311: mol_type = other DNA
atggaaagttgggccgtgagtcacccccttaacacagtcacagaagatatgtataccaatgggtcacctgctccaggatctccagcacaagtgaaagggcaggaagtcaggaaggtaaggcttattcaatttgaaaaagtgaccgaggagcccatggggatcactcttaaactcaatgagaaacagtcctgtacagtagcacggatccttcatgggggaatgattcaccgtcaaggctcactgcacgtgggcgatgaaatcctcgaaattaatggtaccaacgttaccaaccactcggttgaccaacttcaaaaagcaatgaaggaaactaagggaatgatatcactgaaggtgatccctaatcagcagtcccgtctgccggctctacagatgttcatgagagcccagttcgattatgatcctaaaaaggacaatctcatcccgtgcaaggaagccggcctgaagtttgcaaccggggatatcattcaaattatcaacaaggacgatagcaattggtggcagggcagggtggaaggaagtagcaaagagagcgctggcctgattccgtcgcctgagctgcaagagtggagagtagcatcaatggcccagtccgctccctcagaggcacccagctgctcgcctttcggcaaaaaaaaaaaatataaagataagtatctcgctaaacacagcagcatatttgaccagcttgatgtggtgtcctacgaggaggtggttcgcttgccggctttcaaaaggaaaacgctggtgttaatcggggctagtggggtgggacgctcacatatcaagaacgctttgctcagccaaaaccccgaaaaattcgtgtatccggtgccttatacaactaggccccccagaaagagcgaggaagatgggaaagagtatcacttcatttccacagaggagatgactcggaatatcagcgctaatgaattcttagagttcgggtcttatcagggcaatatgttcggaacaaagtttgagacagttcaccagattcacaaacagaataaaattgcgatcctcgatatcgagccacaaactcttaaaatagtgcgtacagccgagctgtcgccattcatcgtgttcatcgcccccactgaccagggtacacaaaccgaggccctccaacagctacagaaggactccgaagccattcgctctcagtacgcccactatttcgatctctccctcgtgaataacggtgttgatgagacgcttaagaagctgcaagaggcgttcgatcaagcctgctcgtctcctcaatgggtccccgtttcttgggtgtattag

SEQ ID NO: 123953 - DNA, 1659 bp, synthetic construct
  misc_feature 1..1659: note = Description of Artificial Sequence: Synthetic coding sequence
  source 1..1659: mol_type = other DNA
atgcccgtggcagcaactaactctgaaacagccatgcagcaagtgttggataatctcggatccctgccgagcgctacaggcgccgccgagctcgatctcatcttcttgcgggggatcatggaatcaccaattgtgaggtccctggcaaaagcccacgagcgcctagaagaaactaagctagaggccgtcagagataataatcttgaactggtccaggaaattctacgcgatctcgctcacgtagctgagcagtcgagcaccgccgccgaattagcacacatcctgcaggagcctcacttccagagcttgctggaaacgcacgacagcgtggcatctaagacttacgaaacaccacccccttcgccaggtctcgaccccactttctccaatcagccggtgccaccagacgcagttcggatggtcggaattagaaagaccgctggagagcatctcggcgttacctttcgtgtcgaaggaggcgaactggtgatcgcccggattctccacggggggatggtcgcccagcaagggctgctgcatgtgggcgacattattaaagaagtgaatgggcagcctgtggggtcagatccgcgtgcgctgcaggagctgctgaggaatgcgagcggctcagtgattctgaaaatacttccgagttaccaagaaccccatctgcctcgtcaggttttcgtgaagtgccattttgactatgaccctgctagagacagcctgattccttgcaaggaagcaggactgcgcttcaatgctggggatctgttgcagatcgtgaaccaagacgacgcaaactggtggcaggcttgccacgtggaggggggcagtgccggtcttatcccctcgcagttgttggaggagaagaggaaggctttcgtaaaacgggacctggaattgacccctaattcgggcactctgtgcgggagcctgagtggcaaaaaaaagaaacgtatgatgtatttaacaaccaagaacgcagagttcgataggcacgagctgctgatttatgaggaagtggccaggatgcccccattccggcggaaaacgctggtactcattggcgcgcaaggtgttggtaggcgttctcttaaaaataagttaattatgtgggatcccgaccggtacggcactaccgtgccttatacttcgaggcgccctaaggattctgagagagagggacagggctattcctttgtgagcagaggtgagatggaggcagacgtaagggccggccgatacctggagcatggtgagtatgagggcaatctctacgggactaggatagacagtatcagaggcgtggtggccgcgggcaaggtatgcgtgctcgacgttaacccccaggcggttaaggtactgaggacagcagaattcgtgccatatgtggtgttcattgaagccccggatttcgaaacactccgtgcgatgaaccgggccgctctcgagtcaggaatctccaccaaacagttaactgaagctgacctcagacgcactgttgaggagagttcccgaattcagagggggtatggccactacttcgatctctgcttggtcaactccaatctcgagaggaccttccgcgagctgcagactgccatggagaaactgcgcactgaacctcagtgggtcccagtgagctgggtgtattag

SEQ ID NO: 123954 - DNA, 1731 bp, synthetic construct
  misc_feature 1..1731: note = Description of Artificial Sequence: Synthetic coding sequence
  source 1..1731: mol_type = other DNA
atgcccgtcgctgcaacaaacagtgagaccgcaatgcagcaagtactagataatctgggttcattaccttcggccaccggggcagctgaactcgacctgattttcttgagagggattatggaaagtcccattgtacgttccctcgccaaagtgatcatggtcctgtggttcatgcagcagaacgtgtttgtgcctatgaagtacatgctaaagtatttcggtgctcatgagcgattggaggagacgaagctggaagctgtgagggacaacaaccttgagctggttcaggagattctgcgagatcttgcccatgtagccgagcagtcatcgaccgctgccgagttagcccatatcttgcaggaaccacacttccagtcacttctggagacacacgactctgtggcgagcaaaacgtacgaaaccccaccccccagtcctggcttagatccaacattcagcaaccagcccgtgccacccgatgcagtacggatggtgggcatccgcaagacagcaggggagcaccttggagtgacatttagagtagaaggaggagaactggttatagcaagaatcttgcatgggggaatggtggcacagcagggcttactccacgtgggagacatcatcaaagaagttaatggacagcccgtgggctctgaccctagagcgttgcaggagctgcttcggaacgcgtcgggatcggtgatcctgaaaattttgcccagctaccaggagcctcacctcccccgccaggttttcgtaaaatgtcatttcgattatgatccagctcgcgatagtctaataccctgcaaggaggctggcctcaggttcaatgcaggcgacctgctacagattgtcaaccaagatgacgctaattggtggcaggcatgtcatgttgaggggggcagcgcagggctcatcccgtctcagttgttagaagagaagaggaaagccttcgtcaagcgtgacctcgaactgacaccaaattcagggacgttgtgtggatctctgtccggtaaaaaaaaaaagcggatgatgtacctcaccaccaaaaacgccgagttcgacagacatgaactgctaatctacgaagaagtggccaggatgccgccttttagacgcaaaacccttgtcttaataggcgcacagggcgtcggacggagaagtttgaaaaacaaactgattatgtgggaccctgacaggtatggtacaacggtgccatacaccagccgaagaccaaaagactccgagagagagggccaagggtacagctttgttagcagaggggagatggaggccgacgttagagcaggtaggtacctggaacatggggagtacgagggcaatttgtatggcactcgcatcgactcaatacgcggcgtggtagccgctggaaaggtgtgtgtgctggatgtgaatccacaagccgtcaaggtccttaggaccgccgaattcgtgccttatgtagtgttcatcgaggcacccgactttgagacgctgcgtgctatgaaccgggctgcactcgaatcaggtatcagcactaaacagcttacagaagcagacttgcgccggactgtagaagagagttcgagaattcagcgtggctacgggcattactttgatctttgtcttgttaactcaaatttagaacgcacctttcgggaactgcagacagcaatggagaaactcagaaccgaaccgcaatgggtccctgtatcatgggtatattag

SEQ ID NO: 123955 - DNA, 96 bp, synthetic construct
  misc_feature 1..96: note = Description of Artificial Sequence: Synthetic coding sequence
  source 1..96: mol_type = other DNA
atgcctgtcgcggccacgaattcagagacggccatgcaacaagtccttgacaatctcggatcgctcccatcagctaccggagccgcagaactgtag

SEQ ID NO: 123956 - DNA, 456 bp, synthetic construct
  misc_feature 1..456: note = Description of Artificial Sequence: Synthetic coding sequence
  source 1..456: mol_type = other DNA
atgccggtggcggcgaccaactcagaaactgctatgcagcaggtgctagacaatctgggctctcttccttcagcaaccggcgcagccgaattagacctcatctttcttagaggtatcatggagagtcccatcgtaagatctctagcaaaggcccacgaaagattggaggaaaccaagcttgaagccgtgagggataacaacttagaactagtgcaagagatcctccgagacctggctcacgttgctgagcagtcttccaccgccgcagaactggcccacatcctgcaagagcctcattttcagagtctgcttgaaacccacgactcagtggcgtctaagacttacgaaacgccccctccctcccccgggcttgatcccaccttttctaatcaacccgtgccacctgatgctgtgcgaatggttggcatccgtaaaacagctggggagcatctgtag

SEQ ID NO: 123957 - DNA, 381 bp, synthetic construct
  misc_feature 1..381: note = Description of Artificial Sequence: Synthetic coding sequence
  source 1..381: mol_type = other DNA
atgcccgtggctgcaactaacagcgagacagccatgcaacaagttctagataacctaggcagcctgccctcagccaccggagcagccgaactggaccttatcttcctgaggggaatcatggagtctccgattgtccggagcctcgctaaggcacacgaaagactcgaggagaccaaactggaggccgtgcgagataacaacctggagctcgtgcaggagattctgcgcgacttggcgcatgttgcggagcagagctcaaccgctgctgagttagcccatattcttcaggaacctcattttcagtcactcttagagactcacgacagcgtggcaagcaagacttacgagacgcctcccccctcgccaggccttgatccgtag

SEQ ID NO: 123958 - DNA, 222 bp, synthetic construct
  misc_feature 1..222: note = Description of Artificial Sequence: Synthetic coding sequence
  source 1..222: mol_type = other DNA
atgccagtggcagccactaatagtgaaacggctatgcagcaggtccttgacaacctcgggtctttgccaagtgctaccggtgcagccgaactcgatctgattttccttcggggaattatggagtccccaattgtgcggtcactggctaaagcacacgaacggcttgaggagacaaaactggaggcggtgcgggacaacaacttagaactggtccaagaatag

SEQ ID NO: 123959 - DNA, 447 bp, synthetic construct
  misc_feature 1..447: note = Description of Artificial Sequence: Synthetic coding sequence
  source 1..447: mol_type = other DNA
atgcccgtcgccgcaacaaacagcgagactgctatgcagcaagtgctcgacaacttgggttccctgccttcagctaccggcgctgcagaacttgacctcatttttcttcgaggtataatggagtctcccatagtcaggtctctcgcaaaagcacatgagagactggaagagaccaagctggaggctgttagagataacaacctggagcttgtgcaggagattctgagggacctagcacacgtggccgagcagagctcaacagcagctgaactggcccacatactccaggaaccacatttccagtccttgcttgagacacatgattcagtggcatcaaagacgtacgaaactcctccccctagccctggattggaccctacctttagtaaccaaccagtgccaccagatgctgtacggatggttggcatcaggaagactgcaggttag

SEQ ID NO: 123960 - DNA, 1626 bp, synthetic construct
  misc_feature 1..1626: note = Description of Artificial Sequence: Synthetic coding sequence
  source 1..1626: mol_type = other DNA
atgcagcaggtattggacaaccttggaagcctcccatctgccacaggagccgccgagctggatctgatcttcctgagggggattatggagtccccaatcgtgcgatctctggcgaaagctcacgagcgattggaagaaacaaagctggaagcagtcagagataacaatctggaactggttcaggagattctccgcgatctcgcccatgtcgcagaacaatccagcaccgccgcggagctggcccatatcctgcaggaacctcacttccaaagcttgctggagacccatgactctgttgcctcgaaaacttacgaaacccccccaccttctcccggactggatcccacattctctaaccagcccgtgcctccggacgccgtgcggatggtaggtatcaggaagaccgccggtgaacatttgggcgtcacctttcgcgtggaggggggggagctcgtgatagctcgcatcctgcacggcggcatggtggcccagcaggggcttctgcacgtgggggacatcattaaagaggtaaatggacagccagttggaagtgatcctcgagccctccaagagctgcttcggaatgcgtctggctctgtcatattaaagattctgcccagctaccaggaaccgcatttacctagacaggtattcgttaaatgccactttgactacgatcccgctagagacagtctcatcccgtgtaaggaggctggcttacgctttaatgcaggtgatcttttgcagatcgtcaaccaggacgacgccaactggtggcaggcttgccatgtggagggaggctccgcaggtctgatcccatcacagctattagaagaaaagagaaaggccttcgttaagcgcgatctcgaacttacgcccaacagcggtaccctctgtgggagcctctctggaaagaagaaaaagaggatgatgtatcttaccaccaagaacgccgaatttgacaggcatgaacttctcatctacgaggaggtggctcgcatgcccccattccggcgtaagaccctggtcctgattggagcccagggagtgggacggcggagcctgaagaacaagttaatcatgtgggatcccgatcgctacggaactaccgtcccctacacaagcagacggccgaaagatagtgaacgcgaaggccaggggtacagctttgtgtccaggggggagatggaggccgacgtgcgtgccggccggtatctcgagcatggagagtacgaaggcaatctgtacgggacgcgcatagactccatccggggcgtggtcgcagctggtaaggtgtgcgtgcttgacgtgaaccctcaggccgtaaaggtcctacggacagctgagttcgtgccatatgtagtcttcattgaggcgcctgatttcgagaccttgagggcaatgaatcgtgcagctcttgaaagtggaatttcaaccaagcagttgactgaggccgatctgagaaggaccgtcgaggaatcaagtcggattcagagaggctatggccactactttgacctctgcctcgtaaacagcaacctggagcggaccttccgcgaactgcagacagccatggagaagctgcggactgagccacagtgggtgcctgtgagctgggtgtactag

SEQ ID NO: 123961 - DNA, 1167 bp, synthetic construct
  misc_feature 1..1167: note = Description of Artificial Sequence: Synthetic coding sequence
  source 1..1167: mol_type = other DNA
atggaacttcagtacccacccccaccgccgagccctcgcatttgccgggaaaggtctggaggtgataacgcatctatgccagttctgagcgaagactcaggactccatgaaaccctggcgctgctaacaagccaactgcgccctgacagcaaccataaagaggaaatgggctttctcagagacgtcttttcggagaaatccctctcgtacctgatgaaaattcacgaaaagctccgttactatgagcggcaatcccctacaccagtgctccatagcgccgtggctttggccgaagatgttatggaggagctccaggcggcctcggttcattcagacgagcgtgaactgcttcagctattatcgaccccacatctacgggccgtactgatggtccacgatactgtagctcagaagaacttcgacccagttctacctcccctgcctgacaatatcgacgaagacttcgacgaagagtcagtaaaaatcgtgaggttagtgaaaaacaaagagcccttgggcgccactattagaagggacgaacactcaggcgcggttgtggtcgcacggatcatgcgtggcggtgcggccgatagaagtggactggtgcacgtgggcgacgaactacgcgaagtcaacgggatagcagtgctgcacaagcgaccggatgaaatctcccaaatcctggcccagtcgcaaggatccatcacccttaaaataattcccgccacgcaagaggaggaccgcttaaaagagtcgaaggtcttcatgagagctttatttcactataatcctagggaggatcgtgccataccctgccaagaggcaggacttccctttcagcggcggcaagtgttggaagtggtgagccaagatgaccccacctggtggcaggctaagcgcgttggcgacaccaacctaagagctgggcttatcccatctaaaggatttcaagagcgcagactcagctaccgtcgtgcctatggaactcccatttctccacagtttagccagcccaagcaagagctgtcgctgccaaggcattgggcgcccacccagcttttaccgtcatgtggagcccattgccccggaggaaagggcacccatacgccgaccctgatccccattctgctgagtcctagtctccaactcgaattcatccaatattag

SEQ ID NO: 123962 - DNA, 1758 bp, synthetic construct
  misc_feature 1..1758: note = Description of Artificial Sequence: Synthetic coding sequence
  source 1..1758: mol_type = other DNA
atgccagtgctgagcgaggactccggactccatgagacactggccctgttaacatcacagctcagacccgatagcaaccacaaggaggaaatgggttttttgagggatgtgttctcggaaaagtcattgtcgtatctgatgaagatccacgaaaaacttcggtactatgagcggcagtctccaactcccgtcctgcactcagccgtggccctcgccgaagatgtaatggaggagttacaagctgccagtgtgcactcagacgagcgagagctcctgcagctgctctcgacgccccacctgcgtgcagtcctcatggtgcacgacacggttgcacaaaagaattttgatccagtcctgcccccgctacctgataacatcgatgaagattttgatgaggaatcagtgaaaatcgttaggttggtgaaaaataaggagccacttggcgccacgatacgcagagacgagcattccggagccgttgtggtcgctcgcatcatgagaggaggcgctgccgacagatctggccttgtacatgtgggcgacgaattacgcgaagtcaatggcattgccgtgcttcataagcgcccagacgagatttcgcagattcttgctcagtcccaaggtagtatcactctgaaaatcatccccgctacacaggaagaagatcggctcaaggagtccaaagtattcatgcgcgcactgttccactataatcctagggaagacagggcaattccatgtcaagaggctggcctccccttccagcgacggcaagtgctcgaggtggtgtctcaggacgacccaacctggtggcaggctaaacgagtgggggataccaacctgcgggcaggactgattccgtctaaaggcttccaggaacgacggctcagctacagacgagcggctggtaccctcccatcaccacagtcgctgaggaaacccccttatgaccagccttgtgataaagagacgtgtgattgtgaagggtaccttaaggggcattatgtagcaggcttgagaagatccttccggctgggttgcagagagcgactgggtggctcacaggagggaaagatgtcttcgggagccgagagccctgagttattgacttatgaggaagtagcaagatatcaacaccaaccgggggagaggcctaggttggtagtcctaataggcagcctgggagcacgactccatgagcttaaacaaaaagttgtggccgagaatccccaacattttggtgtcgctgtgccacacacgacacgaccaaggaagtcgcacgaaaaggaaggcgtggaataccatttcgtgagtaagcaggcatttgaagccgacttgcaccacaataaatttttggagcatggagaatataaagaaaacctgtacgggactagtctggaggccatccaagccgtcatggccaagaacaaagtttgcctcgtggacgtggagcccgaggccttgaagcagctgcgaacaagcgaattcaaaccttacatcattttcgtgaagcctgccatccaggaaaagagaaagaccccccctatgagccctgcctgtgaagacaccgctgcccctttcgatgagcagcagcaggaaatggcggccagcgccgccttcattgaccggcactatggccacttggtggacgcagtgctggttaaggaagatctacagggagcttactcccagctcaaagtggttctggaaaaactgagcaaagacacccattgggttcctgttagctgggtcagatag

SEQ ID NO: 123963 - DNA, 1833 bp, synthetic construct
  misc_feature 1..1833: note = Description of Artificial Sequence: Synthetic coding sequence
  source 1..1833: mol_type = other DNA
atggaattgcagtacccccctccacctccctccccccgcatatgcagggaaaggtctggaggcgataacgcaagcatgccagttttgagcgaggacagcggcctgcacgagactctggccttactcacttcacaactaagaccagactctaatcataaggaagagatgggattcctgcgcgacgtgttctcagagaaatctctgtcttaccttatgaagattcatgaaaagctgagatactatgaaagacagagccccaccccggtgctgcactcagcggttgctctggccgaggatgtaatggaagaacttcaagctgcctccgtgcatagtgacgagcgtgagctgctgcagttgctgagcacccctcacctgagggccgtgcttatggtgcacgatacggtcgcccagaagaacttcgacccggtcctaccacccctcccagataatatagatgaagattttgatgaagagagcgttaaaatagtacggctagtgaagaataaggaacccttgggcgccactatccggcgcgatgaacactccggggctgtggtcgtagccaggatcatgcgaggcggcgccgccgaccgcagtgggctcgtgcacgtgggcgacgagcttcgcgaggtgaacggcatcgcggtcctccataaacggcctgacgaaatctctcagatcctcgcccaatcacagggatccatcacattaaagattattcctgctacacaggaagaagatcgcctcaaagaatcgaaggtctttatgcgggccctgttccactacaatccacgagaggatagggccataccttgtcaggaggccggtctccccttccagcggcggcaggtcttagaggtcgtgtcacaggacgacccgacatggtggcaagcgaaacgggttggagacaccaacctccgggcgggcctgattccctctaaaggatttcaggaacggcgactaagctacagaagggcagctggcactctgcctagtcctcagtcacttcggaaaccaccctacgatcagccctgcgataaagaaacgtgtgactgtgaggggtatctgaaaggccactatgtcgctgggctgcgaagaagctttaggctcggctgtagagagcgcctggggggttcacaagagggtaagatgagctccggggccgaatccccggagttgctgacttacgaagaagtggcgaggtatcagcaccaacccggcgagagacctcggctggtcgttctgatcggaagcctgggagcaagactgcatgaacttaagcagaaggtagtggccgagaacccccagcacttcggagtggccgttccccatacaacacggcctcgcaagagtcacgagaaggaaggagtggagtatcacttcgtctccaagcaggctttcgaggctgacctccaccacaacaagttcctagagcatggcgagtacaaggagaacctttacggtacttctcttgaagctattcaggctgtaatggctaagaacaaagtatgtctggtggacgtcgaaccagaggcactgaagcagcttcgaacctccgaatttaagccgtatattatcttcgtgaagccggccatccaggagaaacgaaagacgcccccaatgtcgccagcctgtgaggataccgcagcacctttcgacgaacagcagcaggaaatggccgcctctgccgctttcatcgatagacactacggccatctcgtagatgctgtgttagtaaaagaagacctgcagggggcatattctcaattgaaggtggtgctcgagaaactctcaaaagatactcattgggtgcccgtaagctgggtgagatag

SEQ ID NO: 123964 - DNA, 1782 bp, synthetic construct
  misc_feature 1..1782: note = Description of Artificial Sequence: Synthetic coding sequence
  source 1..1782: mol_type = other DNA
atgatccagtctgacaaaggtgccgatccacccgataaaaaagacatgaaactgtcgaccgctaccaacccacaaaatggtctctcgcagatcctcagactagttctccaggagctgtcactgttttatgggagggacgtgaatggtgtgtgcctgctctatgatttgcttcattccccgtggctgcaggctctactgaagatctatgattgcttgcaggagttcaaggaaaagaaattagtacctgcaacaccccacgcccaggtactgagttatgaggtagtggagcttctcagagaaacccctacctcccccgagattcaggagcttcgccagatgctccaggccccacactttaaggccctgctgagcgctcatgacaccatcgcacagaaggactttgaaccactgctcccgccccttccagataacatcccagaaagtgaagaggccatgaggatcgtgtgcttggtcaagaatcagcagcccctgggagcaacaattaagcgacacgaaatgaccggagacatactagtcgcacgcattatccacggggggctcgctgaacgctctggattactgtacgcaggagacaagcttgtcgaggttaatggagtttccgtagaaggcctggatcctgagcaggtcattcatatcctggcgatgagtcggggcacgattatgtttaaagtggttcctgtatcggatcctcccgtgaactcacagcaaatggaccctgatattccatgcatggatgccggcttgccattccagaagggggacattcttcagatcgtcgaccaaaacgatgctttgtggtggcaggctcgcaaaatatccgatcccgccacctgcgctggactggtcccttcgaaccatctgctgaagcgaaaacagagagagttctggtggagtcagccatatcagccccatacatgcctcaagtcaaccctctataaggaggagttcgtcgggtatggacagaaattttttatagctggatttaggcggtctatgcggctgtgccggcggaagtctcacttgtcccccttgcatgcttcagtttgctgcactgggagctgctactctgccgtgggggcaccctacgaggaagtggtgaggtatcaacgtaggccctccgacaagtatcgactgatcgtgttgatggggccttctggcgtgggcgtgaatgagttgcgccgccagctgattgagttcaacccttctcacttccagagcgcagttccacatactacccgcacaaaaaaaagctatgagatgaatggaagagagtaccactatgtctctaaggaaacctttgagaacttgatttatagtcatcgcatgttagaatatggtgaatataaaggccacctgtatggcacaagcgtcgatgctgtccagacagttctcgtcgagggcaaaatctgcgttatggatctggaacctcaagacatacaaggtgtgcgtacccacgagttaaaaccgtacgtgatctttattaagccttctaatatgcggtgtatgaagcagagcaggaagaatgccaaggtcattactgattattatgtggatatgaagtttaaagatgaggacctccaggaaatggaaaaccttgctcagagaatggaaactcagttcggccagttcttcgaccatgttattgtgaacgacagcctccatgacgcgtgtgcacagttgctctctgctatccagaaggctcaggaggaacctcagtgggttccagccacttggattagttccgatacagagtctcagtag

SEQ ID NO: 123965 - DNA, 1809 bp, synthetic construct
  misc_feature 1..1809: note = Description of Artificial Sequence: Synthetic coding sequence
  source 1..1809: mol_type = other DNA
atgattcagagtgataaaggggctgatccgcctgacaaaaaggacatgaaattgtcaaccgcaacaaacccccaaaacggcttatcacagatcttgagactcgttcttcaggaactgtctctgttctatggcagggatgtgaacggcgtatgcctcctttacgacctgctacattcgccttggcttcaggcgctactcaagatttatgattgtctgcaggagtttaaggaaaaaaaactggtcccagcgactcctcatgctcaagtattaagttatgaggtggtggaacttctgcgagaaaccccaacctctcccgagatacaagagctcaggcagatgcttcaagcgccccattttaaaggagccacaataaagagacacgagatgaccggcgacattctggtggctaggatcattcatggtggactagccgagaggtctggcctgctatatgctggtgacaagttggttgaggttaatggcgtgtctgtggaaggtctcgaccccgagcaggtgatacatatactcgccatgagccgagggaccattatgttcaaggtggtgcccgtgtctgaccctcctgtgaatagccagcaaatggtttacgtgagagcaatgacggagtactggccacaggaggacccagatatcccatgcatggacgccggtctcccctttcagaaaggggatattctccagatcgtcgaccagaatgacgcgctctggtggcaggccagaaaaatctcggaccctgctacgtgcgccgggcttgtgccgtcaaaccacttgttaaagcggtggtccttcgcccttgtggcacaggcgggagtgcaatggcattacttagattccctccaacccctccccccagggttcaagcggttctcgtgtctgtccctgcctcgatcatgggactatattgaggacgatatgaaaattgatgaaaaatgcgtggaagctgagaaagagagtattgagaccgacaaggaagagttcgtgggttatgggcagaagtttttcattgcgggctttcgccgctccatgcggctctgccggcggaaatcccacctgagtcccctgcacgccagcgtgtgctgtaccggtagctgctacagtgccgtgggcgccccttatgaagaggtggtccgataccaaaggcgtcctagtgacaagtaccgcctaatagtactgatgggaccatccggagtgggtgtcaatgagctcaggagacagttaatcgagtttaacccatcccacttccagtctgccgtcccccataccacccgcaccaagaaatcttacgaaatgaatggcagggagtaccactacgtctccaaagaaacatttgaaaacctaatctactcacacagaatgctagagtatggggagtacaaggggcatctatacggaaccagtgtggatgcagttcagaccgttctggttgagggcaagatttgcgtgatggatcttgagcctcaggacatccagggcgttagaacacacgagctgaagccctatgtcatctttatcaagccaagcaacatgcgttgtatgaagcagagtcgaaaaaatgcaaaggtgattacagactactacgtcgatatgaaatttaaagatgaggatctccaggaaatggagaatctggcccagaggatggagacgcagtttgggcagttctttgatcacgtgattgttaatgattccctccacgacgcctgtgcgcagctcctgagtgccattcagaaggcacaggaagagccccaatgggtccccgccacatggatcagctccgataccgagtcccagtag

SEQ ID NO: 123966 - DNA, 1914 bp, synthetic construct
  misc_feature 1..1914: note = Description of Artificial Sequence: Synthetic coding sequence
  source 1..1914: mol_type = other DNA
atgatccagtccgacaaaggcgccgatcctcctgacaagaaagacatgaagctgtcgactgctaccaatccccaaaatgggctcagtcagattttacgactagtactgcaagaactctctctgttttatggccgggacgtgaacggcgtttgcctcctctacgatttgctccacagcccctggctgcaggccttacttaaaatttatgactgtcttcaggagtttaaagagaaaaaattggtccccgctaccccacacgcacaggtgctttcctacgaggtggtagagcttctgagagaaaccccaacgagcccagagatccaggaactcaggcagatgctgcaggccccacatttcaaggctctcctcagtgctcacgacacaattgcccaaaaagatttcgaaccacttcttccaccactcccagataatatcccggagtcagaagaagcaatgagaatcgtatgtcttgtcaagaatcaacagccactgggcgcgactataaagcgccatgaaatgaccggcgatattctggtggcacgcataattcatggcgggcttgcggagcgatcaggtcttttgtatgctggagataagctcgtggaggtgaatggggtgtctgtggaggggctggaccccgaacaagtgattcacatactggcgatgtcccgcggaactataatgttcaaagtggtgccagtgagcgatccgcccgtgaactcacagcaaatggtgtatgttcgagccatgactgaatactggccacaggaggaccccgacattccttgtatggatgcagggctgcctttccaaaaaggagacattctgcaaatcgtcgaccaaaatgatgcactgtggtggcaggcaaggaaaatctctgatcccgccacctgtgccggactcgtgccctcgaatcatctcttgaagagaaagcaacgagaattctggtggtcccagccttaccagcctcatacctgtctgaagagtaccctgtcaatttcgctgaaaggcgaagacgatatgaaaattgacgagaaatgcgtcgaagccgagaattcaacagccgagagcgaggagctaaacagtgacaaagaagagttcgtgggctacggccagaagttcttcatcgctgggtttagacggtcaatgaggctctgccgacgtaagagtcacctgtctcccctgcacgccagcgtgtgttgtacaggctcctgctacagtgcagtgggagccccctacgaagaggtggtacgttaccagcggaggcccagtgataaatatcgcctgatagttctcatgggcccctccggagtgggcgtgaacgagctgcggaggcaactgattgaatttaacccttctcactttcagagtgccgtcccacacacaaccagaacaaaaaaatcatatgagatgaatggccgcgagtaccactatgtgagtaaagagacttttgagaacttaatttattcccacaggatgttagaatacggagagtacaagggtcatttgtatggaacgtccgtagacgcggtacagaccgtcctggttgagggtaagatttgtgtcatggatctagaacctcaggatatacagggggtgcgtacacatgaattaaagccctatgttattttcatcaagcctagcaacatgagatgtatgaagcagagtagaaagaacgctaaggttatcaccgattattatgtggacatgaaattcaaagatgaggacttacaagaaatggagaatctggcccagcggatggagactcagttcggccaatttttcgaccatgtgattgttaatgactcactgcacgacgcatgcgcgcagctgttgagcgctatccagaaagcacaagaggaaccgcagtgggttcctgctacgtggatcagtagtgataccgaaagccagtag

SEQ ID NO: 123967 - DNA, 1701 bp, synthetic construct
  misc_feature 1..1701: note = Description of Artificial Sequence: Synthetic coding sequence
  source 1..1701: mol_type = other DNA
atgattcagtccgacaagggcgccgacccacccgataagaaggacatgaagcttagtaccgccaccaatccgcagaatggcctaagtcaaattctgcgattggtgttgcaggaactgtccctcttttacggccgggatgtgaatggggtgtgcctcctatacgaccttctgcattccccttggttacaggccctcctcaaaatttacgactgcctgcaggagttcaaagagaaaaaactcgtgcccgcaactccccatgcacaggtcctgtcctatgagggggccacaatcaaacgtcacgaaatgacaggcgatatactcgtagctcggattattcatggaggactggctgagcgatccgggctcctttacgcaggcgacaagctggtggaggtaaacggagtgtctgtggaagggctcgatcctgagcaagtgattcacattctggcaatgtctagaggcaccattatgttcaaagtcgtgccagtgtccgacccccccgttaactcacagcagatggtgtacgtgagagctatgacagaatattggccgcaggaagaccctgacatcccatgcatggatgccggcctgccgtttcagaaaggggacattctacagattgtcgaccagaacgatgcattgtggtggcaagctagaaagattagcgacccggcgacttgtgctggactggttccctcaaaccacttgctcaagcgcaaacagagagaattctggtggagtcagccataccagccacacacttgtctcaaaagcactctctcaatctcactgaaaggcgaagacgatatgaagattgacgaaaaatgcgtggaggcggagaatagcaccgccgagagcgaggagctcaatagcgataaggaagagtttgtgggatatggacaaaaattcttcatagcaggctttcggcggagcatgcgactgtgccggaggaagtctcacctgagtccccttcacgccagtgtatgctgcactggctcctgttattccgcagtaggcgctccctacgaggaggttgtgagataccaacgtcgccccagcgataaatatcgactgatcgtgctgatggggccaagtggcgttggagtgaacgagctgcggcgtcagctcattgagtttaatccatcccactttcagagcgcagtgccacatactaccaggacaaagaaatcatacgagatgaacggaagggaataccactacgtctctaaagaaaccttcgagaacttgatatattcccaccggatgctcgaatacggtgaatacaagggccatttgtatggaacatctgtggacgccgttcaaacagtccttgtggaaggtaaaatatgtgtgatggacctggagccccaggacatccaaggggtcaggacccacgagctgaaaccttatgtgatatttatcaaaccctcgaatatgcggtgtatgaagcagagccgcaagaatgccaaagtgatcacagattactacgtggacatgaagtttaaagacgaggatctccaagagatggaaaatttagcgcagcgcatggagacacagttcggccaattctttgatcacgttattgtgaacgatagtctgcacgatgcatgcgcgcagctgcttagcgccatccagaaggcacaggaggagcctcagtgggttcccgctacttggatctcctctgacaccgagagccagtag

SEQ ID NO: 123968 - DNA, 1914 bp, synthetic construct
  misc_feature 1..1914: note = Description of Artificial Sequence: Synthetic coding sequence
  source 1..1914: mol_type = other DNA
atgattcagtctgacaagggggctgacccaccggacaaaaaagacatgaaactgtcaaccgcaactaacccccagaatggtctttcacagatccttcgcctggttctccaagagctgtcgttgttctatgggcgcgacgttaacggggtgtgcctcctgtacgacctgctacactcaccatggttgcaggccctccttaaaatttacgattgcctacaggagttcaaagaaaagaagttagtgcccgctacgccccatgctcaggtgctaagctacgaagtcgtagagctgctgagagagactccaactagccccgaaattcaggaactacgtcagatgctccaggccccacactttaaggctctgttgagcgcccatgacactatcgcacagaaggatttcgagccgctcctgccacctctccccgacaacatccctgagagcgaggaagctatgagaatcgtatgtttagtgaaaaaccagcagcctctgggagctacaattaagcggcatgaaatgaccggcgacatactagtggcccggattatccacggaggtctggctgagcggtctggcctgctctacgcgggcgacaaactcgtggaggtgaatggtgtctcggtggaaggtctcgatcctgagcaggtaatacatattctggccatgagccggggcacgattatgttcaaggtcgtcccagtgagtgatccgccagtgaattcgcagcaaatggtctacgttcgcgctatgaccgaatactggcctcaggaggaccctgatatcccttgtatggatgctggcttgccctttcagaagggagacattctgcagattgtggatcagaatgacgcgctgtggtggcaggcacgaaaaatttcagacccagccacctgtgcaggtctggttccctcaaaccacctgctaaagcgcaaacagcgggagttctggtggtctcaaccttatcaaccgcatacatgtctgaaatccaccctttctatcagtatggaggaagaagacgacatgaagattgatgaaaagtgcgttgaggccgacgaggagacattcgaaagcgaggagttgagcgaagacaaggaggagttcgtgggttatggccagaagttctttatcgccggattccgtcgctctatgagattatgccgccgaaaaagccacctgtcacccctccacgcaagcgtctgttgcactggtagctgctatagcgctgtaggcgccccgtatgaagaagtggtgaggtaccagcgcaggccatcagacaaatatagacttatcgtactcatgggtccctcgggcgtgggcgtcaatgaactgagaaggcagctgatcgagtttaatccttcccacttccagagcgccgtgccccacaccacccggacaaaaaagagttacgagatgaacggtagggaataccattacgtatccaaagaaaccttcgaaaatctcatttactcccatagaatgctggagtatggggagtacaaaggccacctctatgggacttcggtggatgccgttcagactgtgctcgtggaaggaaagatctgtgtgatggacctcgagccacaggatatccagggcgtgcgaacccacgagttgaagccctacgttatctttattaaaccctccaatatgaggtgtatgaagcagtcccgcaaaaacgccaaggtgatcactgactactacgttgatatgaagttcaaggatgaggatctccaggagatggaaaacttagctcagagaatggagacgcaatttggccagtttttcgatcatgtgattgtgaatgactctctgcacgacgcttgtgctcagctgctgtcggccatccagaaggcacaggaagagccacagtgggttcccgcgacttggatctcctcagacacggaaagccaatag

SEQ ID NO: 123969 - DNA, 2028 bp, synthetic construct
  misc_feature 1..2028: note = Description of Artificial Sequence: Synthetic coding sequence
  source 1..2028: mol_type = other DNA
atgaccacttctcacatgaatggccacgttaccgaagagagcgattcagaagtcaaaaacgtggacctggcttcgcctgaagagcatcagaagcatagagaaatggcagtggattgtcccggagatctcggcacgaggatgatgcccatacggcgcagtgcccaattggaacggatcaggcaacaacaggaggacatgcggaggcgacgcgaggaagagggtaagaagcaagaacttgacctaaatagttcaatgcgactgaagaaactcgcccagataccccctaaaaccggtatagacaacccaatgttcgatactgaggaggggatcgtgctcgaatcccctcactatgccgtcaagatcttggaaattgaagacctgttctcaagcctgaagcacatccagcacaccctagttgacagccagagccaggaggatatttctctgctgctgcagctggtacagaataaggatttccagaacgcttttaaaattcataacgcaattaccgttcatatgaataaagcctccccccccttcccactcatttccaacgcacaggatctggcacaggaggtgcagaccgtgctgaagcctgtccaccataaggaggggcaggaactcacagctttgctgaatacaccccatatccaggctctcctcctggctcacgataaagttgccgagcaagagatgcagctcgaacccatcaccgacgagagagtgtacgagtctatcggccagtatggtggggagactgtgaagatcgtcagaatcgagaaggctagggatatcccgctcggcgcgacagtgcgaaatgaaatggattctgtgatcatctcgcgcatcgtcaaggggggcgcagctgagaaatccggcctgctgcatgaaggtgatgaagttttagaaatcaatggtatagaaatccggggcaaagatgtgaatgaagtctttgatttgctgtctgacatgcatggaactttaacattcgtgctcattcccagccagcagattaagccgcccccggcaaaggagaccgtgattcatgtgaaggcacattttgactatgatccatcagatgacccatatgtgccatgtcgcgagctggggctgtcttttcagaaaggggatattctgcacgttatttcccaggaggatcccaattggtggcaggcatatagggagggagacgaggataatcagccgctggctggattggtcccgggaaaatcgttccagcagcagagggaggccatgaagcagactattgaggaggataaagagcccgaaaaatccgggaagctctggtgtgcgaaaaagaacaaaaagaagaggaagaaggtcctgtacaacgcaaacaaaaacgatgactacgacaatgaggaaatcctaacttacgaggaaatgtcactgtatcaccagcccgctaatagaaaaagaccaattattcttataggccctcagaactgtggtcaaaacgaacttcggcagaggttgatgaataaggagaaagatagatttgctagcgcagtgcctcataccaccagatcaagaagagaccaagaggtcgctggtcgcgactaccacttcgtcagtcgtcaggcttttgaagccgatatcgccgctggcaaattcatcgaacacggcgaatttgagaaaaacctgtacgggacctccattgatagcgtgaggcaggtcattaatagtggcaaaatatgcctcttgtctcttcggacccagtccctcaagaccctaagaaatagtgatttgaaaccgtacattatctttatcgcacccccatcgcaagagcggctgagagccctgttggcgaaagagggtaaaaacccaaagcctgaagagctgagagagatcatcgaaaaaacgagagagatggaacagaataatggacattatttcgacaccgctatagttaacagtgacctcgacaaggcatatcaggaacttttgcggttgatcaacaaactggacactgagccacagtgggtgccatcaacctggctgaggtag

SEQ ID NO: 123970 - DNA, 1926 bp, synthetic construct
  misc_feature 1..1926: note = Description of Artificial Sequence: Synthetic coding sequence
  source 1..1926: mol_type = other DNA
atggccgtggactgtcctggggatctggggaccagaatgatgcctatccgcaggtcagcgcagctggaacgaattcggcagcagcaggaggacatgaggagaagaagggaggaagagggtaagaagcaggagctggacttgaactcttctatgcggttaaaaaaactggcccagattccgccgaagactggcatcgacaatcctatgtttgacacagaagaaggcatcgttctggaatctccacattatgctgtcaagatccttgaaatcgaagacctttttagctcacttaaacatatccagcacacgttagtggattcacaaagccaggaagacatctccttgctcctccagctggtgcagaacaaggacttccaaaacgcattcaaaatccataatgccatcaccgtgcacatgaacaaagccagcccccctttccctctgataagcaatgctcaagacctggctcaggaagtgcaaacagttctgaaacccgtgcaccacaaggagggccaagagctgactgcacttttaaatactccacatattcaagctctcctattggctcatgataaggtcgctgagcaggagatgcagcttgagccaattaccgatgagagggtttatgaatctataggtcagtatggaggcgaaaccgtgaagattgttcgcattgagaaggcaagagacattcctctaggcgcaaccgtcaggaacgaaatggactctgtgatcatcagtcgcattgtgaaaggaggagcggcggagaagtctggtttactgcacgagggggacgaggttctggaaatcaacggcatcgaaattcgcggaaaagacgtgaatgaagtgttcgacctcctcagtgacatgcacggaacactgacatttgtgcttatacctagccagcagatcaagccaccccctgcaaaggagacggtgattcacgtcaaagcccactttgactatgaccctagcgacgacccatatgtgccttgcagggaattggggttgagcttccagaagggcgacatcctccatgtcatttctcaggaagatccgaactggtggcaggcttatagagaaggagatgaagataaccagcccctcgcgggcctggtgccagggaaatcctttcagcagcagagggaggccatgaagcagacaatcgaggaggataaggagcctgagaaatcggggaagctctggtgcgccaagaaaaataagaaaaaaagaaaaaaggtgctatacaacgctaacaaaaacgacgactatgataatgaggagatcctgacatacgaggagatgtctctctaccaccagccggctaacaggaagaggccaataatcctgatcggaccgcagaattgtggacagaatgagctccgccagaggcttatgaacaaagagaaagatcgtttcgcgagcgctgtgcctcacactaccagatcccgccgtgatcaggaggtggctgggagagattatcactttgtgagccgccaggcctttgaggcagatatcgctgctggcaagtttatcgaacatggggagtttgagaagaacctgtacggaacatcaatcgatagcgtgcggcaggtgattaattctggaaagatctgcctgttgtcactgcgcacccagagtctcaagacactgagaaattcggacctaaagccctacattatcttcattgcaccaccatcccaggaaaggttgagggccctgctggccaaggaggggaagaaccctaagcccgaagagcttagggaaataatagagaaaactcgtgagatggagcagaacaacggccattatttcgatacggcaatagtcaacagcgacttggacaaggcctaccaggaactgctgcgcctgatcaacaaacttgacactgaacctcagtgggtgccatccacatggctgagatag

SEQ ID NO: 123971 - DNA, 15 bp, synthetic construct
  misc_feature 1..15: note = Description of Artificial Sequence: Synthetic coding sequence
  source 1..15: mol_type = other DNA
atggcagtggactag

SEQ ID NO: 123972 - DNA, 450 bp, synthetic construct
  misc_feature 1..450: note = Description of Artificial Sequence: Synthetic coding sequence
  source 1..450: mol_type = other DNA
atggctgtggactgtccgggcgacctaggcacgaggatgatgcccattcgcagaagcgctcaactggagaggatcaggcagcaacaagaggacatgcgtagaaggagggaggaggagggaaagaaacaagagcttgacctgaactcttctatgcgacttaaaaaactggctcagattcctccaaagacaggcatcgacaacccaatgtttgacacagaggagggcattgtccttgagtccccccattatgccgttaagatactggagatcgaagacctctttagcagcttaaaacacatccaacacacactggtggattcgcagtcccaggaggacatttctctgctactccagttggtccagaacaaagatttccagaacgcctttaaaatccacaacgctatcacagtgcatatgaataaagcttctcccccatttccactaatttag

SEQ ID NO: 123973 - DNA, 870 bp, synthetic construct
  misc_feature 1..870: note = Description of Artificial Sequence: Synthetic coding sequence
  source 1..870: mol_type = other DNA
atgacaggcgttttcgatagacgggtgccttctataagatccggcgatttccaggcccctttccagacttctgcagccatgcaccacccaagccaggagtcacctaccctgccagagagctctgctactgacagtgactattactcccccactggcggggctcctcatggatactgcagcccgacctcggccagctacggcaaggcacttaacccttaccagtatcagtaccacggcgtgaatggctctgccggttcctatcccgccaaggcgtacgcggactattcatatgcgagttcataccatcagtatggtggagcctataatcgtgttccgagcgctaccaatcagcctgaaaaggaagttacagagccagaggtgagaatggttaacgggaagcccaagaaggtgaggaagcctcgaacaatttattctagctttcagttagccgctttgcaacgcagattccagaagacacagtatctggcactgccggagagggcagagctggcagcaagtttgggtctgacacagacccaggtgaagatctggtttcagaataagaggtcaaagataaaaaagattatgaagaacggcgagatgccccctgaacactcccccagttcttctgatcccatggcctgtaatagcccgcaatctcccgctgtgtgggaaccacagggctccagtcgctccctcagtcaccaccctcacgcccatccgcctacaagtaatcagtctcccgcttctagttatctggaaaactcagcttcttggtacacttctgctgcctcttcaataaactcccatctccccccaccggggtctttgcagcatccattagccctggcctcaggaactctctactag

SEQ ID NO: 123974 - DNA, 1623 bp, synthetic construct
  misc_feature 1..1623: note = Description of Artificial Sequence: Synthetic coding sequence
  source 1..1623: mol_type = other DNA
atgcagcaggttctagaaaacctgaccgagctgccgtcttcgaccggggccgaggaaatcgatttaatttttttaaagggcataatggaaaacccgattgtaaaatctctggccaaagcccacgagaggcttgaggatagcaaacttgaagcggtgtctgacaacaacttagagctggtgaacgagatcctggaggatattactcccctcatcaacgtggacgaaaacgtggcagagctagttggaattctgaaagaaccgcatttccagagtctgctggaagctcatgacattgtggcatcaaaatgttacgacagtcctccctcaagccctgaaatgaacaatagttccattaataatcagcttctacccgtggatgccatccggatcttgggaatacacaaaagagctggcgagcccttaggagtgaccttccgggtggagaataatgacctggtaatcgcccggatcctccacggtggcatgattgatcgccagggattgctccacgtgggggacattatcaaggaagtgaacgggcacgaggttggaaacaatccgaaagagctgcaggaattgctcaagaatatcagtgggagtgtgacactcaaaatactcccatcctatcgcgacaccatcacccctcagcaggtgttcgtaaaatgtcactttgattacaacccctataatgataaccttatcccctgcaaggaagccgggctgaagttctccaagggcgaaattctacaaattgtgaatcgcgaggaccctaactggtggcaagcctcacacgtgaaagaagggggctctgcaggcttgatccctagccagtttctggaagagaagaggaaggccttcgtgcgaagagattgggacaattccggacctttttgcggcactatctccagcaaaaaaaagaagaagatgatgtacttaaccacaaggaatgctgagtttgatagacatgagattcaaatctacgaagaagtcgcaaagatgcccccttttcagcggaagacgctcgtcctgattggggcgcagggggtgggcaggagaagcttgaaaaaccgattcattgttttgaaccccaccagattcggtacgaccgtcccatttaccagccggaagccccgcgaggatgagaaagatggacaggcatataaattcgtgtctcgctcagaaatggaagccgatataaaggccggtaagtatctggagcatggagaatatgagggcaacctgtatggaacaaagattgatagcatcctcgaggttgtgcagactggaagaacatgtattctcgacgttaatccccaggccctgaaagtgttgaggacctctgagttcatgccgtacgtggtgtttatcgcggcccccgagctcgagactctccgggctatgcacaaggccgtggtcgacgctgggataacaactaagttgttgacggattcggatttaaaaaagactgtcgatgagtctgcacggatccagcgagcctataatcactacttcgatctcataattattaacgataatctggataaggccttcgaaaaattgcagaccgctatcgaaaaattgcgtatggagcctcaatgggttcccatttcttgggtctattag

SEQ ID NO: 123975 - DNA, 1287 bp, synthetic construct
  misc_feature 1..1287: note = Description of Artificial Sequence: Synthetic coding sequence
  source 1..1287: mol_type = other DNA
atgaataactcatcaattaataaccaacttctccctgtcgatgcgattcgcattctgggcatccataagcgcgctggagagccgctgggggttacatttagggtcgagaataatgacctggtgattgctcggatcctgcatggcgggatgatcgaccggcaaggcctgttacatgtcggggatataatcaaggaagtcaacggtcatgaggtcggcaataatccgaaagaattacaagagctcctcaagaatatctctggatcagtgaccctcaagatcctcccatcatacagagacactatcactcctcagcaagtgtttgtgaagtgtcactttgattacaacccttataatgacaacctaattccatgtaaggaagccgggttgaagttctctaaaggggagatcctgcaaattgtgaatcgcgaagatcccaactggtggcaggcaagccacgtaaaagagggcgggtccgcaggtctcataccaagccagttcctggaagagaagagaaaagctttcgtaaggcgtgactgggataacagcgggcccttctgtggtaccattagctcaaagaagaaaaagaagatgatgtatcttacaacgcgcaatgccgaattcgatagacacgagatccaaatttatgaggaggtcgctaaaatgccccccttccagcggaagactctggtgctgattggggctcagggggtgggccggaggtcacttaagaataggtttatcgtgctgaaccctacaaggttcggcaccacagtcccttttaccagtagaaaaccccgggaggacgagaaggacggacaggcgtataagtttgtgtctaggtccgaaatggaggccgacatcaaggctgggaaatacctggagcatggagagtatgagggcaatctttatggaacaaaaatcgactctatcttggaggtggtgcaaacaggcagaacttgcattttggatgtgaatccccaggccctgaaggtgctccgaacctcagagttcatgccctatgtagtatttatagccgctccggaactggaaacgttgagggccatgcataaggcggtcgtcgacgctggcataaccactaaactgctgactgactccgatcttaaaaagactgtagacgaatctgctcgtatccagcgcgcgtataatcattatttcgacttgatcatcatcaacgacaatttggacaaggcatttgagaagctgcagacagcaatagaaaagttgcggatggaaccacaatgggtgccaatctcatgggtatactag

SEQ ID NO: 123976 - DNA, 924 bp, synthetic construct
  misc_feature 1..924: note = Description of Artificial Sequence: Synthetic coding sequence
  source 1..924: mol_type = other DNA
atgcagcaggtattggagaacctgaccgagctcccctcatcgacaggcgcagaggaaattgatttaatatttctgaagggcatcatggaaaacccgatcgttaagtccctggctaaagcgcacgagcggctggaggattctaagctggaggccgtgagcgataacaatcttgaactggtgaacgagatccttgaggacataactccactgatcaacgtggatgagaatgtagcagagttggtgggaatcctcaaggaaccccactttcagagcctgctggaggcacacgatatcgtggcaagcaaatgttatgactcccccccctcctcacccgaaatgaacaatagcagcatcaataatcaacttctccctgttgatgccataagaattctggggatccataaacgcgcaggtgaaccgcttggagtgacgtttagagtggaaaacaacgacctcgtgatcgcccggatacttcatggaggcatgatcgacaggcagggccttcttcatgttggcgacattattaaagaagtgaacggtcatgaagtgggcaacaaccccaaggagctccaggagcttctcaagaatataagcgggagcgttaccctcaaaatcctcccatcttaccgggacacaatcacacctcaacaggtgtttgtaaaatgccatttcgattacaatccctataatgacaatttaattccttgcaaagaagcgggcctgaaattctcaaaaggcgagatactgcagattgtcaacagggaggatcccaactggtggcaggcatcccacgtaaaagagggaggctctgccggactgatccctagccaattcctcgaggagaagcgaaaggcttttgtacgtagggattgggacaatagtgggccattttgcggaacgatcagctctaagaaaaagaagtag

SEQ ID NO: 123977 - DNA, 654 bp, synthetic construct
  misc_feature 1..654: note = Description of Artificial Sequence: Synthetic coding sequence
  source 1..654: mol_type = other DNA
atgcagcaagtgctagagaacttaactgagctgccttccagcaccggtgcggaagaaatagatctcatattcctcaaaggaattatggagaacccaattgtgaaaagccttgccaaagcccatgagcgtttggaagactccaagctcgaggctgtgtcagacaacaacctggaacttgtgaatgagattttggaagatatcaccccactcattaacgtcgatgagaacgtcgctgaactggtggggattctgaaggaaccacatttccagtctctgctggaggcccacgacatcgttgccagcaagtgttatgattccccccccagctcaccggaaatgaataattcctcgatcaataatcagttgctgccggtggatgccatccgaatcctgggcatccataaaagagcaggggaacccctaggcgtgacctttcgagtggagaataacgatcttgtcatcgcccgcattctgcacggcgggatgattgaccgccaagggctgctgcatgtcggcgatatcatcaaagaggttaatggccacgaagtgggaaataaccccaaggagctgcaggaactcctcaaaaatatcagcggtagcgtgactctgaaaatcctgccctcataccgagacacgatcacgccacagcagtag

SEQ ID NO: 123978 - DNA, 1731 bp, synthetic construct
  misc_feature 1..1731: note = Description of Artificial Sequence: Synthetic coding sequence
  source 1..1731: mol_type = other DNA
atgcccgccctgtccacaggttcgggaagtgatacaggcctgtatgagctgctggcggccctgccagcccagctgcagccacacgtcgatagccaagaagatctcacgttcttgtgggacatgtttggcgaaaagtctctccactctctcgtcaagatccacgaaaagctgcattactacgaaaaacagagcccagtcccgattcttcatggcgccgctgccttagctgatgatctggccgaggaactccagaacaagccattgaactctgaaatccgagagctgcttaaactcctgagcaaacctaacgttaaagcactgctgtctgtacatgacacggtcgcccagaagaattacgaccctgtgctgcctcctatgcccgaggacatagacgacgaagaagactcggtaaagatcatcagactggtgaagaaccgggaacccctcggcgctacgatcaagaaggacgaacagactggagcgataatagtggcgcgcattatgaggggcggcgctgcagaccggagcggactgatacatgtgggcgacgagttgagggaggtgaacggtattccagtggaagacaagcgtcccgaggaaattatacagatacttgcccagagccaaggagctatcacgtttaaaattatcccagggtccaaggaggaaacacctagcaaggagggtaagatgtttatcaaggcccttttcgattacaacccgaacgaagacaaagctatcccttgtaaagaggccggtttgtccttcaagaagggagacattctgcagattatgagccaggacgacgctacctggtggcaggctaagcatgaggctgatgcgaaccctcgggccgggctcattccctccaagcactttcaggagaggagactagccctccgccgtccagaaatcctggtgcagcctctgaaggtctctaatcgaaaaagtagtggcttcagaaagagttttcggctcagccgtaaggataagaaaactaataaatccatgtatgagtgtaaaaagtccgatcaatacgataccgccgacgtgcccacttatgaagaagtgacgccttatcgcaggcagaccaatgaaaaatatcgtctagttgttttagtgggcccggtgggagtgggactaaatgaactgaagcgcaagctgctgatttcagacacccagcactatggagtgacagtcccgcacactactagagctcggagatcccaggaatccgacggggtggaatacatctttatctccaagcatctcttcgagactgatgtgcagaataacaagtttatcgagtatggtgagtacaaaaacaactactacggcaccagcattgacagcgtgcgttcagtgttggcgaaaaacaaggtatgcttgctagatgttcagcctcacaccgttaagcatcttcgtacccttgagtttaagccgtatgtcatttttatcaaacctccatcaatagagcgacttcgtgaaacacgcaagaatgccaagatcatctctagccgagatgatcagggggcagctaagcctttcactgaagaggattttcaggaaatgatcaaatctgcacagattatggagtcccagtacggccacctatttgacaaaataattattaatgacgacctcaccgttgcgttcaacgagctcaaaacaacctttgacaagctggagaccgagacacattgggtcccagtgagctggctgcattcgtag

SEQ ID NO: 123979 - DNA, 1731 bp, synthetic construct
  misc_feature 1..1731: note = Description of Artificial Sequence: Synthetic coding sequence
  source 1..1731: mol_type = other DNA
atgcctgccctttcaaccggttctggctccgacaccggcctttacgagctgctggccgcgttacctgcccaactgcagcctcacgtggacagccaagaagatctcacattcctctgggatatgttcggagagaaatcacttcatagcttggtgaagatccatgagaagctgcactattatgagaagcagtccccggtgcctatactgcacggcgctgccgccctggccgacgacctcgcggaggaacttcagaataagcctctaaactccgagataagagaattactgaagttgctgtccaaacctaacgtaaaagctctcctatccgtgcacgacacggtcgcccagaaaaactatgaccctgtgcttcccccaatgcccgaagacatcgatgatgaagaagattcagtgaaaatcattagactggttaaaaatcgcgagcctcttggagcgaccatcaaaaaagatgagcagacaggcgcaattatcgtggcgcgcataatgagaggcggtgcagcagacagaagcggtctaatccacgttggggacgagctccgggaggtgaatgggattcctgtagaagacaagcgccctgaggaaatcattcaaattttggctcagagccaaggcgcaatcacgtttaagattatcccaggaagcaaggaggaaacccccagtaaagagggaaagatgttcatcaaagcactctttgactacaatccaaacgaggataaagctatcccatgtaaggaagcaggcttgtcatttaagaagggggatattctgcagatcatgagtcaggatgatgccacatggtggcaggctaagcatgaagcagatgccaacccgcgtgcggggctgattccatccaagcactttcaagaacgaagactagcgctgaggaggccagagattctagtacagccccttaaggtgagcaaccggaagtcatctggattcagaaaatctttccgtctgtcccgcaaagataagaaaacaaataagagcatgtacgaatgcaagaaaagtgatcagtatgatactgccgatgtaccaacctacgaagaggtaaccccctataggcggcagacaaacgaaaagtaccggctcgtcgtgctggttggtcccgtaggggttgggctgaacgagctgaagagaaaactgttgatcagtgacacccagcattatggtgtcacggtgccacacacaacgcgagcgcggcgaagtcaggagtccgacggagtggagtacattttcatctctaaacacctgtttgaaaccgatgtgcagaacaacaagtttatagagtacggggagtacaagaacaattattacgggacctccatcgacagtgtaagaagcgtactggcgaaaaacaaggtgtgtctgctcgatgtacaaccacacactgtcaagcatctgcgtactttagagtttaagccctatgtgatcttcataaagccgccaagcatcgaaagattaagagaaacaaggaaaaacgccaagatcatctcctcccgagatgaccagggagccgccaaacccttcaccgaagaggatttccaagaaatgataaagtcagctcagatcatggagtcgcagtacgggcacctgtttgacaagattattattaatgatgatctcactgtggcctttaatgagttgaaaacaacttttgataagctggaaacggaaacccactgggtgcccgtctcatggctgcactcatag

SEQ ID NO: 123980 - DNA, 1731 bp, synthetic construct
  misc_feature 1..1731: note = Description of Artificial Sequence: Synthetic coding sequence
  source 1..1731: mol_type = other DNA
atgccagccctgtcaactggatctggatccgacaccggactctatgaactgttggccgcgctccccgctcagttacagccccacgtggactctcaggaggatctgacgtttctgtgggatatgttcggcgaaaaatctttgcactcgcttgttaaaatacacgaaaagctccactattatgaaaaacagagcccagtgcctatcctgcacggcgcggccgcactggccgacgatttagcggaggagctacaaaacaagcccctcaattcagaaatcagggaactactcaagcttctatccaagcctaacgtgaaagctctactgagcgtccatgataccgtcgcccaaaaaaactatgaccctgtactacctccaatgcctgaggatatcgatgacgaagaagactcagttaaaattatccggctggtcaagaaccgcgagcccctgggcgctaccatcaaaaaggatgagcaaaccggagccataatcgtagcgaggatcatgagaggcggtgccgcggatcggtccggcctcatacacgtgggagacgagctaagggaagtgaatggaattcccgtggaggacaagaggcctgaagagataattcagattctggcacaaagccagggagcaataacatttaaaatcattccaggatctaaggaagagactcccagtaaggagggaaagatgtttataaaagccctcttcgactacaatccaaatgaggacaaagccatcccatgcaaggaggctggcctcagttttaagaagggcgacatactgcagattatgtctcaggatgatgccacatggtggcaggctaagcacgaagccgatgccaatccgcgggcgggcctcattcctagtaagcatttccaagaacgccgcctagctctgcggagaccagagattttagtgcagcctctgaaagtgtctaacagaaagtcttctggttttcgtaaatcctttcgactgtcaaggaaagataagaagaccaataaatccatgtacgagtgtaaaaaatcggatcagtacgatacagccgacgttccgacatatgaggaagtgaccccttaccggagacagaccaacgagaaatacaggctggtcgtgcttgtcgggcccgtcggtgtcggtctcaatgaacttaaacgcaaattgctaatttcagacacccagcactacggagtcaccgtgccccacaccacccgagcgcgccgctcccaggaaagtgacggagtggagtatatctttattagcaagcacctatttgagacagacgtgcagaacaataagtttattgagtatggagagtacaagaataattattatggcaccagcatcgacagcgttcgcagtgtgcttgcaaagaataaggtgtgccttttagacgtacagccacacacggttaagcatcttcgaacactggagttcaagccgtacgtgatcttcatcaaaccaccaagcatagagcgcctgcgggagacaaggaagaacgctaagattatcagttctcgcgatgatcagggcgccgccaaaccttttacagaagaggacttccaagagatgattaagtccgcccagataatggagtctcagtatggtcatctctttgacaaaatcattattaacgacgacctcacggtcgccttcaatgagctcaaaaccacttttgataaacttgaaaccgagacccactgggtgcctgtatcttggctgcacagttag

SEQ ID NO: 123981 - DNA, 939 bp, synthetic construct
  misc_feature 1..939: note = Description of Artificial Sequence: Synthetic coding sequence
  source 1..939: mol_type = other DNA
atgcccgctttgtccactggatctggcagcgataccgggctgtacgaactccttgcagctctgccagcccagcttcaaccgcatgtggattcacaggaggatctgacatttctgtgggacatgtttggagagaagtccctgcactctctcgttaaacactttcaggagagaaggctggccttgagaagaccagaaatcctggtgcagccgcttaaggtaagcaatcgcaagagcagcggcttcagaaaatcctttaggttaagtcgcaaagacaaaaaaacaaacaaaagtatgtatgagtgtaagaaatctgatcagtacgataccgcggatgttccgacctatgaagaggttactccgtatcgccgccagactaacgagaagtacaggctggtcgtgttagtggggccagtgggagtgggcttgaatgaactgaagcgtaaattgctgatctccgacacccaacactacggagtcactgtgccccatacaacaagggcacgccgaagccaggaatcggacggagtcgagtatatctttatctctaaacatctgttcgagacagatgtgcagaacaataaattcatagagtacggcgagtacaagaataattactacggtacaagcatcgatagtgtcagatctgtgttagcaaaaaataaagtatgccttttggatgtgcaacctcacacagtcaagcatctccgtacattggaatttaagccgtatgtaatttttattaagccgccctcaatagaacgcctccgcgagaccagaaaaaacgctaagattatatcctcgcgcgacgatcagggggccgcgaagccctttacggaggaagattttcaagaaatgatcaaaagtgcacagatcatggaaagccagtacggtcatctgttcgacaagatcattattaacgatgacctgacagtggcatag

SEQ ID NO: 123982 - DNA, 1125 bp, synthetic construct
  misc_feature 1..1125: note = Description of Artificial Sequence: Synthetic coding sequence
  source 1..1125: mol_type = other DNA
atgccggaggacatcgatgacgaagaggatagcgtgaaaatcatcaggctggtgaagaatcgagaacctctcggcgccacaatcaagaaagacgaacaaacaggcgccattatcgttgctcggattatgagggggggagccgccgacaggagtggactgatccacgtgggagacgaactgcgcgaggtcaatgggattccggtcgaagataagaggcctgaagagataattcagatcctggcccagtcacagggcgctatcaccttcaagatcatcccagggagcaaggaggagacaccttcaaaggaaggcaaaatgttcatcaaagcactcttcgactacaatcctaacgaagacaaggccatcccctgcaaggaggccgggctgtcatttaagaaaggcgacatactgcaaattatgagccaggacgatgctacctggtggcaggcaaagcacgaggcagatgccaacccaagagctggcttgataccctctaagcacttccaagagagacgactggccctgcggaggccagaaatactggtgcagccgttgaaggtctccaatcggaagtcaagcgggtttaggaaatcctttcgcttgtctagaaaagacaagaagacaaacaaatccatgtatgaatgcaaaaagtcagaccaatacgatactgcggatgtgccaacatacgaggaggtgaccccatataggagacagactaatgagaagtacagattggttgtgctagtaggtcctgttggcgtaggcttgaatgagctgaagaggaagttactgatatccgatacccagcactatggcgttactgtccctcacacgaccagggccaggcgttcccaggagagtgatggcgtagagtacatcttcattagcaagcatctattcgaaactgacgtccaaaataacaaattcattgagtacggggagtataagaacaattattatggcaccagcatcgatagcgtcaggagtgtcctggcaaagaacaaggtctgccttcttgatgtgcaaccacacggcccctggttccttctgcctctgatggcagtcccatggggcgctaaaccccctaatgcccggatgacttgtggtagtcccctggatctatag

SEQ ID NO: 123983 - DNA, 1731 bp, synthetic construct
  misc_feature 1..1731: note = Description of Artificial Sequence: Synthetic coding sequence
  source 1..1731: mol_type = other DNA
atgcccgctcttagtactggcagcggttctgatactggcttatacgagctcttggccgccctgccagctcaattacagccccacgtagacagtcaggaggacttgactttcctttgggatatgtttggggagaaaagcttgcatagcctggtgaagatccatgagaagctccactattacgaaaagcagtctcctgtgcctatattacacggggcggccgctcttgcagacgatctagccgaggagctccagaacaagcccctcaatagcgaaatccgagagttgcttaaactcctatccaagcctaacgtgaaagcactgctgagcgtgcacgatactgtggctcagaagaactacgatccggttttgcccccgatgcctgaggatattgatgacgaggaggacagtgtgaaaatcattaggttggtcaagaaccgcgaaccattgggtgccaccattaaaaaggatgagcaaaccggcgccatcatagttgctcgaatcatgcggggcggagccgcagataggtccggccttatccatgtcggggacgagctgagggaagtgaatggcattcccgtcgaggacaagcggcctgaagagatcatccagatcctcgcccagagtcagggagccatcaccttcaaaatcattccgggcagtaaagaggagactccttcaaaggaaggaaaaatgttcatcaaagctctctttgattacaatccaaacgaggacaaggccattccctgcaaggaagccggattatccttcaagaagggcgatatccttcagatcatgtcccaggacgacgccacatggtggcaggcaaagcatgaggccgatgccaatccccgggccggcctcatacctagcaagcactttcaggaaaggagactggcattacgccgtccagagatcctggtgcaacccttaaaggtgagtaaccgcaagtccagtggattccgcaagtctttccggctgtctcgcaaagacaaaaaaacgaataaatcaatgtatgagtgcaagaagagcgatcagtacgacacggctgatgtgcccacctatgaggaggtgacaccatacagaaggcagacaaacgaaaaatatcggctggtcgtgctcgttggtcctgtgggcgtgggcctcaatgagctgaaaaggaagcttctaatcagtgatacacagcactatggagtcacagtaccacacaccacacgggctcgcaggtctcaggaaagtgacggtgttgagtacatttttatttccaaacatctgttcgaaaccgacgtccaaaacaacaagtttatcgagtacggggaatacaagaataattactacggaacctctatcgattcagtcagatcggtcttggctaaaaacaaggtgtgccttttagacgttcagccccacactgtgaagcacttgcgtacactagaatttaagccgtatgtgattttcattaagccccctagcattgagaggctgagggagacgcgcaagaatgccaagattatctccagcagagatgatcagggggctgcaaagccatttacagaagaggacttccaagagatgatcaagagcgcccagatcatggaatctcagtatggtcacctgttcgataaaatcataattaacgatgatctgactgtagcgttcaatgagctgaagacaacattcgacaaactggaaacagaaactcattgggtccctgtgagctggctccacagctag

SEQ ID NO: 123984 - DNA, 870 bp, synthetic construct
  misc_feature 1..870: note = Description of Artificial Sequence: Synthetic coding sequence
  source 1..870: mol_type = other DNA
atgttggggtggtgcgaagcgatagcacggaacccgcaccgtattcctaacaacactcggacccctgagatctcaggggacctcgctgatgcttcccagaccagcacactgaatgaaaagtctcctggacgatctgcctcacgcagttcaaatatcagtaaggcgtctagtccgaccacaggaactgccccgcggtcacagtccaggctctcggtgtgcccttctacacaggacatctgccggatctgtcactgtgaaggtgacgaggagtctcctctcatcaccccctgtaggtgtacagggactcttcgattcgttcaccagtcatgtctgcatcagtggattaaaagctccgatactagatgctgcgaactgtgcaagtatgactttattatggaaacgaagttaaagccacttagaaagtgggaaaaattacagatgaccactagcgaaaggaggaagattttttgcagcgtgactttccacgtgatcgctataacctgtgttgtgtggagcctttatgtcctgatcgacagaacggctgaggagattaaacagggtaatgataatggagtgcttgaatggcccttctggaccaaattggtcgtggtggccatcggtttcactggagggttagtgttcatgtacgtgcaatgcaaagtctacgttcagctgtggcgtcgactcaaggcctataacagggttattttcgtgcagaattgtccagatactgccaagaaacttgagaagaatttctcttgtaacgtgaatacagatattaaggacgccgtggtggtgcctgtaccccagactggagccaactcactacctagcgccgaaggaggtcctcctgaggtggtcagcgtgtag

SEQ ID NO: 123985 - DNA, 819 bp, synthetic construct
  misc_feature 1..819: note = Description of Artificial Sequence: Synthetic coding sequence
  source 1..819: mol_type = other DNA
atgacgtcaagtcacgtctgttgcaactttcttaacatgtggaaaaaatcaaagatcagcacaatgtactatcttaatcaagacgcaaagctgagcaatctttttctgcaagcctcctctcccacaactggaaccgcgccaagatcccagtctcgcctcagtgtgtgtcctagtacacaggacatttgtagaatatgccactgtgaaggcgatgaggagtctcccttaattactccctgtaggtgtaccggcacactacggttcgtccaccaatcctgtttacaccaatggatcaaaagcagtgacactagatgttgcgagctttgtaagtatgactttatcatggagaccaagctcaaaccactacgaaaatgggagaaactgcagatgacgaccagtgagcggcgtaaaatcttctgctctgtcacctttcacgtcattgccattacatgtgtggtctggtcactgtacgtgctcattgataggaccgcggaggagatcaaacagggcaacgacaatggcgtgctagaatggcctttctggacaaaactcgtcgtggttgccatcggctttaccggagggctcgtttttatgtatgtgcagtgcaaggtgtacgtgcaactgtggcgccggctgaaagcctacaacagggtgatcttcgtgcagaactgtccagatacggctaagaagctcgagaagaactttagctgtaacgtgaacaccgacatcaaagatgcggtggtcgttcccgttccacagacaggcgccaattccttgccctctgcggaagggggaccgcctgaagtcgtctctgtgtag

SEQ ID NO: 123986 - DNA, 870 bp, synthetic construct
  misc_feature 1..870: note = Description of Artificial Sequence: Synthetic coding sequence
  source 1..870: mol_type = other DNA
atgctgggctggtgtgaggcaattgctagaaacccccaccgtatcccgaacaatacaaggactcccgaaattagcggcgacctggctgacgcctcgcagaccagtacactgaacgagaagagtcccggtcgctctgcatcccgatcctctaatatatctaaggcaagcagcccaaccactggaacagcccctcgctcacagagtaggctttctgtgtgtccttctacacaggatatctgtcgaatatgccattgtgagggcgacgaagagtcccccttaataacaccctgtaggtgtacaggcacactgagatttgttcatcagtcatgcctccatcagtggattaaaagctcagatactcgatgttgtgaactctgcaagtatgattttataatggaaaccaagttaaagcccctgaggaaatgggaaaaactgcagatgacaacctccgagagaagaaagattttctgtagcgtcacctttcacgtgattgctattacatgtgttgtttggtcactttacgttcttattgatcgcaccgctgaagagattaagcaaggcaatgataatggcgtcctggaatggccattctggacaaaactggtggttgttgctattggctttacgggcgggttggtgtttatgtacgtccagtgtaaagtgtatgtccaactttggagacgccttaaggcttataaccgggttatctttgtgcagaattgtcctgacacagctaaaaaactggagaaaaatttttcctgtaatgttaatacagatattaaggacgccgtggtggtgccggtgccccagacaggtgcaaactcactaccttccgctgagggggggccacctgaagtggtaagcgtttag

SEQ ID NO: 123987 - DNA, 426 bp, synthetic construct
  misc_feature 1..426: note = Description of Artificial Sequence: Synthetic coding sequence
  source 1..426: mol_type = other DNA
atgttaggctggtgcgaagccatcgcccgtaatccacatcgaatccctaataatacaagaactcctgagatctccggagacttggccgatgcaagccagacatccaccttgaatgagaaatctccagggcgcagcgcgtccaggtcttccaatatttccaaggcttccagtccgactactggcacagctcccagaagccaatcacgactgtctgtctgcccatccacccaggacatttgcaggatttgccactgcgaaggtgacgaagaaagccctttgattactccctgtcgctgcaccgggacactgagatttgtacaccaatcatgcctgcaccagtggatcaaatcaagcgatacccgctgctgtgagctttgtaaatatgatttcatcatggaaacaaaactgaaaccgcttagaaagtag

SEQ ID NO: 123988 - DNA, 2427 bp, synthetic construct
  misc_feature 1..2427: note = Description of Artificial Sequence: Synthetic coding sequence
  source 1..2427: mol_type = other DNA
atgctgcacgatgcacgggacaggcagaagtttttcagcgatgtacagtatcttcgggacatgcaacataaggtggacagcgagtaccaggcttgtctgaggaggcaggaataccgtagggaccccaacgagaaaaaaagggatcagttttggggccaagaaacttctttcgaacggtcacggttcagttcccggagcagctcaaagcagtcgagcagcgaggaggacgcactcaccgagcccagaagcagtatcaaaatttcggcatttaaatgcgacagcaagctcccggccatagatcagacctctgtgaagcaaaagcacaaatcaactatgacggttcgtaaggcagaaaaagtagatccgtccgagccctcacctgcagaccaggcgcctatggtgctgttacgcaaacgaaagcctaatttgcggcggtttacagtgtcccccgaaagccacagtcctcgagccagtggcgataggagcagacagaaacagcagtggcctgccaaagtgcctgtgccacggggtgcagaccaggttgtgcagcaagagggactgatgtgcaatactaaacttaagcggccaaaccaggagcgtcggaacctggtgccgagcagtcagcctatgacagagaacgcaccagatcgagctaagaagggagatccttcagccccctcacagagcgaactgcaccctgccttgagccaggcctttcagggcaaaaactcacctcaggtgctgtccgaatttagcggcccaccattgacgccgactactgtaggaggccctcgcaaagcctcttttcggttccgggatgaggacttttacagcatcctgtcactcaattcgcggagggaatccgatgacaccgaagaggagacccaatccgaagagtgcctgtgggttggcgtccggagcccatgttccccgagccatcacaagcggtcacgttttggtggaacctccactcctcaggccaagaataaaaactttgaagagaacgcagaaaactgtcgaggccactcctctcggcggagtgagccatctcacgggtcccttagaatctctaatgcaatggagccagctacagagcggccttccgccggacagcgactttcgcaggatccaggtttacccgacagagagtcagcaacagaaaaggaccgcggtggctccgagaatgctaagaagagtccattgtcctgggacacaaaaagcgaaccccgccaggaagtgggcgtgaatgctgaaaatgtgtggtctgattgcattagcgtagaacaccggcccgggacacacgacagtgaaggatactggaaggattaccttaactcgagccaaaatagcctggactatttcatctctgggcggccgatttcccccagaagtagcgtgaactcaagctataatccccccgcaagctttatgcactccgccctgagggacgacatcccagtggatctgtcgatgagcagtacatctgtccacagttcagattctgagggcaactccggattccacgtgtgccagcccctctcccccatccgcaacagaacgccgttcgcttcagcagaaaatcacaactatttccccgtgaattctgcccacgaatttgcagtgagagaggctgaggacacaaccctaacgagccagccacagggcgcccctctctatactgacctgctactcaatcctcagggcaatctgagcttggtcgattcgtcgtctagcagccccagtcgaatgaattctgaagggcacctgcatgtgagcggctctcttcaggaaaatacacccttcaccttttttgccgtgtcacattttcccaatcagaatgataacggtagtcgaatggccgcttccgggttcaccgacgagaaagagacgtccaagatcaaggccgacccagagaaactgaagaaactccaagaatctctgttagaagaagacagtgaggaagaaggggatctgtgcaggatttgtcagatagccggtggcagtcctagcaacccgctcttggagccctgtgggtgcgtgggctctctccaatttgtccaccaggagtgcttgaagaaatggctgaaggtgaaaattacaagcggagcagacctgggcgccgttaagacatgcgagatgtgcaaacaaggcctgttggtcgacctgggcgattttaatatgatcgagttttaccagaagcaccagcaatcacaagcgcagaatgagctcatgaattcaggactctacctagtcctgttgctgcatttatatgaacagaggtttgccgagctcatgcgtctgaatcacaatcaggttgagagggaacgattaagccgcaactacccacaaccgcgaaccgaagagaacgagaattcggagctcggtgacggcaacgaggggagcatctcccaaagccaggtagtgtag

SEQ ID NO: 123989 - DNA, 2427 bp, synthetic construct
  misc_feature 1..2427: note = Description of Artificial Sequence: Synthetic coding sequence
  source 1..2427: mol_type = other DNA
atgttgcatgatgctcgggatcggcagaaattcttctccgacgtgcagtacctgcgggatatgcagcataaagtcgacagtgagtatcaggcttgcctcaggcgccaagagtatagaagagacccaaatgagaagaaacgtgatcagttctggggtcaagagacatcatttgagaggagtcggttttcatcaaggtccagcagcaagcaatcttcttccgaagaggacgcacttaccgaacctcgctcaagtatcaaaatcagcgcttttaagtgcgattccaagcttcccgctatcgaccagacctcagtgaaacagaagcataaatcaaccatgacagtgcgtaaagctgagaaagtggacccaagcgaaccaagccctgccgatcaagctcctatggtcctgctgaggaagagaaagcctaacctccgacgcttcactgtaagtcctgagagccactcaccaagggccagcggcgatcgatcccgacaaaaacagcagtggcctgcaaaggtgcctgtgccccggggcgctgatcaggtagtgcagcaggagggtttgatgtgtaacactaagctcaaaagacccaatcaagagcgcaggaatctggtcccatcgtctcagccaatgaccgaaaacgctcccgaccgcgctaaaaagggggatccttctgctccttcgcagtctgagttacaccctgctctgtctcaggcattccaggggaagaatagcccacaggtgttgagcgagttctccgggcctccactgacacccacaaccgtgggaggcccgcggaaggccagctttcgcttccgagatgaagatttctacagcattttaagtttaaatagtcgaagggaatccgatgatactgaggaagagactcagagtgaggagtgcctgtgggtcggcgttaggagcccgtgcagcccttcccaccataagcgttcaagattcggaggtacgtccaccccccaggccaaaaacaaaaacttcgaggagaacgcggaaaactgcaggggccactcctctcgccgtagcgaaccgtctcacggatctttacgaatttctaacgcaatggagcctgccactgagaggccatctgccggccagcggctaagccaagaccccgggcttccagacagagagagcgcaactgaaaaggataggggtggatcggaaaacgccaaaaaaagcccactgtcgtgggacaccaagtctgagccacggcaggaagtaggcgtcaacgctgaaaacgtgtggtcggattgcattagcgtcgagcataggcctggcacccacgactctgagggctattggaaagattatctgaactcctcccagaattcattggactactttatttctggccggcccatctccccacgctcttcagtgaattcatcatacaaccctccagctagcttcatgcatagcgcgctgcgagatgacatccccgttgatctatcgatgagcagtacgtctgtgcactcatcagacagcgaggggaactcagggtttcacgtctgccagcccctctccccgataaggaaccggacaccctttgcctctgcagagaaccacaattactttcctgtgaatagcgcccacgagttcgccgtgagggaagcagaagacactaccttgacttcacagccccagggggcccctctttatactgacctcctcctaaatccccaaggtaacctgtctctcgtcgactcttccagctcatctccaagcaggatgaacagtgagggacacttgcacgtgtcgggttctctgcaggagaatacccccttcacttttttcgcggtctcacacttcccgaaccagaatgacaatggttcccgcatggctgccagtggatttacagacgagaaagaaaccagcaaaatcaaagctgatccagaaaaattgaagaagctccaagagagcctgctggaagaagactctgaggaggagggggacctgtgccgtatttgccaaattgcaggtgggtcaccttcgaaccccctactcgagccatgcggttgcgttggttctctacaatttgtgcatcaggaatgtttaaaaaagtggttgaaagtaaagataactagcggagctgacttaggagccgtaaagacctgtgagatgtgcaaacaggggctattggttgacctaggggacttcaacatgattgagttctatcagaaacaccagcagagccaagctcagaacgaactcatgaactccggcctctacttggttctgctgctacacctctacgagcaaaggttcgcagagctcatgcggctgaatcacaatcaagtggagcgggagcgacttagcagaaattacccccagccacgaaccgaagagaacgaaaattctgagctgggagatggtaatgaaggctctatatcccagagccaggtcgtgtag

SEQ ID NO: 123990 - DNA, 2400 bp, synthetic construct
  misc_feature 1..2400: note = Description of Artificial Sequence: Synthetic coding sequence
  source 1..2400: mol_type = other DNA
atgcttcatgacgcccgggacaggcagaagttcttctctgatgtacagtatctacgcgatatgcagcataaggtcgattcagagtatcaggcatgtcttcgacgacaggaataccggcgtgatcccaatgaaaagaagcgcgatcagttttggggtcaggagaccagtttcgagagaagtagatttagctcccgctcatcatcaaaacagagttcgtcagaagaggacgccctgactgagccaagaagcagcatcaaaatctccgcctttaaatgcgactcgaagctgcccgcaattgaccagacatccgtgaaacaaaagcataagtctactatgacagtccgtaaggcagaaaaggtcgatccgtccgaaccttccccagaccaggcgcctatggttttactgcgtaagaggaaaccaaatctgcgtcgattcactgtctcgccagagtctcacagtccaagggcctccggcgaccggagccgccagaagcagcagtggcccgcaaaggtacccgtgccccgaggtgccgaccaagttgtgcagcaggagggcctgatgtgcaatactaaacttaaaagaccaaaccaggagcgtagaaacctagtccctagcagtcagcccatgaccgagaatgcccctgatagggcgaaaaagggggatccatctgctccttcccagagcgaactgcacccagctctgtctcaggcattccagggtaaaaattcaccccaggtgctgtccgagttctctggtccacccttgaccccgaccaccgtggggggtccgaggaaggcgtcatttcgattccgtgacgaagacttttactccattctgagccttaactccaggcgggagtcagacgatacggaggaggagacacagtcagaagagtgcttatgggtcggagtgaggagtccctgctctccatcgcaccacaaacggtcgcgtttcggcgggacctctaccccacaggctaagaacaagaattttgaggagaacgctgaaaattgcagaggccatagctcgaggagatcagagccatctcacggtagtctccgtattagcaatgcaatggagccagctaccgagcgcccaagtgcaggacagcgactgtcgcaggaccctggtctcccagatcgggagtcagctacagagaaggacaggggcggctcagaaaatgcgaagaagtcacccttaagctgggacaccaagtccgaacctaggcaggaagttggcgtaaacgctgaaaacgtgtggtcagattgcattagcgtggaacataggcctggtacccatgatagcgagggatactggaaggactacctcaattcaagtcagaatagcctggattactttatttctggccggcctatatcgccccgctctagcgttaattcttcctataatccgcctgcctcattcatgcactctgctctgagagacgatatcccggtggatttgagcatgtcctctacctctgtccatagtagcgatagcgaaggcaatagcggctttcacgtgtgccagccgctcagtcccattcggaacagaaccccattcgcctccgctgagaatcataactattttccagtcaattcagcgcatgaattcgcagtgagagaggccgaagatactaccttaacatcacagccacagggcgcaccactgtacactgatttactactgaacccacagggcaatctgtcattagtcgatagttcctcctcaagcccttctagaatgaattccgagggacacctccatgtgagtggtagcctccaggagaatacccctttcaccttcttcgctgtgagccactttcccaatcaaaacgacaatggatccaggatggcagcctcgggtttcactgatgaaaaagaaacctccaaaattaaggctgaccccgagaagttgaagaagctgcaggagtcactgctggaagaggactccgaggaagagggagacctatgccgtatctgccagatcgccggagggagcccttccaatcctctgcttgagccctgcggatgcgtcggcagcctacagtttgtgcatcaggaatgcctgaaaaaatggttaaaagtgaaaatcacttctggggcagacctgggggccgtgaaaacatgcgagatgtgtaaacagggactcctcgtcgatctcggcgatttcaacatgatcgagttttaccagaaacaccagcaatcccaggcccagaacgagctgatgaattcgggcctgtaccttgtgctgcttcttcatctgtacgagcagagatttgcggaattgatgcggctcaatcataatcaggttgagagagaacgactctctagaaattatccacagcctaggaccgaggagaatgaatcccggttctggggcccagtgctccccttctag

SEQ ID NO: 123991 - DNA, 1209 bp, synthetic construct
  misc_feature 1..1209: note = Description of Artificial Sequence: Synthetic coding sequence
  source 1..1209: mol_type = other DNA
atgagttttgagggaggccatggggggtcccggtgtagaggagccgaatctggcgatgccgagccaccaccccagcctccacctcctccaccgcctacaccccctccaggggagcccgctccagtgcccgcggccccaaggtatctcccccctttgcccgcgtctcccgaaactcccgagagggctgcaggccccagcgaacctctgggcgaagtcgcaccacgatgtcgcggcgctgatgagctccctccgccacctctccccctacagcccgccggccaagaggtggcagctgccggcgacagcggagagggccctaggcggctcccggaagcagctgctgcaaaaggaggtcccggagaaagcgaagcgggagctggaggagaacgagaaagaagaggtgccggcgaccagccagagaccagatccgtttgcagcagtcgctcctctagttccggtggcggtgatcagagagctggccatcagcaccagcaccatcagcctatctgcaaaatatgctttcagggtgcagaacagggggaactgctaaacccatgccgctgcgacggctccgtaaggtatacacaccagctctgcctactcaagtggatttccgaaaggggcagctggacctgtgagctctgttgctacagataccacgtgattgctattaaaatgaagcagccctgtcagtggcaatcgatatctatcacactagtggaaaaagtccagatgatcgccgtgattctgggatccctttttcttatcgcatcagtgacatggctcctctggagcgcctttagcccctacgcagtgtggcagcggaaggatatcctgttccagatctgttacggcatgtatggctttatggatttggtttgtattggactcatcgtccacgaaggagccgccgtgtacagggtctttaagcggtggcgggccgtcaatctccactgggacgtgctgaactatgacaaagccacggacatcgaggagagctctagaggagagagcagcacaagccgtacgttgtggttgcctctgacagcactgcgcaatcggaatttagttcatcccacccagctcaccagtcctcgatttcaatgtggatatgtgctcctgcacctctttaatcggatgaggccacacgaagacctaagcgaagacaatagctctggtgaagtcgtgatgcgggttacaagcgtgtag

SEQ ID NO: 123992 - DNA, 1818 bp, synthetic construct
  misc_feature 1..1818: note = Description of Artificial Sequence: Synthetic coding sequence
  source 1..1818: mol_type = other DNA
atggccctcagaaaagggggtttagcccttgcactcctactgctgtcctgggtggcactgggccctcgtagcctggagggggccgaccccggcacacccggcgaagcagagggccccgcctgtcctgcagcttgtgtatgcagctatgacgatgacgctgatgaactgagtgttttctgtagtagccgaaacttaacccgccttcccgatggagtgccaggagggacacaggcactctggctagacggcaacaatctatcttccgtgccccccgccgcatttcaaaatctttccagcctaggattccttaatttgcagggcggccagttagggtcattagaaccgcaggccctattagggctggaaaacctgtgccacttgcacctggagcgcaaccagctcaggtctctagctcttggaacctttgcgcacactcctgccttagcaagcctgggattgtccaataaccggttgtctaggttagaggatgggctcttcgaggggctgggcagcctgtgggatctgaatctgggctggaattcactggcagtactgcccgacgccgccttcaggggccttggctccttgcgggagctggtgctagccggcaacagactggcctatttgcagcccgccctgttctccggcctggccgagctcagggagttggatctttcccggaacgcactgcgcgcaataaaagccaacgtttttgtgcagctgccccggcttcagaagttatatttggatagaaacctgatcgccgccgtggctccaggggcctttctaggcctgaaggccctgcggtggctcgatctgagtcacaatcgcgtggccgggctccttgaggatacattccctggacttctcggtctgcgggtacttcggctgtcccataatgctatcgcttccctgaggccacgcacattcaaggatctgcactttctagaagagctccagctggggcataaccgcatcagacaactggccgagcggagctttgaaggtttagggcaacttgaggttctgactctggaccacaaccaattgcaggaggtgaaagctggcgccttcctgggtctcaccaatgtggccgtgatgaatctcagtggaaactgcctccgtaatctccccgagcaggtatttcgaggactcggcaagttacatagcctacatttggaaggaagttgcttgggacggattcggccacatacatttaccggactttcaggacttcgcaggctgtttcttaaggataacggtctggtcggcattgaggagcagtcactgtgggggctggccgaactgctagagctggacctgacttctaatcaactgacccacttgccccaccgtctgttccaggggctcggaaagctggagtatctgctgctgtcgcggaatcgcctcgctgaattgcccgcagatgctctcgggcctttacagagggctttttggctcgacgtctcccacaatcggttagaggcacttcctaacagcctcctggcgccgctgggccgccttcgctacctgtccctgcgcaacaatagcctgcggacatttacacctcaaccccccggcctggaacgactatggctggagggtaacccctgggactgtggctgtccgctcaaggcactgcgcgacttcgctttacagaatccttcagcagtgccccgctttgtgcaagctatatgtgaaggtgacgattgccaacctcccgcgtacacctataacaacattacctgtgcatcaccccccgaagtggtgggattagatctccgcgatctctctgaagcccactttgcaccttgttag

SEQ ID NO: 123993 - DNA, 531 bp, synthetic construct
  misc_feature 1..531: note = Description of Artificial Sequence: Synthetic coding sequence
  source 1..531: mol_type = other DNA
atgactactggggactgctgtcacttgcctggcagcctgtgtgactgttctgggagccccgccttttctaaggtggtggaggcaactggcctcgggcccccgcagtatgtcgctcaggtaacatcccgtgacggcagactcctctcgactgtcatccgggcgctggacacaccctcagacggccccttttgtcggatatgccacgagggcgcgaatggggagtgtcttcttagcccatgcgggtgtactggcaccctgggtgccgtgcacaagtcttgcctggagaagtggctgtcgagctctaatacttcttattgcgaactgtgtcacactgaattcgccgttgagaaacgacctcggcctttaactgaagtgtccttccgatatcactgtcagttatacagcgagtggcgcaagactaatcagaaggtcagactgaagattcgcgaggcggactccccagaggggccacagcactcgccactggccgccggactgctgaagaaagtggccgaagagaccccagtgtag

SEQ ID NO: 123994 - DNA, 741 bp, synthetic construct
  misc_feature 1..741: note = Description of Artificial Sequence: Synthetic coding sequence
  source 1..741: mol_type = other DNA
atgaccactggagactgttgccatctgccgggatctttatgcgactgctctggctcccctgctttctctaaagtggtcgaggctactggacttgggccgcctcagtacgttgcacaggtaaccagtcgtgatggtagactcttgagcactgtgatccgggccttggacactccaagcgatggtcctttttgccggatttgtcatgaaggggcaaatggagaatgcttgctctctccatgcggatgtactggaaccctgggcgctgtccacaagagctgtcttgaaaaatggctttcatccagtaatactagttactgcgagctgtgccataccgagttcgccgtagagaagcggcctcgccccctaactgagtggctgaaggatcctggtccaaggacagagaagagaaccctgtgttgtgacatggtatgtttcttgttcattactcctctcgccgctatcagtggatggctgtgcctcagaggggcacaggatcatcttcgactgcattcacagctggaggctgtgggcctgatagcattaacaatagccttatttacaatttacgttctgtggaccctggtttcttttagatatcattgtcaactgtacagtgaatggagaaaaaccaatcaaaaggtgagattaaagatcagagaggccgacagccccgaaggcccccagcattcacccctggccgcggggcttttgaaaaaggtggcggaggaaactcctgtatag

SEQ ID NO: 123995 - DNA, 762 bp, synthetic construct
  misc_feature 1..762: note = Description of Artificial Sequence: Synthetic coding sequence
  source 1..762: mol_type = other DNA
atgaccacctcacgttgctcccacctccccgaggtgcttcccgattgtactagctctgcggccccagttgtgaaaacagtcgaggactgtggaagcttggtaaatggtcagcctcagtatgtcatgcaggtctctgctaaggatggacagctgctcagtacggtggttaggactctggccacccagagcccatttaacgatcgaccaatgtgtcggatctgccacgaagggtccagtcaagaggatcttttgagcccttgcgagtgtacagggacgctgggaacaatccacaggagctgtctggagcactggctctcgtcgtctaacacgtcttactgcgagttgtgccatttccggttcgcggttgaacgaaagccacgtccacttgtagaatggttaagaaatcctggccctcaacacgaaaaaagaaccctctttggcgatatggtatgtttcctgttcatcaccccacttgctaccattagtggttggctctgtctcaggggggcagtcgatcacctgcacttctccagcaggctggaagccgtcggactcattgcccttacagttgccctgtttacaatctacttgttctggacactggtcagcttccgctatcattgtcggctgtacaatgaatggagaaggacaaaccagcgggtaatccttctgatcccaaagtccgtcaatgttccttcaaaccagccatccctgttggggctgcattctgtgaaaagaaacagtaaagagaccgtcgtgtag

SEQ ID NO: 123996 - DNA, 1233 bp, synthetic construct
  misc_feature 1..1233: note = Description of Artificial Sequence: Synthetic coding sequence
  source 1..1233: mol_type = other DNA
atgttgatgcctctatgtgggctcctgtggtggtggtggtgttgttgctccggctggtactgctacggcctgtgtgcacccgctccccagatgctgcggcatcagggacttctcaagtgcaggtgtcgcatgctgttcaatgaccttaaagtctttttgctgagaaggcctccgcaggcgcccctgccgatgcacggcgacccccagcctcctggccttgctgcgaataatactctccctgccctgggggccggtggctgggcaggctggagagggccccgagaagtggttggccgggagccccctcccgtgccgccccccccgcctctccctccatcctcagttgaggatgattgggggggccccgccaccgaaccacccgcaagcctactttcctccgcttcaagcgacgatttttgtaaggaaaaaactgaagataggtatagcctcggctcttcgctagatagtggcatgcgtacccctctctgtcgcatttgctttcagggcccggagcagggggaactgctctccccatgccggtgtgatggatccgtgaagtgtacccatcaaccttgccttattaaatggataagtgagagaggatgctggtcgtgcgagctgtgctactataagtaccacgtgatcgctatttccaccaaaaacccacttcagtggcaggcaatcagcctcaccgtgatcgagaaggttcaggtggccgcagcaatactcggctcactttttcttattgctagtatcagctggctcatttggagtaccttttctccctctgcgaggtggcagagacaggatctgctgtttcagatctgctacggcatgtatgggtttatggacgtagtctgtatagggcttattatccatgagggccctagcgtatatagaatttttaaaagatggcaggcagtcaatcagcagtggaaagtgttgaactacgacaagacaaaagacttagaagatcagaaagcgggcgggcgcacgaaccccaggacctcctcaagtacgcaggccaacatcccatcaagtgaggaagagacagctggcacaccagccccagagcagggacctgctcaggctgccgggcacccatctggtcctctgagccaccaccattgtgcctataccattttacatattctctcccacctgcggcctcacgagcagaggtccccgccaggctctagtcgagaacttgtgatgcgggtgacgacagtatag

SEQ ID NO: 123997 - DNA, 837 bp, synthetic construct
  misc_feature 1..837: note = Description of Artificial Sequence: Synthetic coding sequence
  source 1..837: mol_type = other DNA
atgcctgaccaggcccttcaacagatgttagataggtcctgctgggtgtgttttgccaccgatgaggacgatcgcaccgctgagtgggtccggccctgccggtgccgcggatctacgaagtgggtacaccaggcctgtctccaaaggtgggttgacgagaaacagcggggtaactctacagctagagtggcatgccctcagtgcaacgccgaatacctgatagtgttcccgaaacttggtccagtggtttacgtgctggatctggccgaccgcctgatcagcaaggcctgcccatttgcggcagcaggcattatggtgggctcaatctactggactgctgtcacctacggtgcagtgactgtcatgcaagtggtggggcacaaagaggggctggatgtgatggaacgggccgatccactattcctcctcattggactccccactatcccagtgatgttaatcctgggtaaaatgatccgctgggaggactatgtgctgaggctctggagaaagtacagcaataagttgcaaatccttaactcaatttttcctgggatcggatgccccgtgcctcgcattcctgctgaggctaatccactggctgaccacgtcagtgcaacaaggatcttgtgcggggctctagtttttccgacaatcgccacaattgtcggtaagctgatgttcagctctgttaacagtaacttacagcgtacaattctgggcggtatcgcattcgttgctatcaagggcgcattcaaagtgtattttaagcagcaacagtatctcagacaggcccatcggaagatcttgaattatcccgaacaggaagaagcctag

SEQ ID NO: 123998 - DNA, 2733 bp, synthetic construct
  misc_feature 1..2733: note = Description of Artificial Sequence: Synthetic coding sequence
  source 1..2733: mol_type = other DNA
atggacaccgcagaggaggatatatgcagggtgtgtcggtcagagggaacacccgagaaacccctctaccacccttgcgtgtgtacaggaagtattaaatttatacaccaggagtgcctggtgcagtggctgaaacatagccgcaaggaatattgcgagttgtgtaagcaccgctttgcattcacacccatatatagccctgatatgccatcccgtctgcctattcaggatatttttgcaggcctggttacatccatcggcacggcaatacgatattggttccattacaccttagtggctttcgcttggctgggtgttgtccctctcaccgcctgccggatatacaagtgcctgttcacaggctcggtgtcctctctccttaccctcccacttgatatgctgtctaccgagaaccttctcgcagattgtctgcaaggttgttttgtagtgacatgcaccctctgcgcgttcatcagcctggtttggctccgggaacaaatcgtgcatggcggcgctccaatctggctggaacacgctgctccaccctttaacgctgccggccaccaccagaatgaagcccccgcgggaggcaatggtgccgaaaatgtagctgctgaccagcctgcaaacccccctgccgagaacgccgttgtcggagagaatcctgacgctcaggacgaccaggccgaagaagaggaggaggacaacgaggaggaggacgacgcgggcgtggaggatgcggcagacgcaaataacggggctcaggatgatatgaactggaatgccctagagtgggatcgcgctgcggaagaacttacctgggaacgcatgcttggtctagatgggtctttggtgttcctggaacatgtgttttgggtcgtgtcattgaacactctgtttattctggtgtttgccttttgtccttaccatatcggtcacttttccctcgtgggcctcggattcgaggagcacgtgcaggcctctcattttgagggcctcataacaacaatcgtggggtatattctcctcgctattactctgatcatatgtcatggcttggccacactcgtgaagttccataggtctaggcggctgctcggcgtttgctatatcgtggtcaaggtgagtctgctcgttgttgttgaaataggtgtgtttcccctcatctgtggatggtggctggatatctgttctttggagatgttcgatgccacacttaaagatagagaactgtcctttcagagcgctcccggcactacaatgttcctgcattggctggtgggcatggtgtacgtcttctactttgcctcatttatcctgctgcttcgcgaggtgctgaggccgggcgtgctttggtttttacgaaacctgaacgacccagacttcaacccggtgcaggagatgatccatctgccaatctatagacaccttaggaggtttatcctgtccgtaatagtgtttggctccatcgtgcttttgatgctttggctgcctattcgaatcatcaagtcagtgcttcccaacttcctcccatataacgtgatgctgtactccgacgccccggtgtccgagttatcattagagctgctcctcctacaggtggtcctgcccgcacttctcgagcaggggcatacacgacaatggctgaagggcctggtgagggcttggactgtgacggctggctatttgctggatctgcacagttacctgctgggggatcaggaagagaacgaaaactcggccaatcagcaggtgaacaacaaccagcacgctcgtaacaacaacgctatccctgtagtgggggagggactccatgctgcccaccaggctattctgcagcagggcggacctgtgggttttcagccatatcgcagacctctgaattttccactcagaatcttcttgctgattgtctttatgtgcatcacattgttaatcgcatcattaatttgcctcaccctccccgtttttgccggcagatggctgatgtctttctggacggggacagcaaagatccacgagttatatacagctgcttgtggattgtatgtatgctggctgacaatccgagctgtaactgtcatggtggcgtggatgcctcaggggcggagagttatcttccagaaagtcaaggaatggtccttgatgatcatgaaaacgctgattgtagccgtgctgctcgccggggttgtgccgctactgctcggtttgctctttgagctcgtgatcgtcgctcctctcagagtgccgctggaccagacaccccttttctacccttggcaagactgggccctgggtgtgctccatgcgaaaattattgccgcaattaccctgatgggaccccaatggtggctgaaaactgtcatagagcaggtgtatgcaaatggcattcgcaacattgacctgcattatatcgtccgcaagttagctgcccccgttatttccgtcttactgctctcgctttgcgttccctatgtgatcgcttctggtgtggtgcccctgcttggcgtgacagctgagatgcaaaatctggtccataggcggatctaccctttccttctgatggtagtggtgctgatggcaattttatccttccaggttcggcagtttaagaggctttatgaacatattaagaacgataaatacttggtgggacagagactggtgaactacgagcgcaaaagcggaaaacagggttcatcgccacctccaccgcagtcatcgcaggagtag

SEQ ID NO: 123999 - DNA, 2115 bp, synthetic construct
  misc_feature 1..2115: note = Description of Artificial Sequence: Synthetic coding sequence
  source 1..2115: mol_type = other DNA
atggagagtaaaccaagtaggatcccacggcgtattagtgttcagccctcctcatcactatccgcgcgaatgatgtccggctcgaggggttcttcactcaacgacacctatcacagtagggattcctccttcaggctcgacagcgaataccagtccaccagcgctagcgcttcagcatccccatttcagtctgcgtggtatagcgaaagcgagataactcagggcgccaggtccagaagtcagaatcaacagcgagatcacgattcaaagcgaccaaagttgtcatgcactaactgtactacaagtgcaggtcgcaatgtcggcaacggcctcaatacgctgagcgactcgtcttggcgccattcccaggtaccacggtcttcttctatggtcctgggaagcttcggaaccgatctgatgcgcgagcgaagggatctggaaagaagaacagattcctctatcagtaacctgatggattattcacaccggtctggggatttcaccacctccagctatgtacaggacagagttcccagttactctcaaggagctcgcccaaaggaaaattccatgtctaccttgcagctgaatacttcgagcaccaaccatcagctgccctctgagcaccagactattctctcctcaagggacagtcgaaactcactgcggtcgaatttctcgtccagggaatctgaatcctctaggagcaatacacaaccaggctttagctattcatcctcaagagatgaagcacctatcatttctaactcagaacgggttgtatcttcacaacgcccattccaggagtcctccgacaacgagggaagaagaaccacgcgtcgactgttaagcaggattgccagcagtatgagctccaccttttttagtcgccgcagtagccaggactctttaaatactcgcagcctgaattccgagaacagctacgtgtctcctcggatcctgacagcatcacaatctagatccaacgtgcctagcgcctctgaagtaccagataaccgagctagcgaggcaagccagggcttccgattcttgagacgtaggtggggcctcagctctctgtctcacaatcatagttccgaatctgactccgagaactttaaccaggaatctgaaggcagaaacaccgggccttggctctcctcatccctgcgaaataggtgcaccccactattttctaggaggagacgggagggccgggacgagagttcccgcattcctacctccgatacaagtagccgctcccacattttccggcgggaaagcaacgaagtagtgcatcttgaagcacagaacgatcccttgggggctgctgctaatagaccccaagcatccgcagcttcaagttctgcaaccaccggtggtagcaccagcgattcggcacaaggcggccgcaataccggcatttccgggatcctgcccggctcgctgttccgattcgcagttcctcccgctcttggaagcaatctcacagataacgtgatgattacagtggacatcattccgtctggatggaactcagccgatggcaaaagtgacaaaaccaagtctgcgccaagccgggatcctgaacgcctgcagaagatcaaagagagcttgctcctcgaagattctgaagaggaggagggagacctctgtagaatctgccaaatggctgcagcctctagttccaatctgctgatagagccatgcaagtgcactggatctcttcagtacgtacatcaggattgtatgaagaagtggcttcaggctaagataaatagcggaagctctctggaggccgtgacaacatgcgagttatgcaaagaaaagttagagctgaacttagaagactttgatatccatgagctccatcgggcacatgcgaatgaacaagccgagtatgagtttatttcgagcgggctgtatctggttgttcttcttcatctctgcgaacaatctttctctgacatgatgggaaatactaatgaaccgtccactagggtgcggttcattaatctggcaaggacacttcaggcgcatatggaggaccttgaaacaagtgaggacgattctgaggaggacggcgatcataatagaaccttcgacattgcatag

SEQ ID NO: 124000 - DNA, 2115 bp, synthetic construct
  misc_feature 1..2115: note = Description of Artificial Sequence: Synthetic coding sequence
  source 1..2115: mol_type = other DNA
atggaaagcaagccgtctcgtatccctagaagaatatctgtacagccttcttcgtccttaagtgcaaggatgatgtctgggtctcgggggtctagcctcaacgatacttatcattcacgagacagcagctttcgcctggattcagaataccagagcacttccgcgtcggcatcagccagtccttttcagagcgcctggtattccgagtccgagattacacaaggagccaggagtcggtcacagaaccagcagcgcgaccatgattctaagcgaccaaagctttcctgtacaaattgcacgaccagcgccggccgcaacgtcgggaacggccttaataccctgtctgactcctcttggagacattcccaggtgccaagatcaagttcaatggttctgggttccttcggcacagacttaatgagagagcgccgcgatctggagaggcgcactgacagttctatttctaacctcatggattattcacataggtcaggtgattttacaacatcaagctacgtgcaggacagggttcctagctattctcagggagcgaggcctaaagagaattctatgtccaccctacagcttaatacctccagcacgaaccaccaactgccctccgagcatcaaaccattttgagctctcgcgactctcggaacagtctgcggtctaattttagttcacgggagtcagaatcttcaagatccaacacacagccaggattctcttattcaagcagtcgagatgaagctcctatcataagtaactccgagcgcgtcgtaagtagtcaaaggcccttccaggaaagctctgacaatgaggggcgccggacgacaagacgcttgctgtccaggatcgcttcttccatgagctccacatttttttctagaaggtcctcccaagactctttgaatacccggtcccttaattctgaaaacagctacgtcagcccccgtattttgaccgctagccagtcaaggtccaatgtcccctctgctagcgaagtgccagataatcgtgcttccgaagccagtcaaggcttccggttcctacgacgccggtggggactgtcctccttgtcacataatcactcatcagaaagcgactccgaaaacttcaatcaagagagcgaagggaggaatactggcccgtggctaagttcctcactacggaacaggtgcacccctctgttcagccgcagaaggcgggaaggacgggatgagtcgagtcgcatacccacgtccgataccagttctaggagccacatctttcgtcgggaatccaatgaggtggtacatcttgaggcccaaaatgacccactcggagctgcagccaacaggccccaggcttctgccgccagtagcagcgccactacaggtggatccacaagcgactctgcacaggggggcaggaacactggaattagcggtattctgccagggtcactgttccggttcgcagtacccccagccctgggcagcaatttgactgacaacgtgatgatcacggttgacattattccatctgggtggaatagcgccgatgggaaaagcgacaagactaagtccgccccttcacgcgaccccgagaggttacagaagattaaagaatccctattgctcgaggattctgaggaggaggagggggacctgtgccgaatctgtcagatggcagccgccagttctagtaatctattgattgaaccctgcaagtgtactggcagcctccaatacgtccaccaagattgcatgaagaaatggctgcaggcaaagattaattccggctcaagcctggaagcagtgaccacatgcgagctgtgtaaggaaaagctggaactgaatctggaggattttgacattcacgaactgcatcgagcgcacgctaacgaacaggccgagtatgaattcatatcttctggtctatatctggtcgttctgctgcatttatgtgaacagtcatttagcgacatgatgggcaataccaatgagccttcaactcgtgtaaggtttattaatctggcccggactctccaggcacacatggaggacctcgaaaccagcgaggatgactctgaagaggatggagatcacaatcgtacttttgacattgcctag

SEQ ID NO: 124001 - DNA, 306 bp, synthetic construct
  misc_feature 1..306: note = Description of Artificial Sequence: Synthetic coding sequence
  source 1..306: mol_type = other DNA
atggagagcaagccatcccgaatcccgcgcaggatttctgtgcagccttcttcttctcttagtgcacgtatgatgagcggatctagaggtagctccctgaatgacacctaccactcgagggacagcagtttccgcctagactctgaatatcagagtactagtgcctcagcctccgcatctcccttccaatccgcctggtacagtgagagcgagatcacccagggcgcccggtctcgtagccagaatcagcagagggatcatgatagcaagcgccccaagctgtcttgcaccaattgtaccacatag

SEQ ID NO: 124002 - DNA, 1908 bp, synthetic construct
  misc_feature 1..1908: note = Description of Artificial Sequence: Synthetic coding sequence
  source 1..1908: mol_type = other DNA
atggagtccaagccttctcggatccctagacgtatcagtgtacagccaagttcatcactttctgctcggatgatgagcggatccagaggatctagcctcaacgacacctaccactcgcgcgattcaagcttccggctggacagcgagtatcagagcacctctgcgagcgcgagcgcgtccccattccaatcggcttggtattccgagagcgagatcacccagggcgcacgatctagaagtcagaaccaacaacgagaccatgatagcaagcgacccaagctaagctgcaccaactgtacgacatcagctggcagaaacgtgggcaacggattaaataccctgagcgacgtccaagatagagttcccagttactcccaaggcgcaagaccgaaggagaattcgatgagcaccctccaactgaacacgagctcaactaatcaccagttgccatctgagcaccagaccattctgtccagccgtgactccaggaactccctcaggtctaactttagcagtcgcgaatccgagagttcacggagcaacactcagcctgggtttagttacagcagtagcagagatgaggcccccatcattagtaatagcgaacgggttgtgagtagtcagaggcccttccaagagagttcggacaacgaaggcaggcgaactacccgcagactgctcagcaggatagcgtcttccatgagttccacgttcttctcacgccgaagctcacaggacagtttgaacactagatctctcaatagcgaaaactcctacgtgagcccacgaatattgactgcctcccagtcccgttccaacgtgccctccgcctccgaagtacctgataaccgtgcgtcggaagcctcgcagggttttaggtttctccggcgccgatgggggctctcctcgctgagccataatcattcctctgagagtgactctgagaactttaaccaggaatccgaaggtaggaatacagggccctggttaagttcgtcactccggaataggtgtaccccactcttcagtcgcagacggcgcgagggccgtgatgaaagctcacgaataccaacctcagatacaagcagccgctcccacattttccgccgagaatcaaacgaggttgtgcatctcgaagcccagaatgaccctctgggcgcagccgccaacagaccccaggctagcgctgcatcaagcagcgccaccaccggcggcagcacttctgactctgcgcagggtggcagaaacacgggcatcagtggaatcctgcccgggtccttattccgcttcgctgtgccacccgcacttgggagtaacttgaccgacaacgtcatgatcactgtggatattattcccagtggttggaactctgcagatgggaagagcgataaaacaaagtctgctcccagccgggaccccgagagactccagaagataaaagaaagccttttactggaggactctgaagaagaggaaggagatctgtgccggatttgccaaatggcagctgcctcaagctcaaacctccttattgaaccatgcaaatgcaccggcagtctgcaatacgtgcaccaggactgtatgaagaagtggctgcaggcgaagattaattccggctcttctttggaggccgtaacaacatgtgaattgtgtaaagagaagcttgagctcaatctggaagacttcgacatacacgagcttcaccgcgcccacgccaatgaacaggctgagtacgagttcattagcagcggactttacctcgtggtcctactgcacctctgcgagcagtccttctccgacatgatgggcaacacaaacgagccttcgacccgcgtgcgcttgcagcgtatgatcccaaagaagacagagacaataaccggacacctcatcttgcctaactttatatag

SEQ ID NO: 124003 - DNA, 876 bp, synthetic construct
  misc_feature 1..876: note = Description of Artificial Sequence: Synthetic coding sequence
  source 1..876: mol_type = other DNA
atgtccatgcccttgcaccagatttccgcaattcccagccaggacgccatcagcgcccgcgtgtaccgttctaagacaaaagagaaagagcgggaggaacagaatgagaaaactttagggcatttcatgtcccacagcagcaatatttcaaaagcagggagccccccaagcgctagcgctcccgcccccgtgagctcattctctcggacgtctattacaccaagctcacaggacatctgcagaatctgccactgcgagggggacgatgagtctcccctgattacgccttgtcattgcactggaagcctgcacttcgtacaccaagcttgcctgcaacagtggattaagtcttccgatacaaggtgctgcgaactttgtaaatacgagtttatcatggaaacaaagctgaagcccctgcgtaagtgggagaagctacagatgacatcttctgagaggaggaagataatgtgttccgttaccttccacgtgattgccatcacttgtgtggtgtggagtctgtatgtccttatcgaccgaactgctgaagagattaagcagggccaggctaccggaatcctggagtggccattctggacaaaacttgtggttgtcgccattgggtttactggcggactgctttttatgtatgtgcagtgtaaagtgtatgtgcagctgtggaagcggctgaaagcttataacagggtaatctatgtacaaaactgtcccgagacgtcaaagaagaatatctttgagaaatcccccttgactgaaccaaactttgaaaacaaacacggatatggaatatgccactctgacacaaacagcagctgctgcacagaaccagaggatacaggcgccgagatcatccacgtgtag

SEQ ID NO: 124004 - DNA, 876 bp, synthetic construct
  misc_feature 1..876: note = Description of Artificial Sequence: Synthetic coding sequence
  source 1..876: mol_type = other DNA
atgtctatgcccctgcaccagatttccgccatcccatcccaggacgccatctcagctagagtttacaggtccaaaactaaggaaaaagagcgcgaggagcagaatgagaaaacactgggtcactttatgagtcactctagcaatatttctaaagccggcagtccgccctcagctagtgccccagctccggtttctagttttagtcggaccagcataaccccctcctcccaggatatctgcagaatttgtcactgcgaaggcgatgacgagtctccactcatcacaccttgtcattgtacgggttcacttcactttgtccaccaagcttgcctccagcagtggattaaatccagcgacactaggtgttgcgaactctgtaaatacgagtttatcatggaaactaagctgaaacctctgagaaaatgggagaagctccagatgacaagttctgagagacgcaaaattatgtgttccgtgacttttcatgtgatcgcaattacctgcgttgtctggtcgctgtacgtgctgattgacagaactgctgaagagattaagcaaggccaggccacgggtatactagagtggcccttttggactaaattagtcgtggtggccatcgggtttaccggtggcctgctctttatgtatgtgcagtgtaaggtctatgtccaattgtggaaaaggttaaaagcctacaatcgggtgatctacgtccagaactgcccagaaacttccaagaagaacatttttgaaaaatctccccttaccgagccaaactttgaaaacaagcacgggtatggcatttgccatagtgataccaatagctcttgttgcaccgagcccgaagacaccggtgcagaaattatccatgtatag

SEQ ID NO: 124005 - DNA, 876 bp, synthetic construct
  misc_feature 1..876: note = Description of Artificial Sequence: Synthetic coding sequence
  source 1..876: mol_type = other DNA
atgagcatgcctctccatcagatttctgctattccatctcaggacgccatcagcgcccgcgtctataggtcaaaaacaaaggaaaaggagagagaagagcagaacgagaagaccttaggccattttatgtcccactcctcgaatattagcaaggctgggagcccgccctccgctagcgcacctgccccagtgagtagcttcagtaggactagcataacccctagctctcaagacatttgccgcatttgtcattgtgagggagacgatgagagcccccttatcactccatgccattgtacaggatctttgcacttcgtgcatcaggcctgcctgcaacagtggattaagtcttccgacacacgttgttgcgagctctgcaaatacgagtttattatggaaactaagctcaaaccactgaggaaatgggaaaagttgcagatgacctcaagcgagcggcgaaaaatcatgtgcagtgtgactttccacgtgatcgccattacttgcgtggtctggtccctatatgtgctgattgacaggacagccgaggaaatcaagcagggtcaggcgactggtattctagagtggccattctggaccaaactggtcgtcgttgcaattggcttcacaggtggattactttttatgtacgttcagtgcaaggtttatgttcagctctggaaacggctaaaggcatataacagagttatctacgttcagaattgtcccgaaacctcaaagaaaaacatattcgagaagtctccacttacagagcccaatttcgagaacaaacatgggtacgggatctgtcatagtgataccaacagctcctgttgcaccgagcccgaagacacaggtgcagagataatccacgtatag

SEQ ID NO: 124006 - DNA, 1371 bp, synthetic construct
  misc_feature 1..1371: note = Description of Artificial Sequence: Synthetic coding sequence
  source 1..1371: mol_type = other DNA
tgaatatgtaaggacacactgcaggcttctaaaagaaacagcttcgggagcgagtgggcccaggctctaaaacctgcaaaaaacactaaggcacgtcggacgctgaaattcagccggtctcttaacgacgtcggggagaaggctcaggatacgtcagagtctttcgcatacgttgagaggacgtgttcagaagggaagttgatcctcccacaggatacctgcttaaggactaataggttccaccacaaggagaagcgtacactgaaccacaaacccttaggcaattcaaagcattcatgcgtgtcctgtctgagtgctggaaggagtacggctagtgaggtcgaggccgggaaagggggcagaccgggcctacttctcgaggagaaggctgacggggaagcgacttctcggtcccggcagctgcttcaatacctctttagtctgagtcacgggctttctgcttcctccctccatcggttccatgagctcgagagctgcgcggctcgactgcacaccgccaagagcagcagcgggcttgctggttctatgggattctgtagcgatgaaatgggggacgacgacgtctttgaggactccacgagtgccaagttgaagtcccgcgtcctccgggcccctctctgcagcacggagaaagacagcgacctagactgtcccagccccttctccgagaagctgcctcctatttctcccgtttcgactagcggggatgtctgccggatatgtcactgcgagggcgacgatgaatctccattaatcactccctgccactgtacaggatcccttcactttgtgcaccaggcatgccttcaacagtggattaagagctctgacacgcgttgctgcgagctgtgcaaatatgagttcatcatggagacgaaactgaagcctcttagaaaatgggaaaagttgcagatgacctcaagcgaaagacggaagatcatgtgctccgttaccttccacgtcattgcaatcacctgcgtcgtttggagcctgtatgtccttatcgacaggacagcagaggagataaaacaaggccaagcgacaggaatcctggagtggcccttttggactaaattagtggtggtcgctattggcttcactggcggcctgctattcatgtatgttcaatgcaaggtatacgtgcagctttggaagcgtctgaaagcttataaccgtgtgatttatgtccaaaattgtccagaaactagcaaaaagaacatcttcgaaaaatcccccctcactgagcccaatttcgaaaataaacatgggtacgggatttgtcacagtgatacgaatagctcctgctgcaccgagcccgaggacaccggagccgagatcattcatgtttag

SEQ ID NO: 124007 - DNA, 270 bp, synthetic construct
  misc_feature 1..270: note = Description of Artificial Sequence: Synthetic coding sequence
  source 1..270: mol_type = other DNA
atgagtatgccactacatcagatctctgccatcccttcccaggatgctatcagtgcccgtgtatatagatccaagactaaggagaaggaacgggaggagcagaacgagaagaccctcggccatttcatgagccacagcagtaatatttccaaggcagggtcaccaccctccgccagcgccccggccccagtgtcttctttttcacggacctctatcaccccaagcagccaggatatctgcaggatttgccattgtgaaggtgatgattag

SEQ ID NO: 124008 - DNA, 1041 bp, synthetic construct
  misc_feature 1..1041: note = Description of Artificial Sequence: Synthetic coding sequence
  source 1..1041: mol_type = other DNA
atgctcaagtctcggctgcgcatgtttttgaacgagctaaagctcctcgtattgaccggggggggccggcctagggcagaaccacagccacgtggcgggaggggcggaggctgtgggtgggcccctttcgcggggtgctcaacccgcgacggcgacggcgatgaggaagagtactatgggtccgagcctagggctcgtggcctggctggcgataaagaaccacgagccggccctctcccacctccagcccctccacttcctccgcctggcgccctggacgctttatccctgtcttcctctctggactcaggtctgcggacgcctcaatgtcgaatttgctttcagggaccagaacagggtgaactcctgtctccgtgccgctgtgacggaagcgtccgctgtactcaccagccatgtctcattcgctggatttctgaaagaggatcctggagctgcgagctctgctattttaaatatcaagtcttggccatctctacaaagaatccgctccagtggcaggcaataagcctgaccgtgatcgaaaaagtgcagatcgccgctattgtccttggctccctgttcttggttgcctctatttcctggttgatctggagcagcctgagcccaagcgctaagtggcagcgtcaggacctcttgttccagatttgttacgggatgtatggttttatggacgtcgtgtgcatcgggcttattattcacgagggcagcagcgtttaccggatcttcaagcgctggcaggccgtgaatcagcagtggaaagtgctgaactacgataagaccaaggatattggcggggacgcggggggaggcacggctggtaaatccggccccaggaatagcagaaccgggcccacctcaggcgccacgtctcggccaccggccgctcagagaatgcgcaccctcctgccccagagatgtggctacacgatactgcatctcttgggacagctgagacctccggacgcccgctcatccagccattccgggcgggaggtcgtgatgagagtgacaacagtttag

SEQ ID NO: 124009 - DNA, 702 bp, synthetic construct
  misc_feature 1..702: note = Description of Artificial Sequence: Synthetic coding sequence
  source 1..702: mol_type = other DNA
atggtaagcgacaaatgtcacatcctggacctcatcaaagcacagaggcggcagatgcttatcttgccagaaggcttccgggaggggtcatggtccaccctcctgtttcgcgcaacacaccacctggccctgcatcccttccttggcctgttcggtgccctttctccaacccagtggcaggccattagtctgacggtcatcgagaaagttcagattgctgcgatcgtgcttggctccctgttcctcgttgccagtatctcttggctcatctggtctagcctgagccctagtgccaaatggcaacgtcaagacctgctatttcagatctgttacgggatgtatggcttcatggacgttgtctgtatcggcctgattatccatgagggcagtagcgtataccgcatatttaagaggtggcaagctgtcaaccagcagtggaaagtcttgaactatgataaaacaaaagacatcgggggcgacgcaggaggcggaacggcgggtaaaagcggccccaggaactcacgaaccggcccgacgagtggtgccacaagcaggcctccggcggcccaacgaatgagaactctactcccccagaggtgcggatatacgattctacacctccttggacaactgcgtcctcccgatgcccgaagttcttcgcactctggcagggaagtggtaatgcgggtcacaacggtgtag

SEQ ID NO: 124010 - DNA, 3159 bp, synthetic construct
  misc_feature 1..3159: note = Description of Artificial Sequence: Synthetic coding sequence
  source 1..3159: mol_type = other DNA
atgaaactggtgaatatctggttgctcttgctggtggtgctcctgtgcgggaaaaagcacctcggtgaccgcctcgaaaaaaagagttttgagaaagcaccgtgtccgggatgctcacacctcacattgaaagtggagttttcctcgaccgtggtagaatacgagtatattgtcgcctttaatggctacttcaccgcaaaggcccgtaactcatttatatcttcagctctgaaatcatccgaggtggataattggcgtattattccaagaaataacccgtcaagtgattatccgagtgattttgaggttatccagataaaggaaaagcagaaggccggcttgctgacgctggaagatcatcccaatattaagagggtgacccctcagaggaaagtgtttcggtctttgaaatacgccgagagcgatccgactgtaccgtgtaacgaaaccaggtggtcacaaaagtggcaatcgtctcggccgttacggcgggcctcgctgagtctgggttccgggttttggcacgctacaggcaggcactcctccaggcgtctcctgcgtgctatcccaagacaggtggcacaaacactccaggcagatgtgttgtggcaaatggggtatacaggagccaacgtgcgcgttgccgtatttgatacgggtttaagcgaaaagcatccacacttcaaaaacgttaaggagagaactaactggacaaatgaacggaccctggatgacggccttggtcatggcacatttgttgccggcgtaatcgccagcatgcgggagtgccaaggttttgccccggacgcggaacttcatatatttagagtgtttactaacaaccaagtgtcctacacctcctggtttttggatgcctttaactatgctatcctaaagaagattgatgtcctaaacctctcaattggaggcccggattttatggatcatccctttgtggataaggtgtgggaacttaccgcaaataacgtcatcatggtgtccgccatcggcaatgacggcccgctctacggaacgttgaacaacccagctgatcagatggatgttatcggggtgggtgggatcgactttgaagacaacattgcgagattttccagtcgcgggatgacaacttgggaattgccaggaggctatggcagaatgaagccggacattgtgacatacggagccggtgtgcggggttcgggcgtgaagggtgggtgtagagcattaagcggcacaagtgtagcaagccctgttgtagccggagccgtcactttgctggtatccacagtgcagaaacgagagttggtgaacccagcgtctatgaagcaagccctgatagcgtctgcccgaagactacccggagttaacatgtttgagcagggccacggaaagcttgaccttctgcgagcttaccagatcctcaactcttacaagcctcaggcctcgctgtccccttcctatattgatctgacggagtgtccctacatgtggccatattgcagccagccaatttattatggcggcatgccgaccgtagtcaatgtaacaattctgaatggaatgggagtcaccgggcgtattgttgacaagcctgattggcagccttatctgcctcagaacggagataacatcgaggtagccttttcttatagctccgtgctgtggccatggtctggttatctcgctatctccattagtgtcaccaagaaggcagcctcatgggaaggcatagctcaaggccacgtgatgatcaccgtggcatcaccagccgagaccgaatctaaaaatggcgcagaacaaacatcaaccgtcaagctacctatcaaggtaaagatcattccaacacccccccggagtaagagagtgctttgggatcaatatcataatctgaggtaccccccagggtacttccctcgggataatcttcgaatgaagaatgacccattggattggaatggcgaccacatccatactaattttcgcgacatgtaccagcacctgagaagcatggggtatttcgtcgaggtgcttggggcccccttcacttgtttcgacgctagtcagtatggcaccttactgatggttgactcggaagaggagtatttccccgaggaaatcgctaagttaaggcgcgacgtggataatgggctatcactggtaattttttctgactggtacaacacctcagttatgcggaaagtcaagttctacgacgagaacactaggcagtggtggatgcccgataccggcggagcaaatattcccgcacttaacgagctcctgagtgtctggaacatgggctttagtgatgggctctacgaaggcgagttcacgttagccaatcacgacatgtactacgcctccggttgttcaattgccaagtttcctgaagacggggttgtgattacccaaactttcaaggatcagggcctggaagtgcttaagcaggaaacagccgtggtagaaaatgttcccatactggggttataccaaatccccgccgaaggtggaggtcgaatagttctgtatggagattcaaattgtctggatgacagccacaggcagaaggattgtttttggttactggatgctctgcttcagtacacctcgtatggcgtgacccccccttcactcagccattccggcaataggcagcggccgcctagtggcgccgggtccgtgactcccgaacgcatggaaggaaaccacctccacaggtattctaaggtgttagaggcccatcttggcgacccaaaaccgagacccctacccgcgtgcccccggctatcatgggctaagcctcagcccctcaatgaaaccgcccctagcaacttatggaaacaccagaaattgctctcgatcgatctggacaaggtcgtgttacctaactttaggtccaatagaccgcaggtgcggcccctcagtccgggagagagtggcgcctgggacatcccaggcggcatcatgcccggtagatataaccaggaagtgggtcaaaccatcccggtgtttgcattcctgggggctatggttgtgctggcatttttcgtggtccaaattaacaaagccaagtctaggccaaagaggcgaaagcctcgggtgaagaggccacagctgatgcagcaggtacacccccctaagaccccgagcgtatag

SEQ ID NO: 124011 - DNA, 1494 bp, synthetic construct
  misc_feature 1..1494: note = Description of Artificial Sequence: Synthetic coding sequence
  source 1..1494: mol_type = other DNA
atggcacttgtcggactgcctgggcacctgcatttctgtgaccaagagtccggattcttagggcgacattgtagcgggccgtgccacgaccactgcggcttccccagccgggatcgcgtaaagaagtggtgtcggaccgactttaattccaaattgccaatcaaggtcaagattattccaaccccaccacgctccaaaagagtgctatgggatcaatatcataatcttcgttaccctcccggatattttcctcgggacaatctgaggatgaagaacgaccccctggactggaacggagaccacatccataccaattttcgggacatgtatcagcacctgagatccatggggtatttcgtggaggtcctgggcgcccccttcacctgctttgatgcctcccagtatggaaccctgctgatggtggattctgaggaagaatatttcccagaggagatcgcaaagttacggcgggatgtagacaatggattatctctcgtaatattttctgactggtataataccagcgtcatgcgcaaggtcaaattctacgacgagaacactcggcaatggtggatgcccgatacaggtggagccaacataccagccctcaacgagctcttatctgtctggaatatgggattctcagacgggctttacgagggcgagttcactctcgctaaccacgacatgtactacgcttcaggctgctcgattgccaagtttcctgaggatggagtcgtcatcacacaaacatttaaggatcaggggctggaggtgctcaagcaggagacagctgtggtagaaaatgtgcccatcttgggtctataccagattcccgccgaaggcggagggcgaatcgttctgtacggtgatagtaattgtcttgatgactcccaccgtcagaaggattgcttttggctgcttgatgctttgctgcagtatacctcttacggcgtgacaccccccagcctgtcacattctggtaatcgccaacgcccaccgtccggcgctggcagcgtgacaccagagagaatggagggcaaccatctccaccgatactcaaaagtgctcgaggcgcacctaggggatccaaaacctagaccactgcccgcctgtccacgcctgagctgggctaaaccacagcctctaaatgagactgccccaagcaatctatggaaacaccagaaactactcagcatagatctggacaaggtggttctcccaaatttccggagcaatagaccacaggtccgtccactgtcgccgggagagagcggagcctgggacattccaggcggaatcatgcccgggagatacaaccaggaagtggggcagaccataccggttttcgcgtttctgggggctatggtggtgcttgccttttttgtggttcagattaacaaggctaagtctaggcccaagcgacgtaagccaagagtgaagcggccccagttaatgcagcaagtccatccccctaagaccccctcagtctag

SEQ ID NO: 124012 - DNA, 993 bp, synthetic construct
  misc_feature 1..993: note = Description of Artificial Sequence: Synthetic coding sequence
  source 1..993: mol_type = other DNA
atgatcccagtttcacttgtggtcgtggtcgtgggcggatggacagtcgtgtatcttacggatctggtgctgaaaagcagcgtgtactttaaacattcatatgaggattggctagaaaataatggcctgtccatcagtccatttcacattcgatggcagaccgccgtattcaacagggcattttacagttggggtagaaggaaagctaggatgctgtaccagtggtttaatttcggaatggtatttggggtcattgcaatgttcagtagcttctttctactcggaaagaccttgatgcagaccctggcccaaatgatggctgactcaccaagcagctacagctccagttcttcgtctagcagctcatccagctcctcttctagttcatcgtcctcctcctcgagctctctccataatgaacaggtgctgcaagtggtggtccctggtataaacctcccagttaatcagcttacttacttttttaccgcggtgctcatttccggcgtagttcacgagatcggtcacggaattgcagcaattcgcgaacaagtcaggtttaacggttttggaattttcctgttcattatatatccaggggcattcgtggacctgtttaccacccacctgcagctgattagcccagtgcagcaactacgcatattctgtgcggggatctggcacaactttgttctggcattactgggaatattggcgcttgtacttctcccagtgattttactacccttctactatacaggagtaggagtcctcattaccgaggtggccgaagactccccagccatagggccacgtggtctgtttgtgggcgatctggtaactcacctgcaggattgtccggttaccaacgttcaggattggaacgaatgtttagacactattgcctacgaaccccagattggttactgtattagcgcgtccactctgcagcagctgagttttcccgtacggggcgtttacatttcttccatttag

SEQ ID NO: 124013 - DNA, 1560 bp, synthetic construct
  misc_feature 1..1560: note = Description of Artificial Sequence: Synthetic coding sequence
  source 1..1560: mol_type = other DNA
atgataccagtgagcttggtggtagtcgtggtgggaggatggacagtggtctatctgacagatctggttttgaagagttctgtctacttcaaacactcctacgaagattggctcgagaataatggccttagcatctcgccttttcatattagatggcagactgccgtgttcaaccgcgctttctactcatggggccgcaggaaagcccggatgctctatcagtggttcaacttcggcatggtgtttggagtgattgccatgttcagttccttttttctgctgggaaagacattaatgcagactctggcccagatgatggcggactcgcccagctcttactcaagtagctcttcctcttcttcctctagctcatctagctcatcgtccagctcaagcagctcaagctccctgcacaatgagcaggtactgcaagttgtcgtacccggaattaatctgcccgtcaaccaacttacatacttctttactgcagtgttgattagcggagtggtccatgagatcgggcacggcatcgcagccatccgcgaacaggtgcggttcaatggatttggaattttcctgtttatcatctacccgggcgctttcgtggacctgttcacaacacatttgcagctgatttcccccgtgcagcagcttcgcatcttttgcgctggcatctggcataatttcgttctagcgctattagggatacttgctctggtgctgctacccgtgatactcctccctttctattatactggagtaggcgtgctcataactgaggttgccgaggactcccctgccatcggcccaagaggcctgttcgtgggggacctagtgactcaccttcaggactgccccgtcactaacgtgcaggactggaatgaatgtcttgatactattgcctatgaaccgcagatcggctactgcatctctgcaagcacactacagcagctcagctttcctgtgagggcttacaaacgactcgacgggtctacagaatgttgtaataaccattccctgacagacgtctgcttttcctatcgaaataattttaacaagagactacacacctgtcttccagcaaggaaggcagtggaggccacgcaggtctgccgcactaataaggactgtaaaaagagttcgtcctctagcttttgtatcattccttctctggagacccacacaaggctcatcaaggtcaagcatccaccacagatcgacatgctgtatgtcggacaccccctgcacctgcactatacagtgtccatcacttccttcataccgagatttaacttccttagtatcgatctccctgtcgtcgtcgaaacctttgtgaaatatttgataagcttgtcaggggcattggccatcgtaaatgccgtcccttgctttgccctagacggacagtggatcctcaactcttttctagacgcgacgttgacctctgtgatcggagataatgatgtgaaggacctgatcggtttctttatcctgttaggggggagcgttctattggcggcaaatgtcaccctcggtctgtggatggtgactgctagatag

SEQ ID NO: 124014 - DNA, 207 bp, synthetic construct
  misc_feature 1..207: note = Description of Artificial Sequence: Synthetic coding sequence
  source 1..207: mol_type = other DNA
atgcatcagacatactcgcgccactgccggcctgaggaacggtggtcccaggagggttggaatatccccgcaaacgggttcaatatttgcagatgcctgaatataggtatgaaactgcggttatggaataacctcaacaagagtaatatacttggggcccttaaaatcaagaggcgggagattcgggctccttttttactcccctag

SEQ ID NO: 124015 - DNA, 762 bp, synthetic construct
  misc_feature 1..762: note = Description of Artificial Sequence: Synthetic coding sequence
  source 1..762: mol_type = other DNA
atggtgctgttgaaacttctggaggtgtaccgcaagggctcggcgggaacctttcataagagtacgatctttggaaatactatcatgacttcacagccagtccctaatgaaacaatcattgttttgccttccaacgtgatcaacttctcacaagccgaaaagccggagccgactaatcaaggacaagacagtctgaagaaacacttgcacgcagagataaaggtaatagggacaatccagattttgtgtggaatgatggttctgtccctcggaataattctcgcctcagcctctttctcacccaactttactcaggtgactagcacactgttaaacagcgcatatccttttattggcccgttcttctttatcatcagtgggagtctctcaattgctactgaaaagaggctgaccaaacttttagtacactcatccctggtaggatctatcctgtctgcactgtcggccctggtgggtttcattatactgagtgtcaagcaagcgacgttgaaccctgcttccctacagtgcgaattggacaaaaacaacatccctacacgttcatacgtgtcctatttctaccatgactctctttacactacagattgttacaccgcaaaagctagtttggccggcactctgtcactgatgctgatatgtactctgctggagttctgcttggcagtgctcacagcagtgctgaggtggaaacaagcatactccgactttcctggcgtatctgtcctggcggggtttacctag

SEQ ID NO: 124016 - DNA, 804 bp, synthetic construct
  misc_feature 1..804: note = Description of Artificial Sequence: Synthetic coding sequence
  source 1..804: mol_type = other DNA
atgaaggcagaagccactgtaattccctcaaggtgtgcgaggggcttacccagttggcaggttctttcccccgttcagccatggcagacctcagccccccagaacaccacacagccaaagcttttggcacctcaccaacacgagaagtcgcaaaaaaagtccagtctccttaaagagttgggtgccttccacattacaatcgccctgcttcatctagtattcggcggttacctggcttcaatagtaaagaatcttcatctcgtcgtcctgaagagttggtacccattttggggagcagccagcttcctcatttccgggatacttgcgataactatgaaaacattcagcaaaacctatctcaaaatgctctgcttgatgactaacctcatatctctgttttgtgtgcttagtggattgtttgtcatcagcaaagaccttttcctcgaatcaccatttgaaagtccaatctggcggatgtaccctaattctactgtccacatacagaggttggagcttgctctcctttgcttcaccgtgttagagctgtttctgcccgtgccaacagcggtcacagcctggaggggggactgtccttctgcaaaaaatgacgatgcttgcctggtgcccaacacccccctacacttaaaaggcctccccgtggaaccaccaccatcctaccagagtgtgatccagggggacgcccagcacaaacagcaccaacgattgcgcgaagttaagcaggtggcaccagatacttggatcgttacggatggggccgcaatctggactcagaccgctaattag

SEQ ID NO: 124017 - DNA, 804 bp, synthetic construct
  misc_feature 1..804: note = Description of Artificial Sequence: Synthetic coding sequence
  source 1..804: mol_type = other DNA
atgatgtcgtcaaaaccaaccagccacgccgaggtgaacgagaccataccgaacccttacccaccttcctccttcatggcccccggcttccagcagcctctgggtagcataaatctggaaaaccaggcacagggcgcccagcgagcccagccttatgggattacctctcccggcatattcgccagctcccaacccggccaggggaatatccaaatgatcaacccctccgtgggaaccgcggtcatgaactttaaggaggaagcgaaggcactgggcgtgatccagatcatggttgggctcatgcatattggtttcggtatcgtgttgtgtctgatatctttttccttcagggaggtcttgggatttgcctcaacggcggttatcggcggttacccattctggggaggcctctctttcatcatttccggaagcctgtcggtctcagctagtaaagaattatctcggtgtcttgtgaagggaagtctaggaatgaatatcgtgagtagtatcctcgcctttattggcgtgattctgctcctcgtggatatgtgcattaatggagtcgcaggccaggattactgggccgtcttgtcaggaaagggaatctccgcaacactaatgattttttcattactggagttcttcgttgcctgcgccaccgcccactttgccaatcaggctaataccactactaacatgtccgtactggtaatccctaatatgtatgagagtaaccctgtgacccctgccagcagcagtgctccccctcgttgtaacaactactcggctaatgcccctaaatag

SEQ ID NO: 124018 - DNA, 345 bp, synthetic construct
  misc_feature 1..345: note = Description of Artificial Sequence: Synthetic coding sequence
  source 1..345: mol_type = other DNA
atgatgtcgagtaaacctacctcgcacgccgaagttaatgagacaatccccaatccgtacccacctagcagttttatggccccaggatttcaacagccactgggcagtattaacctggagaaccaggcgcagggggcccaacgggcacaaccttatggcattacaagtcctggaatcttcgctagctcgcaacccggccaggggaatatacagatgatcaatccttccgtggggaccgccgttatgaactttaaagaggaggcgaaggccctgggcgtaattcagataatggtggggctcatgcatattggctttggcattgtgctgtgtctgattagcttttag

SEQ ID NO: 124019 - DNA, 666 bp, synthetic construct
  misc_feature 1..666: note = Description of Artificial Sequence: Synthetic coding sequence
  source 1..666: mol_type = other DNA
atgatgtcgtctaaacctacaagccatgccgaagtgaacgagacaatcccgaacccctatccccctagttcgtttatggcgcctgggttccagcaacccctaggatcgatcaacttagaaaatcaagcgcagggcgcccaacgagctcaaccctacggtattaccagccctggtattttcgcctcgtcccagccaggccagggaaacatccaaatgattaaccccagtgtgggtacagccgtgatgaacttcaaagaggaggctaaggcacttgggtttattatctcgggaagtttgtccgtctcagcttccaaggagttatcacggtgcctggtgaaaggcagcttgggtatgaatatcgtctcatctatactggcctttatcggagtcattctgttgctggtcgacatgtgtatcaatggagtggcagggcaggattattgggctgtgctgagtgggaaaggcatttccgccactctcatgatattctccctcctggagttctttgtagcctgcgccacggcccacttcgctaatcaagctaacaccaccacaaacatgtctgtgctcgttatccccaacatgtacgaatccaacccggtcacccctgccagttcatcggctccaccgagatgcaataactatagcgcaaatgccccaaagtag

SEQ ID NO: 124020 - DNA, 972 bp, synthetic construct
  misc_feature 1..972: note = Description of Artificial Sequence: Synthetic coding sequence
  source 1..972: mol_type = other DNA
atgaccgagcaggttatcggcgcgaattccgttcccggtatcatcgcgcctgataatgtccatgttatacagccttccaatcctgtggcgagtggcaaccaccttcagccaagcgaagtaacaacctatccaattagcccgaaagtgatccactgcgacaccggtagagcgaacttgcagaacctgttggtggttaatcagaattctgctgctggcgtgcagtcccaacctatcgggtatcagcggcaataccctgttggcactgccagcttgcagacagtgccaggagtcatccagtacacacagggaactacaaatctgcagacctggccaggtgatctccagaaccccctgaatgctaatcctggccttacccatacctctaattcctcgcagtggaacacatctttcgcgtcctttacatcattcaatccaaaaaagttcatcaatgaggaggttcgtacccttggcgctattcaaattctaatcggacttactcatatttttagcgcaattaatccagtcctttactactaccccttcgtgacctggctaagcgggtatcctttgtggggcggcctcagttatatcgttagtgggtccctgtccgtttgggctgctaaagatccttccccctgtgtcgtgaacagctccatttcattcaacatcatatcagccctttttgcctttgcaggcattttcattatcattactgacttgtcactttactacgtgaccacatatagcaaggccgtgagtggtggccttctgccgttcgccctgctcgagtttatcttaacctgcgttgtgagccacttcggatgtcaggccacttgttgcaggcagtttgaaaacgtggcggtgatccctaccgtgttttcctttaaccccgcaaacactacgacatcccccgttaacgccactacagggcccgtcaacgcagccaccgggcccgtttccgctacaaattag

SEQ ID NO: 124021 - DNA, 735 bp, synthetic construct
  misc_feature 1..735: note = Description of Artificial Sequence: Synthetic coding sequence
  source 1..735: mol_type = other DNA
atggatacagaatcaaatcgcagagccaatctggccctaccccaagaaccttcttccgtgcccgccttcgaagtgctcgagatcagcccccaggaagtgagttctggccgattgctgaagagcgctagtagccctccgcttcacacatggctaaccgtgttgaagaaagaacaggaattcttgggggtgactcaaatactgacagcaatgatctgcctgtgttttggcaccgtggtgtgctctgtactggacatctcccacatcgagggggatatcttttcatccttcaaggctggctacccgttctggggcgccatattctttagcatatctgggatgttgtctatcatcagcgaacgtcggaacgccacctacctcgtccggggcagtctgggagccaacacagccagttcaatcgctgggggtaccggtatcaccattttgatcattaacctaaaaaagtccctggcctacattcacatacattcttgtcagaaattcttcgaaaccaagtgcttcatggccagtttctcgacggagatcgtggttatgatgttgtttctaaccatccttgggctcggctctgcggtttcactgacaatatgcggagctggggaagaattgaaagggaacaaagttccggaggatagggtatatgaagagctcaacatctatagcgccacctattctgagctggaggatccaggggagatgtcccctcctatcgatctgtag

SEQ ID NO: 124022 - DNA, 126 bp, synthetic construct
  misc_feature 1..126: note = Description of Artificial Sequence: Synthetic coding sequence
  source 1..126: mol_type = other DNA
atggacacggagtccaaccgtagagcaaacctggcactgccccaggaacccagtagcgtcccagcttttgaagtcctggaaatctccccacaggaagttagctctgggaggttacttaaatcttag

SEQ ID NO: 124023 - DNA, 645 bp, synthetic construct
  misc_feature 1..645: note = Description of Artificial Sequence: Synthetic coding sequence
  source 1..645: mol_type = other DNA
atggctagtcatgaggtggacaacgctgaactcgggagcgcgtctgcccacggaacacctggctccgaagcggggccagaagaactaaacacaagcgtttatcagccaatcgacggaagtcccgattatcagaaggcaaagctgcaagtcctgggcgccattcagatcttgaatgccgcgatgatactggccctgggcgtctttctggggtctctccagtatccctatcattttcagaagcacttttttttctttactttctatacgggctaccccatttggggagcagtgtttttctgctcgtccggtactctgagcgttgtggcgggtatcaaaccgacgagaacgtggatccagaacagttttggcatgaacatcgcgagtgccactatcgcactggtcgggaccgctttcttgagtctgaatatagctgtcaatatccagagcctccgtagctgccattcatcttccgagtcccctgatttgtgtaactatatggggtcaatcagcaatgggatggtgtccttgctgctcatcttaaccctactggagctgtgcgtgactatctctacaattgctatgtggtgcaatgccaattgctgcaattcccgcgaagagatttcctctccccccaatagcgtctag

SEQ ID NO: 124024 - DNA, 507 bp, synthetic construct
  misc_feature 1..507: note = Description of Artificial Sequence: Synthetic coding sequence
  source 1..507: mol_type = other DNA
atggcatcccatgaggtcgataatgcagagcttgggagcgcgtctgctcatggaacgccggggtctgaggcgggccccgaggaactgaatacctcagtctaccagcccattgacggctcaccagactatcaaaaggcgaaattacaagttctgggtttttgctctagtggaacactcagcgtcgtcgctggcatcaagccaacacgcacctggatccaaaattctttcggaatgaacattgcgagtgccaccatcgcgttagtggggactgctttcctatccctgaatattgccgtgaatatccaatcactacgtagctgccactcgtcctcggaaagccctgacctgtgcaactatatgggatcgatttccaatggaatggtttccctcctgctcattctgacactgttggagctgtgcgtcacaattagcaccatcgccatgtggtgtaatgccaattgctgtaattcgcgagaagaaattagtagtccacctaattctgtatag

SEQ ID NO: 124025 - DNA, 276 bp, synthetic construct
  misc_feature 1..276: note = Description of Artificial Sequence: Synthetic coding sequence
  source 1..276: mol_type = other DNA
atgaatatcgcctctgctactattgcactcgtgggcaccgccttcctgagtctgaatattgccgtcaatattcagtccctccgatcttgccactcttcatctgagagtcctgacttgtgcaactatatggggtctataagtaacggtatggtgagtctgttactgatcctgactttgctagaactctgcgttacaatatccaccatagcaatgtggtgtaatgctaactgctgtaactcacgtgaggaaattagcagtccccctaacagtgtttag

SEQ ID NO: 124026 - DNA, 507 bp, synthetic construct
  misc_feature 1..507: note = Description of Artificial Sequence: Synthetic coding sequence
  source 1..507: mol_type = other DNA
atggcttctcacgaagtagataacgccgaactagggtctgcaagcgctcacggaactcccggaagtgaggccggacctgaggagttgaacacctccgtgtaccaacccatagatgggagcccagattatcagaaggcaaagctgcaggtgctcggtttttgctctagcggtactttaagtgtcgtggcaggtatcaaacctacaagaacatggattcagaattcttttggcatgaacattgcttccgcaacaatcgccctcgtagggaccgccttcctgagtcttaatatcgcagttaatatccagtctctgaggtcatgccactcctcgtcggagtctcccgatctgtgtaactacatggggtccataagtaacggcatggtgagcctgttgctgatattgaccctcctcgagctgtgcgtgactatcagtactatcgcaatgtggtgtaacgctaattgctgtaactccagggaggagatatcttcccccccaaatagtgtgtag

SEQ ID NO: 124027 - DNA, 720 bp, synthetic construct
  misc_feature 1..720: note = Description of Artificial Sequence: Synthetic coding sequence
  source 1..720: mol_type = other DNA
atgcatcagacttactcacgacattgtaggccagaagaatcaacattctccgctgctatgactactatgcaaggcatggagcaggccatgcccggtgctggaccaggggttccacagctcgggaatatggccgtcatacactctcacctgtggaaaggacttcaggaaaagttcctgaagggggaaccaaaagtccttggagttgtgcagatcctaaccgcgcttatgtccctgagcatgggaattacgatgatgtgcatggcttcaaacacctacggctcaaatcctataagtgtgtacatcggctatactatctggggtagcgtgatgttcatcataagcggaagtctgtccatcgccgcaggaatccgcacgacaaaaggactggtgcgcgggagccttggcatgaacataacgtcatcagtcctggccgcatctgggattctgatcaacacgttttcactcgccttttattcctttcatcacccatactgcaactattatggaaatagtaataattgtcacggcacaatgagtattctaatgggacttgacggtatggtgttgttactgtctgtccttgagttttgtatcgcagtgtcactttccgccttcgggtgtaaggtcctctgctgcactccagggggtgtcgtgctgatcctgcctagtcactcacacatggccgagacagcgtcaccaaccccacttaacgaagtctag

SEQ ID NO: 124028 - DNA, 663 bp, synthetic construct
  misc_feature 1..663: note = Description of Artificial Sequence: Synthetic coding sequence
  source 1..663: mol_type = other DNA
atgactaccatgcagggtatggaacaggcaatgcccggcgccggacccggagttccccagctgggcaatatggctgtgatccacagccatctctggaagggccttcaggaaaagttcctaaagggggagcccaaggtgctcggcgtagttcaaattctaacggctctcatgagtttaagcatgggaataaccatgatgtgcatggcatcgaatacttacggcagcaaccccatctctgtatatatcggctacacgatctggggaagtgtaatgttcatcatatctggttcactttctattgcagctggaattagaaccacaaaaggcctggtcagagggagtctgggcatgaacattacgtctagcgtgttggcagccagcggaatcctgataaacacattctcactcgccttttattcatttcaccatccctattgtaactactacgggaatagcaacaactgccacggaaccatgtcaatcctgatgggcctcgatgggatggtcctcctgttatcagtgctggaattctgtattgcagtgagcctcagcgcatttggatgtaaagtcttgtgttgtactcctggaggggtggtgctcatcctccccagccactcccatatggccgagacagccagtccaacaccacttaatgaagtttag

SEQ ID NO: 124029 - DNA, 663 bp, synthetic construct
  misc_feature 1..663: note = Description of Artificial Sequence: Synthetic coding sequence
  source 1..663: mol_type = other DNA
atgacaaccatgcaaggcatggaacaagctatgccaggagccggaccaggcgtgccgcagcttgggaacatggctgtgattcattctcatttatggaaggggctgcaggagaaatttctcaagggggaacccaaggtactcggcgtggtacaaatcctcaccgctcttatgtccctgtccatgggaatcactatgatgtgtatggcttctaatacatacggctcaaacccaatctccgtatatatcggctacacaatctggggctcagtcatgttcattatctctggtagtctttccatcgccgccggaatcagaaccacaaaagggctggtgcgtggcagtctaggaatgaatattacaagctccgtccttgctgcaagcgggatcctgattaataccttcagtctcgcattttactccttccaccacccttattgcaactactatggcaacagtaacaattgccacgggacgatgtctatcctgatggggctggacggaatggtgctgttgctgtcggttctggagttctgtatcgcagtgagcctgagcgcttttgggtgcaaagttctgtgctgtactcccgggggcgtggtgctgatactgccatcccactctcacatggctgagaccgcttctcctacgcccttgaacgaggtgtag

SEQ ID NO: 124030 - DNA, 561 bp, synthetic construct
  misc_feature 1..561: note = Description of Artificial Sequence: Synthetic coding sequence
  source 1..561: mol_type = other DNA
atgcatcagacctactctcggcattgtaggcccgaggagtcgaccttttcagcagctatgacaactatgcaagggatggagcaggctatgcctggggccggacctggggtcccccaattgggcaacatggctgtcatccacagccacttatggaagggtctgcaagagaaatttctgaaaggcgaacctaaagtgttgggagtggttcagattctgaccgccctgatgtcactctccatgggcattaccatgatgtgcatggcttcaaacacctatggctcaaatcccatatcagtgtacatcggctacaccatttggggctctgtcatgttcattatctctgggtctctttctatagccgccggcatccggacaacaaagggcctagggctggacgggatggttctgctcctgagcgtgctagaattttgcatcgccgtgagtctttcggcctttggctgcaaagtgctctgctgcacgcctggcggcgtcgtgctcatcctccctagccactctcatatggccgagacagccagtccaactccactgaatgaagtttag

SEQ ID NO: 124031 - DNA, 399 bp, synthetic construct
  misc_feature 1..399: note = Description of Artificial Sequence: Synthetic coding sequence
  source 1..399: mol_type = other DNA
atgaccaccatgcaggggatggagcaaacaacacctggggcagggcccgatgtaccccagctgggcaatatagacgtgattcactcctacttgtgcaaggggcttcaggaaaaattctttaaaagaaaaccaaaggtgctcggcgtggtgcgcattcttatcgctttgatgagcctttctatgggcattattatgatgtgcgtcgcgttctccagctatgaggagcatccgatctttgtgtacgtcgcctacacaatctgggggtcagtcatgtacccctaccagttgcagcaagagctggaacaacagaaagtgtggaattatctcaagaatctgtcctggaggattatgggctcctacctgtgttttggggagaggagtgaactcaaaccgctctag

SEQ ID NO: 124032 - DNA, 333 bp, synthetic construct
  misc_feature 1..333: note = Description of Artificial Sequence: Synthetic coding sequence
  source 1..333: mol_type = other DNA
atgactactatgcagggcatggaacagacaactcctggcgccggccccgacgtgccccaactgggtaacatcgatgttatccactcttatctgtgcaagggcctgcaagaaaagttctttaagagaaagcccaaggtccttggggtgttgtgtggccataagtttagtacccactccgtttcattaagcgttgctgctggaatcagaacgacgaagggactggaattgtcggaggaatttaaactggagaacaatgggatcatcttcgtgttctggagggagattagagtggagacgacgattcgaaggcaggttaggagattattaaagtag

SEQ ID NO: 124033 - DNA, 615 bp, synthetic construct
  misc_feature 1..615: note = Description of Artificial Sequence: Synthetic coding sequence
  source 1..615: mol_type = other DNA
atgtcttacattcacatctgcgtgaaagactgtaagaggtcatctagcagagggaaccctaaaagtttgggtttttgcgttgatatttcatttcagctgatccgagttgtccgcattctaatagcactgatgagcctgtccatggggattattatgatgtgtgtggcattcagcagctacgaagagcacccaatcttcgtgtacgtcgcttatacaatttggggctctgtaatgtacccctaccagctgcaacaggagctcgagcagcagaaggtgtgcatttacagagtgctcaacggtgcacaggcaggtgttcagtggagggatctgggcagcctacagcctcctcctccaagccggctgccatggccacctaaagtgcccagggttcaacctcttcccggtcgacatccagtgtgggaagttcgctccgtgtccgcctggccaccaatcgtctgggacgttcggagtcccagcgcatggctgccatctctggaatcagaggagaggctgtgtcccgctgctatacccagcaggaaatggggagcccccctcccgggacaccatccaatttgggaggtgaggtcagtgtcggcccggcccccaatcttctag

SEQ ID NO: 124034 - DNA, 399 bp, synthetic construct
  misc_feature 1..399: note = Description of Artificial Sequence: Synthetic coding sequence
  source 1..399: mol_type = other DNA
atgaccacaatgcaagggatggagcagaccacccctggagcaggtccagatgtgcctcagcttggcaatattgacgtgattcatagctacctctgcaagggcctgcaagagaagttcttcaaacgcaagcctaaagtccttggcgtggttcggattctcattgcgctgatgagtctgtccatgggtattatcatgatgtgcgttgcgttcagctcctacgaggagcaccctatttttgtgtatgtggcatacacaatctgggggagcgtaatgtacccctaccaattgcagcaagagctcgaacagcagaaagtatggaactaccttaaaaacctgagctggaggattatgggtagctacctgtgttttggggagcgatctgagctgaaaccactgtag

SEQ ID NO: 124035 - DNA, 603 bp, synthetic construct
  misc_feature 1..603: note = Description of Artificial Sequence: Synthetic coding sequence
  source 1..603: mol_type = other DNA
atggatagctctaccgctcacagcccagtgttccttgttttcccacctgaaataactgcttctgagtatgagagtacagaactctccgcaaccactttcagcacccagtcccccctgcagaagcttttcgcacgcaaaatgaagatccttggaaccattcagatcctatttggcatcatgactttctccttcggtgtgatcttccttttcacactgctgaagccttatcctcgcttcccgttcatattcctctctggctacccgttctggggctcagtcctatttatcaattctggggccttcctgattgccgtcaaacgaaaaacaaccgagacactgattattttatcgaggataatgaacttcctgtcggctctgggagccattgcaggtataatcctactcacctttggtttcatcctggaccagaattatatctgcgggtatagccatcagaactcacaatgcaaggctgtcaccgttctattcctgggcatcctcattacgctgatgacattctctattatcgaactctttatttctctccctttcagcattctcgggtgccacagcgaggattgtgactgtgaacaatgttgctag

SEQ ID NO: 124036 - DNA, 747 bp, synthetic construct
  misc_feature 1..747: note = Description of Artificial Sequence: Synthetic coding sequence
  source 1..747: mol_type = other DNA
atgacaagccagcccgtgcccaatgaaacgataatagtccttccatcgaatgtgatcaatttcagccaagctgaaaagccagaaccaaccaatcaggggcaagatagtctgaagaaacatctccatgcagaaatcaaagttattggcacaatacaaattctttgcggcatgatggtcctctccttgggcatcattcttgctagcgcatcattctcaccgaattttactcaggtgacatccaccctgcttaattcggcctatccatttatcggaccattttttttcataatatcaggatccctcagcatcgctaccgagaaacgtcttactaagctgttggtacacagctctctggttgggagcatcttgtctgctctgtctgcactggttgggtttatcatcctgtccgtgaagcaggcaactttgaatcccgcctccctgcagtgcgagctggataaaaataacattcctacgcggtcctacgtttcttatttctaccacgactcgttgtatactacggactgttatacagcaaaagcctctctagccgggactctgtccttgatgttaatatgtaccctattagaattctgcctcgccgtcttgacggccgtgttgcgttggaagcaggcctattccgacttccccgggtccgtgctgttcctgccacactcttacatagggaatagcggaatgtcgagtaaaatgacacacgactgcgggtacgaggagttgctcacttcttag

SEQ ID NO: 124037 - DNA, 537 bp, synthetic construct
  misc_feature 1..537: note = Description of Artificial Sequence: Synthetic coding sequence
  source 1..537: mol_type = other DNA
atgacatctcagcctgtcccgaacgaaactataatcgtcctaccttcaaatgtgatcaacttttctcaggctgaaaaacctgagccgactaatcaggggcaggactctttgaagaagcatttgcacgcggagattaaagtaattgggacaattcaaattctttgtggcatgatggtgttgtccctgggcatcatccttgctagtgccagttttagtcctaacttcactcaggtgactagcacactgctgaattctgcctaccccttcatagggccatttttcttcatcatcagcgggtctttgtcaatagccactgaaaaacgtctaactaagctcctggtgcatagcagcttggtgggttctattttgtccgccttgagtgctctggtgggctttattattttgtcggtgaagcaagcaacacttaatccagcttccttacagtggaactccctaagcgatgccgatctccattcggctggtatccttccctcctgtgcccattgttgcgctgcagtggagaccggtttattgtag

SEQ ID NO: 124038 - DNA, 543 bp, synthetic construct
  misc_feature 1..543: note = Description of Artificial Sequence: Synthetic coding sequence
  source 1..543: mol_type = other DNA
atgacttcccagccagttcccaatgagactattatagtcttgccgtctaatgtgattaatttttcacaggcggagaagccggagccgaccaatcaggggcaggatagtttgaagaagcacttacacgcagaaataaaggttatcggcttcattatttccgggagtctttctattgccaccgagaagagactgacaaaacttctagtccactcctctctcgtaggaagcatcctgtccgccttgtccgctttagtaggatttatcatcctgtcagtgaaacaggctacactgaatccagcatccctgcaatgcgaactggacaagaacaacattccaacccgctcttatgtgagctacttctaccacgactctctgtataccaccgactgttacacagccaaagcaagccttgctggaacactgtctctgatgctgatctgcaccctgctggagttctgcctagccgtcctgacggccgttttaaggtggaaacaggcctactccgactttcccggtgtgtccgtattagccgggttcacctag

SEQ ID NO: 124039 - DNA, 678 bp, synthetic construct
  misc_feature 1..678: note = Description of Artificial Sequence: Synthetic coding sequence
  source 1..678: mol_type = other DNA
atgacttcccagccagttccaaacgagacaattatagtgttgccatctaacgtgatcaattttagtcaggcggaaaagccagagcccaccaaccaggggcaagattctctgaagaaacacctgcacgccgaaattaaagtaattggaacaattcagatactttgcggaatgatggttctttctctaggtatcattcttgcctccgcatcattctcaccaaactttacccaggtgacatctacattgctcaactcagcttatccctttattggtcccttcttctttataatcagcggctcactgagcatcgcaaccgagaaaagactcactaagttgctggtgcacagtagcctggtgggctcgattctgagcgctttgtccgccctagtgggatttattatcctctccgtcaagcaggcgacactcaacccagccagtttgcagtgtgaactcgacaagaacaatattccaaccaggtcatatgtgagctacttctatcacgacagtctgtacaccacagattgttacacagccaaggcgagcttggctggcacgttgtctctcatgctcatttgcacattactggagttttgcctagccgtacttactgctgtcctcaggtggaagcaagcttacagcgatttccccggcgtgtccgttctcgccgggttcacttag

SEQ ID NO: 124040 - DNA, 831 bp, synthetic construct
  misc_feature 1..831: note = Description of Artificial Sequence: Synthetic coding sequence
  source 1..831: mol_type = other DNA
atggtgctcctcaagttgctcgaggtctaccggaagggaagcgccggcacattccacaagtccactatcttcggaaatacaattatgactagccagcccgtgcccaacgaaactattatcgtactgccatccaacgttataaactttagccaagccgaaaagcctgaacccacgaaccaggggcaggacagcctgaaaaagcaccttcacgctgagatcaaggtcatcggcaccattcagattttgtgcggcatgatggtcctttcattgggtatcatcctcgcttctgcttctttcagcccgaacttcactcaggttacttccaccctgctgaattctgcgtacccctttatcggtccattcttcttcatcatatcagggtcattgtcaatcgcaaccgaaaagaggctgaccaaattgttagttcattcttcacttgtcggtagtattttatcggcactctccgcattagtgggctttatcatcttgagcgttaagcaggcgacccttaatcctgcctcgctccagtgtgagctggacaagaacaacatcccaaccaggagttacgtaagctatttctaccacgacagcctgtacaccaccgattgttataccgccaaggctagtctcgcaggaaccctgtctttgatgctcatttgtaccttgcttgaattttgtctggctgtattgactgccgttctccggtggaaacaagcatatagcgatttcccaggcagtgtgttgttcctccctcattcctacatcggtaacagcgggatgtcctctaagatgacacatgattgtggatacgaggagttactgacctcatag

SEQ ID NO: 124041 - DNA, 747 bp, synthetic construct
  misc_feature 1..747: note = Description of Artificial Sequence: Synthetic coding sequence
  source 1..747: mol_type = other DNA
atgacttcccagcccgtccccaatgaaactataattgttctgcctagtaacgtgattaacttctcccaggccgaaaaaccagagcctacaaatcaggggcaagactctctgaaaaagcacttgcatgctgagatcaaggttatcggcacgattcagatcctctgcgggatgatggtcctctctctcggaataattctggccagtgcttcgttctctcctaattttacccaggtgactagcaccttgctgaattcggcctaccccttcattggcccctttttttttattatctccgggagcctgtcaattgctaccgaaaagaggcttacaaaactactggttcatagcagcttggttggctccatcctcagcgcgctgtcagcgctggtggggttcatcatcctctccgtgaaacaggcaacgttaaatcctgctagtctccagtgcgaactggataaaaacaacattcctacgagaagttatgtatcttacttctatcacgatagtctgtacactacagactgttacacagctaaggcctcactggccggaacactatccctgatgttaatttgtaccctgctagaattctgcctggccgtgctcacggcagtacttaggtggaagcaagcatactccgatttcccaggaagtgtgctgtttctgccccactcttatatcgggaacagcgggatgagctcaaaaatgacacacgactgcgggtacgaggaactgcttacaagctag

SEQ ID NO: 124042 - DNA, 72 bp, synthetic construct
  misc_feature 1..72: note = Description of Artificial Sequence: Synthetic coding sequence
  source 1..72: mol_type = other DNA
atgacctcacagccagtaccaaatgagacaatcattgtccttcccagcaacgtaatcaacttctcgcaatag

SEQ ID NO: 124043 - DNA, 444 bp, synthetic construct
  misc_feature 1..444: note = Description of Artificial Sequence: Synthetic coding sequence
  source 1..444: mol_type = other DNA
atgactagccagcccatctctaatgaaaccatcattatgttgccaagcaacgtgatcaatttctcacaggctgagaagccggagcctacgaaccaaggacaggattccctgaagaagcgccttcaagctaaggttaaggtgatcggcgtgcactccagcctagctggatcaatcttgtcagcactcagcgctctcgtcggcttcattctgctttccgtgaatccggccgccctgaatcctgcctctctgcagtgcaagcttgatgagaaagacatacccacaagactcctactgtcttatgactaccactcaccttacacaatggactgtcatcgcgccaaggctagcctcgcaggcaccctatctttgatgttggttagtactgtcctggagttttgtcttgctgtactgacagctgtcctccaatggaaacagacagtctag

SEQ ID NO: 124044 - DNA, 723 bp, synthetic construct
  misc_feature 1..723: note = Description of Artificial Sequence: Synthetic coding sequence
  source 1..723: mol_type = other DNA
atgctcttacagagccaaaccatgggagtttctcattccttcaccccgaaggggatcaccatcccccagagagagaaaccaggccacatgtaccagaacgaggactacctgcagaacgggctgccgactgaaacaacagttctggggactgtccaaattctttgctgtctgcttataagtagcctgggcgctattcttgttttcgctccctatcccagccatttcaaccccgccatttccaccacactcatgagtggctacccgtttcttggcgccctttgctttggaatcaccggctccctgtctataatctcaggcaagcagtccactaagccgttcgacctgagcagcttgacgtcaaacgccgtgtcatcggtaaccgccggtgctggcttatttctgctggctgattcgatggtggctcttagaactgcatctcaacactgcggtagcgaaatggattacctgtcatcgctgccatatagcgaatactattaccccatatacgaaatcaaagactgcctgttaactagtgtctcactgacaggcgtactcgttgtcatgttgatctttacagtgttagaattgctcctcgccgcatattcaagcgtgttctggtggaaacagctgtattccaataatcctggatcgtccttttcatcaactcaaagccaggatcatatccaacaggtcaaaaaatcatcctcacgatcttggatctag

SEQ ID NO: 124045 - DNA, 588 bp, synthetic construct
  misc_feature 1..588: note = Description of Artificial Sequence: Synthetic coding sequence
  source 1..588: mol_type = other DNA
atgctgttacaaagccaaaccatgggtgtctctcattcctttacccctaagggtattacaatcccacagagggagaaacccgggcatatgtatcagaatgaggattacttacaaaatggtctgccgaccgaaactaccgtcctgggctttgggattacaggaagtctgtctatcatctccggtaaacagagtaccaaacccttcgatctgtcttcccttacttcaaatgccgtgagcagtgtgaccgccggggctgggctgtttctgttggctgattctatggtggccctacgcactgcctcacagcactgcggatctgagatggactacctctcctcactcccttatagtgagtactattatccaatttacgagataaaagattgcttactgacttccgtcagcttgacgggggtgctcgtggtgatgttgatttttaccgtgctagagttgctcctcgctgcttattccagcgtgttttggtggaaacagttgtattctaataatcccgggtccagcttttctagcacacagagtcaagatcacattcagcaggtgaaaaagagtagtagtcgttcatggatctag

SEQ ID NO: 124046 - DNA, 510 bp, synthetic construct
  misc_feature 1..510: note = Description of Artificial Sequence: Synthetic coding sequence
  source 1..510: mol_type = other DNA
atgctcctgcagtcccagacaatgggcgtaagccacagtttcactcccaaaggcattactatcccccaacgtgagaagcctggtcacatgtaccagaatgaggattatttacagaatggcctcccaactgagacgactgtgcttgggttcggaataacaggtagtttgtctatcatttcaggtaagcagtctacgaagccattcgacctttccagcctgacatccaacgccgtgagcagcgtgactgccggcgctgggctgtttctgctcgctgactccatggtcgctctgaggacggccagccaacactgcgggtctgaaatggactatctttctagcttgccttactcagaatattattaccccatctacgagattaaggactgtttactcactagtgtatccctaacaggggtcctcgtagtgatgctgatcttcacagtcttagaactgctcttagctgcttactcctcagtgttctggtggaagcagctgtatagtaataattag

SEQ ID NO: 124047 - DNA, 588 bp, synthetic construct
  misc_feature 1..588: note = Description of Artificial Sequence: Synthetic coding sequence
  source 1..588: mol_type = other DNA
atgctgctccagtcccagacgatgggcgtatctcattctttcacccccaaaggcattacaatcccccagagggagaaacccggccatatgtaccagaatgaagactaccttcagaatggcctcccaacagaaacaactgtgctcggttttggaatcaccgggtcgctgagcataatttctgggaaacaatcaacaaaacccttcgatctgtcatccttaacatccaacgcagtgtcttcagtcacagccggtgctggcttatttcttctggctgatagcatggtcgcattacggacggcctcacagcactgcggctctgagatggattacctgtctagtctaccttactcagagtactattaccctatctacgagatcaaagactgcctcctgacctcagtgtcactgaccggggtgctggttgtgatgctgattttcaccgttttggagctgctgctggctgcatacagttccgtattttggtggaagcaactgtactctaataatccgggatcttccttcagctctacccaaagtcaggatcacatccagcaggtcaagaagtccagtagcagatcgtggatttag

SEQ ID NO: 124048 - DNA, 753 bp, synthetic construct
  misc_feature 1..753: note = Description of Artificial Sequence: Synthetic coding sequence
  source 1..753: mol_type = other DNA
atgaactctatgaccagtgccgtccctgtggcaaacagcgtgctagtggttgcaccacataatggctatcctgtaaccccagggatcatgtcacatgtgcccctgtaccccaactctcaaccgcaagtccacctggtgcccggcaatcctccctccttggtcagtaacgtgaacggccagccggtgcagaaggcactgaaggagggaaaaacactcggcgccatccagattataattgggctggctcatattggattgggatctatcatggctaccgtcctagtcggcgaatatctgagtatatcattctatggtggcttcccattttggggcggcctgtggtttataatttccggctccctctccgttgccgccgagaaccagccatacagttattgcctcctctcgggatctttaggcctgaacatcgtttccgcgatctgttctgcagtgggcgttattctgttcatcacggacctttctattccccacccctacgcctaccctgattattacccttacgcctggggagtcaatcctggaatggccataagcggagtgctcctagtgttttgtcttttagagttcggaatcgcttgtgcaagcagccatttcggatgccaactggtgtgttgccagtcctcaaatgtttctgttatatacccaaatatctacgccgccaatccagtgatcacacccgagcccgtgacttctcctccatcatactcctcagagatacaagccaataagtag

SEQ ID NO: 124049 - DNA, 2550 bp, synthetic construct
  misc_feature 1..2550: note = Description of Artificial Sequence: Synthetic coding sequence
  source 1..2550: mol_type = other DNA
atggttcagaaggaatctcaggccacgctggaggagagagaaagcgagcttagttctaaccccgctgcatccgccggggcttctcttgagccgcctgccgcccctgctcctggagaggacaaccccgcgggggcaggtggagccgccgtcgccggtgcggctggcggcgcccgccggttcctgtgcggcgtggtagagggattttatggcagaccttgggtgatggagcaacgaaaggagctgtttcggagactgcaaaaatgggagctgaatacctacctgtacgccccgaaagacgactataagcatcgcatgttttggcgagagatgtattctgtcgaggaggccgagcagctgatgaccctaatcagcgcagcaagggagtacgagatcgagtttatctatgccattagtccagggctagacattacgttctcaaacccaaaggaagtgagcaccttaaagagaaagctagatcaagttagtcagtttgggtgtcgatcatttgctcttcttttcgacgacattgatcacaacatgtgtgccgccgataaagaggtgttcagctccttcgctcacgctcaggttagcattacaaacgagatctaccaatacctgggcgagcctgagacttttctattttgtccaacagaatactgtggcactttttgttacccaaacgtttcccaaagtccctacctgaggactgtgggagaaaaactgcttcccggcattgaggttctgtggacaggacctaaggtggtctctaaggagatcccagtggaatcaattgaagaagtcagcaaaattatcaaaagagccccagtgatctgggacaatatccacgccaacgactacgaccagaagcgcctgtttctaggaccctataaaggcaggagcaccgagctaattcctcggttaaaaggtgtacttaccaatccaaactgcgagtttgaggccaactacgtcgctatccacacccttgcaacttggtacaagtcaaacatgaacggggtcaggaaagacgtggtgatgagcaggcaggtggcccacagcggggcgaaagcctcggttgttgatggcacccccttggtcgctgcgccctctctgaatgctaccactgttgttacgacagtgtaccaagagcctatcatgagccagggcgccgcattaagtggcgagccgaccacccttaccaaagaagaagagaagaagcagcctgatgaggagcctatggacatggtggtggagaagcaagaggagacagaccacaagaatgataatcagattctatccgaaattgttgaggccaaaatggctgaagaactcaagccaatggacactgacaaggagagcatagccgagagtaagtcccctgaaatgtcaatgcaagaagactgtatctccgacatcgcacctatgcagaccgacgagcagactaataaggaacaatttgtacccggaccaaacgagaagcccctttacaccgcggagccagtgacactagaggatctccagctgctggccgatctgttctacctgccctacgaacacggccctaaaggagcccagatgcttcgggaatttcagtggttacgagccaatagctcagtcgtttccgtgaattgcaagggaaaagactccgagaagatcgaggagtggcgttccagggctgcgaaattcgaagagatgtgtggactggttatgggaatgtttacccgtctttccaattgtgccaaccgaactattctctacgatatgtacagttacgtgtgggatattaagtccattatgtcaatggtgaagtctttcgttcagtggcttgggtgtagaagtcattcgtccgcgcagtttttgattggcgaccaggagccgtgggcatttcgcggtggactggccggtgagtttcaacctccgcccctgactcctaccagtaaggtttatacaatccggccttacttccccaaagatgaggccagtgtttacaagatctgtcgagagatgtatgacgatggggtcgggctgccattccagagtcagcctgatttgatcggcgacaaactggtcgggggcctgctgtccctgtcccttgactattgctttgtgctggaagacgaagacgggatatgcgggtatgcactcggcacggtagacgtgacacctttcataaaaaaatgcaagatttcttggatccccttcatgcaggagaagtacacgaagcctaatggcgacaaggagctttctgaggctgagaagattatgctgtcattccatgaggagcaggaagtcctgccagagacttttctggccaattttcccagcctgatcaagatggatatacacaaaaaagtgacagatccctccgttgcgaaatccatgatggcatgtctcttgagcagcctaaaagctaacggtagccgcggggcattttgtgaagtgcggccagacgataagcggatcttggagttctacagcaagttgggctgttttgaaatcgctaagatggaaggttttcccaaggatgtggtcatcctgggacggagcctctag

SEQ ID NO: 124050 - DNA, 2751 bp, synthetic construct
  misc_feature 1..2751: note = Description of Artificial Sequence: Synthetic coding sequence
  source 1..2751: mol_type = other DNA
atggtccagaaagagtcccaggctaccctggaagaacgggagagcgagttgtccagtaacccagctgcctcagccggggcctcactggagccacctgctgctccggcaccaggagaagataaccccgcaggcgccggcggggcagccgtcgctggcgcagccgggggcgcacggcgctttctttgtggcgtagtcgaggggttttacggtcggccctgggtcatggagcagcgcaaagaactgtttcgaagattacaaaaatgggagctgaacacctacttgtatgcaccaaaggacgattacaagcatcggatgttttggagagaaatgtatagcgtggaggaagccgagcagctcatgacgctcattagcgcagccagagagtatgagatcgaattcatttatgccatcagtcccggtctcgatattacatttagtaacccaaaggaggtctcaacactgaaaaggaaattggaccaggtgtctcaattcggctgtcgctcctttgccctcctttttgatgatattgaccataacatgtgtgccgcagataaggaagtgtttagttccttcgctcatgcccaggtttccattaccaatgaaatctatcagtacttaggggagccagaaacattcctgttctgcccaaccgagtactgcggtactttctgctacccaaacgtgagtcagtcgccgtacctgagaacagtgggcgaaaagcttctgcccggaattgaggtgttatggacagggcctaaggtggtttcaaaggagattccggtcgaaagcattgaagaggtgtcaaagatcatcaaacgtgcccccgtcatctgggacaacatacacgcaaacgactatgaccagaagagactcttcttgggaccatacaagggcagatcaaccgagctgatcccgcgcttgaagggcgtactgactaatccaaattgcgaatttgaggccaattacgtcgccatccatacccttgccacttggtacaagtccaatatgaacggcgtgcgcaaagatgtggtgatgacggattctgaggattcaacagtgtcaattcagattaaactggagaatgaaggaagtgacgaggatatcgaaactgatgttctgtattcgccccagatggccctgaaactcgcgcttaccgaatggttgcaagagtttggcgtgccgcaccagtattctagtcggcaagttgcacatagcggggcaaaggcatccgtcgtggatggtacgcccctggtggccgcgcccagtctgaacgccacaaccgtcgtgactaccgtctatcaggaacccataatgagccaaggggccgccctgtccggcgagcccaccactctgaccaaagaggaagagaagaaacagccggacgaagaacccatggacatggtagttgaaaagcaagaggaaacagatcacaagaacgataatcagatcctgagcgaaatcgtggaagccaagatggctgaggaactgaagccaatggataccgataaggaatcaattgcagagtccaagagcccagaaatgagcatgcaggaagattgtataagcgatatagcacccatgcagacagacgagcagacaaataaggaacagttcgttcctgggcctaatgagaagccactgtacactgccgaacccgtgacccttgaagaccttcagctgctcgctgatctgttttacctgccctacgagcatggtcctaagggcgcacaaatgttacgagaatttcagtggctgcgggctaactccagtgtggtgtccgtcaactgcaagggcaaggactcagagaaaatcgaagaatggcggtcccgggctgccaagtttgaagagatgtgtggcctggtgatgggcatgttcactagactctctaactgcgccaatcggacgatattgtatgacatgtactcttacgtatgggatatcaaatcaattatgtctatggtgaaatctttcgtccagtggctggggtgcaggtctcatagctcagcccaattcttaatcggggatcaagaaccttgggcgttccgcggtggcctggctggggagttccagcggctgctgcccatagatggggctaacgatctctttttccagcccccacctctcacccctactagcaaagtgtataccattaggccgtactttcccaaggacgaagcctcagtctacaaaatttgtagggagatgtacgacgatggagtaggactacctttccaaagtcagcccgacctcataggggataaactggtcggtgggctactttccctgtccctcgactactgcttcgtgctggaggatgaggatggcatatgtggctacgccctcggcactgtcgacgtcacgccatttatcaaaaaatgtaagattagttggattccgttcatgcaggagaagtacacaaagcccaacggtgataaggagctcagcgaggccgagaagattatgttgtcctttcacgaggaacaggaggtcctccccgagacgttccttgctaatttcccgtctctgattaagatggacatccataaaaaggtgaccgaccctagcgtggccaaaagtatgatggcatgtcttctttcttctcttaaggctaatggatcacggggagctttctgcgaggtgcggcctgatgacaagcgtatcctggaattttactccaagttaggatgtttcgaaatcgctaagatggagggctttccaaaagatgtcgtcattctggggagaagcttgtag

SEQ ID NO: 124051 - DNA, 2034 bp, synthetic construct
  misc_feature 1..2034: note = Description of Artificial Sequence: Synthetic coding sequence
  source 1..2034: mol_type = other DNA
atggtgcaaaaggagtcacaggctaccctcgaggagagggagtcagagctgtcttcaaacccggccgcctcagctggcgccagccttgaacctcctgcggcccccgctcctggcgaagataatcctgccggcgccggcggggctgccgtggcgggtgcggccgggggcgcaaggagattcctgtgcggggtcgtggaaggcttctacggcagaccatgggttatggaacagaggaaagaactgtttagacgcttacaaaagtgggaactgaatacttacctgtatgcccctaaagacgactataaacataggatgttctggagagaaatgtattcagtcgaagaggcggagcagctgatgactctgatcagtgcagcgcgagagtacgagatcgagttcatttatgctataagccctgggctcgacataacctttagcaaccctaaagaagtttccacactcaaacgcaaattggaccaggtctctcaattcggctgtagatcctttgctttgctcttcgatgatatcgatcataacatgtgtgccgcagacaaagaggtgttttcaagcttcgcccacgcacaggtgtcaattacaaacgagatctaccagtacctgggagagcccgaaacattcttattctgccctacagagtattgtggtacattctgctaccccaacgtctctcagtccccttatctgcgaaccgttggtgagaagctgcttcctgggattgaggtgctctggaccggccctaaggtggtgagcaaagaaattccagtcgaatcaattgaggaagtgtctaagatcattaaaagggccccagtcatttgggataatatacacgccaatgactacgatcagaaacgactgttccttggtccctacaaaggcaggtccactgagctgatacctcgattgaagggagtcctgaccaatccaaattgtgaatttgaagccaactatgttgcaattcacactctggcgacatggtacaaaagcaacatgaacggcgtgaggaaggacgtcgtaatgacggattcagaggattctacggtctctatacagatcaaactcgagaatgagggaagcgacgaagatattgagacggacgtgctgtactctccgcagatggccttaaaactggcactgacagaatggttgcaggaatttggggtgccccatcagtactcatcacggcaggtggcacacagtggcgctaaggcctcggtcgtcgacgggacaccactagtggccgccccaagcctgaatgccactaccgtggttaccactgtttaccaggaacctatcatgagccagggggcagccctgagcggtgagcctacaactcttactaaggaggaagaaaaaaagcaaccagacgaggagccgatggacatggttgtggagaagcaggaggaaacagatcacaaaaatgacaaccagatactgagcgaaatagtggaggccaagatggcggaagagctgaagccaatggatactgataaggagtccatcgctgagagcaaatcgccagagatgtccatgcaggaagattgcatatcagacatcgccccgatgcagactgacgaacaaactaacaaagaacagttcgtgccagggccaaacgagaagccgttgtatactgctgagccagtaacattagaggatctccagctgctcgccgaccttttttacctgccatacgagcacgggcctaagggcgcccagatgttgcgcgaattccagtggctgagggcaaactctagtgttgtgtctgtaaactgtaaggggaaagacagcgaaaagattgaggaatggcggagtcgggcagccaaattcgaagagatgtgtgggcttgtaatgggcatgtttacccggttgtccaactgcgctaacaggaccattctatacgatatgtactcttatgtgtgggacataaagtccattatgtccatggtgaagagcttcgttcagtggctggggaggtgtaccaggaataatcttttttcaagtaatatcttatctctgtag

SEQ ID NO: 124052 - DNA, 456 bp, synthetic construct
  misc_feature 1..456: note = Description of Artificial Sequence: Synthetic coding sequence
  source 1..456: mol_type = other DNA
atggtgcagaaggagtcccaggcgactctcgaagagcgggaatccgagctgagcagtaatcccgcagcctctgcaggagcatctctcgaaccccctgccgcacctgcacccggcgaggataaccccgccggcgccggtggcgccgctgtggccggcgcagctggtggtgcacggcgctttctctgtggcgtcgtggaagggttttatgggcgcccatgggtgatggaacaacggaaagagctgttccgtaggctacagaaatgggaactgaacacatacctctatgctcccaaagacgattacaaacatcgaatgttctggcgagaaatgtactcagtagaagaggccggatcattcttgtttttctacctggtgaccatccagctggctgagattgaacgcgttttatgtgcctcgaaggtgatgacaatttgtgtgatcagctgggcatgctag

SEQ ID NO: 124053 - DNA, 771 bp, synthetic construct
  misc_feature 1..771: note = Description of Artificial Sequence: Synthetic coding sequence
  source 1..771: mol_type = other DNA
gccgccggcggcgctaggcggttcctgtgtggagtggtggagggcttctatgggcgcccttgggtaatggagcagcgaaaggagctcttccggcgcttgcagaagtgggagttaaacacatacctctacgcacccaaagatgactataagcaccggatgttctggcgtgagatgtattcggtggaagaggccgagcagctcatgaccttgatttctgctgcccgtgaatacgagattgagttcatctatgctataagccccggattagatatcactttctcaaacccaaaagaggtgtccactctaaagcgcaaactggatcaagtctctcagttcgggtgccggtctttcgcgctgctgttcgacgacatcgatcataacatgtgcgcagcagataaagaagtgttttccagctttgcacacgctcaggtaagtattactaatgaaatttatcagtacttgggggaacccgaaacgtttctgttctgtccaactggaccgaaagtggtgtcaaaggagatccccgtcgagagcatcgaggaggtttcaaagatcatcaagcgggcacctgttatctgggataacatccacgccaacgattacgaccagaaaaggctctttcttggcccttacaagggacgctccaccgagctcatacctcggctgaagggagtgcttaccaaccccaactgcgagttcgaggctaactacgttgctatccatacactggcgacatggtacaaaagcaacatgaacggggtcagaaagtag

SEQ ID NO: 124054 - DNA, 2592 bp, synthetic construct
  misc_feature 1..2592: note = Description of Artificial Sequence: Synthetic coding sequence
  source 1..2592: mol_type = other DNA
atggttcagaaggagtcccaggcgacactggaagagcgggagagtgagctgagctctaaccctgcggccagcgcgggcgcctcattggaacctcctgctgcccccgcgcctggggaagacaaccccgctggggcaggtggagctgcagttgcaggagccgccgggggagctcgccgttttctctgcggcgtagtagagggcttttacggcagaccttgggtgatggaacagcggaaagaactatttcgtagactccagaagtgggaattaaatacttatctctacgctccaaaagatgattataaacatcgcatgttttggcgcgagatgtactctgtcgaggaagctgagcagctgatgacattgatctccgccgcaagggaatatgaaatcgagttcatttacgccataagcccggggctcgacatcaccttttcaaaccccaaggaggtcagtacgctgaagaggaagctcgatcaggtgagccagttcggttgccgtagtttcgcgctcctcttcgatgatatagatcataacatgtgcgcagctgataaagaagtgttctcttccttcgcacatgcacaggtgagcatcactaatgaaatataccagtaccttggggagccggaaacattcctcttttgtcctaccgaatattgcgggactttctgttaccccaatgtgtcacaatcgccatatctccggactgtcggtgagaaattacttcccggcattgaggttctctggacgggtccaaaggtggtatccaaggaaatcccagtggagagcatcgaggaggtgtcaaagattatcaagcgggcacccgtaatctgggataacatccacgcaaacgactatgaccaaaagcgcctgttcctgggcccatacaaaggacgctctacagaattgataccccggctgaaaggagtgcttaccaaccctaattgtgaattcgaagccaattatgttgccatacacacattggctacctggtataaatccaatatgaatggagttcgaaaagatgtcgtcatgtctagacaggtggcccattctggagccaaggcttccgtggtggatgggacccctctggttgccgcaccatccctaaacgcaacaactgtggtgacaacagtctaccaggagccgatcatgtctcagggcgctgcattgtccggcgaacccacgactctgacgaaagaagaggagaagaaacagcccgatgaagagcctatggatatggtagttgaaaaacaggaagaaacggatcacaagaacgacaaccagatcttgtccgagatcgtcgaagctaagatggccgaagagctcaaacccatggacacagacaaggagagcattgccgagagtaagtccccagagatgtccatgcaagaggattgcatctcagatattgcgcccatgcagaccgacgagcagaccaataaggagcagtttgtgccgggaccaaatgaaaagcccctgtataccgcggagccagtcactctcgaggacttacaactgcttgcggatctgttctacctgccatatgaacatggacctaaaggagcccagatgctgcgggagttccagtggctaagggccaactcctctgtggtcagcgtgaattgcaaggggaaagactcagaaaagattgaggaatggcgttcacgcgctgcaaagtttgaggaaatgtgtggcctggttatgggtatgttcactagactgtctaactgcgccaatcgcaccatcctttacgatatgtattcttacgtgtgggatattaaaagcattatgagtatggtgaaatcattcgtacaatggctgggatgcaggagccactcaagcgcccagttcctgattggagatcaggagccatgggcctttagaggagggctcgccggcgaatttcagaggttacttcctatcgatggggcaaatgatctgtttttccagcctccacctctgacgcctacatccaaggtttacacaattcgcccttatttccctaaggacgaagcgtcggtctacaagatctgccgcgagatgtatgatgatggtgttggcctacccttccagtcccagcccgatttgattggggataagctggtggggggcttgctctcactatcacttgattattgtttcgtgctcgaggacgaggacgggatctgtgggtatgccttaggaactgttgacgttacccccttcataaagaaatgcaagataagctggataccttttatgcaggagaagtataccaagcccaatggtgacaaggagctgtctgaagctgagaagatcatgttgtccttccacgaggagcaagaagtgctgccagaaacctttctggccaattttccatcgctgataaaaatggacattcacaagaaagtaaccgatccatctgtggccaagtctatgatggcatgcctgctgtcttccttaaaagctaatgggtcacgcggcgcattttgcgaagttcgaccggacgacaaacgcatcctcgagttctattctaaactggggtgcttcgaaatagcaaagatggaaggtttccctaaggacgtcgtgatcctggggagatctctttag

SEQ ID NO: 124055 - DNA, 1545 bp, synthetic construct
  misc_feature 1..1545: note = Description of Artificial Sequence: Synthetic coding sequence
  source 1..1545: mol_type = other DNA
atggctgtttggctagctcaatggctcggtccactgttgttagtgagcttgtggggtttgctggcgcccgcctctctgctgagaaggttgggcgagcacatccagcagttccaggaatcgagtgcgcagggcctcggtctgagtttggggcccggtgcggcagcactccctaaggttgggtggctggagcagctcctggaccccttcaacgtttccgaccgacgctcatttcttcaaagatactgggtcaatgatcaacattgggtagggcaggacggtcccatttttctgcacctaggaggagagggatctctcgggccgggttctgttatgaggggccaccctgccgccctggctccggcttggggcgcattagtgatctcgctggagcaccgattctacggactgtcaatacccgccggcggcctggagatggcccagctgcgttttctcagcagccggctggctctagctgacgttgtctctgcacgcctcgccctgagccgcttatttaacattagttccagtagcccatggatctgttttggcggatcatatgcaggctccctagccgcctgggcacgcctgaaattcccccacctaatttttgctagtgtagcaagttccgctcccgtcagggccgtgttagacttttccgagtacaacgacgtggtttcccgctctctgatgtccactgctataggcggatctctagagtgcagagcagctgtctcagttgcattcgccgaggtagaacgccgactgagatcaggtggagcagctcaagccgctctgcgtacagaactatccgcgtgtggccctctaggacgtgcagagaaccaggctgaacttttgggggcattacaagccctggtgggcggagtcgtgcaatacgatggacagaccggggcacccctctctgttaggcagctatgtgggcttctgttaggcggcggcggtaacagatctcacagcactccttactgtggcttgaggcgcgctgtgcagatcgtgctccattctcttggccaaaagtgtctctccttctcacgggcagagaccgtagcccagttacggagcaccgagccgcagctgagcggcgtcggcgatcgccagtggctgtaccagacatgcactgaattcggattttacgttacttgtgagaatcctcggtgccccttttcccagctgcccgcgctgcctagtcagctcgatctgtgtgaacaggtatttggactatccgccttatccgtcgcccaggctgttgctcagaccaactcttactacggaggccaaacgccaggggccaacaaggtgctgttcgtaaatggggatacagacccgtggcacgtgctgagcgtcacccaggccctgggcagctccgagagcacacttctaataaggactggaagccactgtttggacatggcccctgagagaccttctgattccccatcacttcgactaggccgccaaaatatctttcagcagcttcagacatggctcaagctggccaaagaaagccagattaaaggcgaggtgtag

SEQ ID NO: 124056 - DNA, 2106 bp, synthetic construct
  misc_feature 1..2106: note = Description of Artificial Sequence: Synthetic coding sequence
  source 1..2106: mol_type = other DNA
atggacctatggaacttaagctggttccttttccttgacgctctgctcgtgatctccggcctggctactccagagaacttcgatgtggatggaggcatggaccaggacatatttgatatcaatgaggggctggggcttgacctgtttgaaggggacatccggctggatagggcgcagattcgcaatagcatcatcggcgaaaagtataggtggccccacaccatcccgtatgtgctggaggacagtctggagatgaacgccaaaggggtgattctgaacgcatttgagagataccgcctgaaaacgtgtatcgacttcaaaccttgggctggggagaccaattacattagcgtgttcaaaggttctggctgctggagctccgtgggcaatcgccgcgtagggaaacaggagctcagcattggcgccaattgcgaccggatcgcaactgtgcagcatgaatttcttcacgccctgggcttttggcatgaacagtcccgctcagaccgtgacgactatgttagaattatgtgggaccggatccttagcggtcgcgaacacaatttcaatacttattccgatgatattagtgattccttgaatgttccctatgattacacctcagtcatgcactattcaaagacagccttccagaacggaacagagcctaccatcgtgactcgaatatcggatttcgaggatgttatcggtcagagaatggatttctcggacagcgatctccttaaactgaaccagttgtacaattgcagctcttccttgagctttatggattcgtgttcattcgagttagagaacgtctgtggaatgattcaatctagcggtgacaacgccgactggcaaagggtctctcaggtcccgagaggccccgaaagtgatcacagtaacatgggccagtgccagggctctgggttctttatgcatttcgacagctctagcgtgaacgtgggcgccaccgctgtcctggagagtagaaccttatatcccaagcgaggttttcagtgcctacagttttacctttacaatagtggcagtgaaagcgatcagctcaacatctatatacgagagtattcagcggacaacgtggatgggaacctgacactagtagaagagattaaggaaatccctaccggctcgtggcagctctaccacgtgacccttaaggtcacgaaaaagttccgggttgtgtttgaggggcggaaaggtagcggggcttctcttggtggactctctatagatgatattaacctgtccgagacgagatgtccccatcacatctggcatattaggaacttcacacagttcattggatcaccaaatgggacactgtacagccctcccttctatagcagtaagggctacgccttccagatttatctgaacctggcgcatgttaccaatgccgggatctattttcatctgatctccggtgcaaacgacgaccaactgcaatggccctgtccttggcagcaagccactatgaccctgttggatcagaacccggatatacggcagcggatgtccaatcagagatcaatcactactgacccgttcatgactactgacaatggaaattatttttgggacagaccttcaaaagtaggcacagtggcattgttttcaaacggcactcaattcaggcggggcggaggatatgggaccagcgcattcataacacacgagaggctgaaatcccgggactttatcaaaggtgatgatgtgtatattctgctgactgtggaggatattagtcacctcaactccactcagattcaacttactcccgccccgtcggttcaagatctgtgtagcaagacaacatgtaagaatgatggggtgtgcaccgtgcgagatggaaaggccgagtgccgctgtcagagcggggaagactggtggtacatgggtgagcgatgtgagaagaggggaagcacacgtgacactattgtgatcgccgtctccagtactgtcgcggtgttcgctttgatgctgataatcactttggtgtccgtgtattgcacccgtaagaaatacagggagagaatgagcagtaatcggccaaacctgacaccacagaatcagcatgctttctag

SEQ ID NO: 124057 - DNA, 894 bp, synthetic construct
  misc_feature 1..894: note = Description of Artificial Sequence: Synthetic coding sequence
  source 1..894: mol_type = other DNA
atggcgtcaccccagctttgcagagccctcgtttctgcacagtgggttgcagaagctctgagggccccacgggctggccagccactgcagctattggacgcatcatggtacctacctaagctgggcagagacgcccggcgggaattcgaggaacgccatatccctggagccgcattcttcgatattgaccagtgttcagaccggaccagtccctacgatcatatgctgcccggtgcggaacacttcgctgaatatgccggccgacttggtgtgggggccgcaactcacgtggtaatctacgatgccagtgaccaaggattgtactctgccccacgtgtctggtggatgttccgtgcattcggtcatcatgctgtgtccctactagacggtggtcttaggcactggctgcgtcagaacctgcctctctcttctggaaaatctcagcccgcgccagctgagttccgagcgcaactggacccagctttcatcaagacctacgaggatattaaggagaacctggaatccagacgttttcaggttgttgacagcagggctactggaaggtttcggggaacggagcctgagcctcgcgacggtatcgaacccgggcatatacctggtaccgtcaatattcccttcactgacttcctgtcacaggagggcctcgagaaatcacctgaggagataagacacctgttccaggagaaaaaggtcgacctgtctaaacccctggtcgcaacctgtggttccggggttacggcatgccatgttgctctcggggcctatctgtgcgggaagcccgacgttcctatttatgatgggagctgggtcgaatggtatatgagagcccgtccagaggacgtgattagtgagggcaggggcaagacccactag

SEQ ID NO: 124058 - DNA, 954 bp, synthetic construct
  misc_feature 1..954: note = Description of Artificial Sequence: Synthetic coding sequence
  source 1..954: mol_type = other DNA
atggcagagcccggatctcgcgaatcagaaaccagagctagatctccatccgtagctgcgatggccagcccacaattgtgccgcgctctggttagcgcccaatgggttgccgaggctctccgggcgcccagagccggccagcccctgcagctgctcgacgctagttggtacttgccaaaattggggagggacgcacgtcgagagttcgaagaaaggcacatacctggtgccgcctttttcgacattgaccagtgcagtgatcgaacctctccctatgaccatatgctacccggggctgagcactttgccgagtatgctggccgtcttggagtgggagctgcaacccatgtggtcatttacgatgcaagcgatcaaggtctgtactcagcaccccgcgtgtggtggatgttcagggccttcggacaccatgcagttagtctcctcgacggcggtctgcgccactggctaagacagaacttgccattatctagtgggaaaagtcagccagcccccgcagaatttagggcccaacttgatcctgccttcatcaaaacctatgaagacatcaaagagaaccttgaatccagacgcttccaagtcgtcgatagcagagctacgggccggtttaggggcactgagccggagccaagggatggcattgagccaggccacatacctggaacggttaacatacctttcaccgattttctgtcacaggaaggcttggagaaatcacctgaagagatccgccatctattccaggaaaagaaagtggatctttccaagcctttagtcgcgacctgtggatccggcgttacagcatgccatgttgccttaggggcctacctctgcggtaagccagacgtgcccatctatgacgggtcatgggtggaatggtacatgagagcaaggcctgaagatgttatttcagagggtcgcggcaagacccactag

SEQ ID NO: 124059 - DNA, 894 bp, synthetic construct
  misc_feature 1..894: note = Description of Artificial Sequence: Synthetic coding sequence
  source 1..894: mol_type = other DNA
atggcctcaccccagttgtgtcgggccttggtgagcgcccagtgggttgccgaagcgttgcgcgctcctcgggcaggccaacctttacaattgctggatgcatcctggtatctgccaaaacttggccgggacgcacgcagggagtttgaggaacggcacattccaggagccgcatttttcgatatcgatcagtgtagtgaccgcacgtccccgtatgaccacatgctccccggagccgagcatttcgccgaatacgccggacgcctcggggtgggtgcagctacacatgttgtcatctatgatgcatctgatcagggcttatatagtgctcctcgggtgtggtggatgtttagagctttcggacatcacgcagtctccctgctggatggcggactaaggcactggcttcggcaaaacctccccctgtcttctggcaaatcacaacccgcacccgcggaattccgggcccagttggaccccgcctttatcaagacgtacgaggatatcaaagaaaacctcgaatcacgtcgatttcaggttgtcgacagccgtgccacggggcgcttccgagggacggagcctgaaccccgggacggcatagagcctggccacattcctggtaccgtaaatatcccattcacggattttctgtcccaggaaggcctggaaaagtctcctgaagagatacgacacctgtttcaggaaaagaaagtagacctgagtaagcccttagtcgcaacgtgcggctccggggtgactgcttgccacgtagccctgggggcctacctgtgcggaaaaccagacgtacccatctatgacggttcctgggtggagtggtacatgcgagcccgacccgaagatgtgatctcggaggggcgagggaaaacccactag

SEQ ID NO: 124060 - DNA, 894 bp, synthetic construct
  misc_feature 1..894: note = Description of Artificial Sequence: Synthetic coding sequence
  source 1..894: mol_type = other DNA
atggcatcaccccagctctgccgagccctggtgtccgctcagtgggttgctgaggcactccgcgccccacgggctggacagccgttacagctactggacgcatcttggtatttgcccaagctaggcagagacgcccgaagggagtttgaggagcgacacatccctggcgctgccttctttgacattgaccagtgcagtgatcgcacctcaccttacgatcatatgctgcctggcgccgagcactttgccgagtatgcaggtagactgggggttggtgcagccacccacgtggtgatatacgacgcatctgaccagggcctgtattctgcccccagggtgtggtggatgttccgagctttcggtcaccacgctgtgtctttgctggacggcgggctgcggcactggctaagacagaatttacctttgagctccggcaaatcgcaacccgctccagccgagttccgggctcagctcgacccggcattcattaagacctacgaggacataaaagagaacctagagtctcgccgattccaggtggtggattcacgggcaacaggccgctttaggggcaccgagccagagcctcgggatggcatcgagcctggccatatccccggcactgtcaacatccccttcaccgattttctgtcccaggaggggctggagaaaagccccgaggaaatcaggcatctcttccaggagaagaaggttgacctcagcaagccactcgtagcaacctgtggatcaggagtgaccgcatgtcacgtcgcactgggtgcatacctgtgtggtaaaccagacgttcccatttacgacgggtcttgggtggagtggtacatgagggcccgtccagaggatgtgatcagcgagggcaggggtaaaacacattag

SEQ ID NO: 124061 - DNA, 894 bp, synthetic construct
  misc_feature 1..894: note = Description of Artificial Sequence: Synthetic coding sequence
  source 1..894: mol_type = other DNA
atggcttctccacagctgtgtagggctttggtgtccgctcagtgggtggctgaagctctgagagcaccccgggccgggcagcccctgcagctgctcgatgccagttggtacctccccaagctggggagggacgcaagacgagaatttgaagagaggcacatcccaggagccgccttcttcgacatcgaccagtgctcagatagaacgagcccatacgatcatatgctgcccggcgccgaacatttcgccgagtacgctggccgccttggcgttggagccgccacacatgtggtcatctatgatgcttcagaccagggcctctatagtgccccgcgcgtgtggtggatgtttcgcgctttcgggcaccacgctgtgtcactgttggacggcggcctcagacactggctgagacagaatctcccattatcttcaggaaagagccagcccgcacctgcggagttcagagctcaactggatcctgcattcatcaagacctatgaggatattaaagaaaacctggaatctagaaggttccaggtggtagactcgcgggctaccggcaggttccgcggcacggaaccagagccaagggacggaatcgagcctgggcacattcctggcaccgtgaatattccattcacggatttcctttcgcaggaggggctggaaaaaagccctgaggaaattcgccatctattccaggaaaagaaagtggatctgagcaaacctcttgtcgccacttgcgggtcaggcgtcaccgcctgtcacgttgcacttggagcttacctgtgcggcaagcccgacgtcccaatatatgacggcagctgggtggagtggtacatgcgagcccgtccagaggacgtgatttcagagggccggggcaaaacacattag

SEQ ID NO: 124062 - DNA, 894 bp, synthetic construct
  misc_feature 1..894: note = Description of Artificial Sequence: Synthetic coding sequence
  source 1..894: mol_type = other DNA
atggcgagcccccagctctgcagggctctggtgagcgctcagtgggttgccgaggctcttagagcccctcgagccggccaacccctccaattgttagacgccagctggtatctacccaagttgggaagggatgctcgaagagaattcgaagagcggcacatccctggggccgccttttttgatatcgatcagtgttctgacagaacctccccctatgatcatatgctccctggcgctgagcacttcgcagaatatgctggccggctcggggtgggtgccgctacccatgttgtgatctacgacgcctccgaccagggcctgtattcagcgcctcgcgtgtggtggatgttccgagcctttgggcaccacgccgtatctctgcttgacggcggactgcgccactggctcagacagaatctgcccctgagctctggcaagtcacaacctgcccctgcggagttccgcgcacagttagatcctgccttcattaagacctacgaagatatcaaagaaaacttagaaagccgacgttttcaggttgtggacagtagagccactggaagattccggggaacagaacctgagccccgggatggaattgagccgggccacatacctggcactgttaacataccttttaccgattttttatctcaggaaggccttgagaagtcacctgaagagatccgacatcttttccaggaaaaaaaagtggacctgtccaagccgctggtggccacatgcggatctggcgtgacggcatgccatgtggccctgggtgcttacctgtgtggcaaaccggacgtcccgatttatgacggttcatgggtcgaatggtacatgcgcgcaagaccggaagatgtgatcagcgagggaagggggaagacacattag

SEQ ID NO: 124063 - DNA, 738 bp, synthetic construct
  misc_feature 1..738: note = Description of Artificial Sequence: Synthetic coding sequence
  source 1..738: mol_type = other DNA
atggcgtctccccagctctgtagagccctggtgtcggcccaatgggtggccgaagccctgcgagcccctagggccgggcagccccttcagctgctggatgccagttggtacttaccaaagctcggacgggacgcacggagggagttcgaagagcgccacatcccgggtgcggccttttttgacatagaccaatgcagcgacagaaccagcccatacgatcacatgctgcctggcgccgagcacttcgccgagtacgccggaagactgggcgtgggggcagcgacgcacgtcgttatttacgacgcctctgaccagggcctctattctgcaccacgagtgtggtggatgtttcgagctttcgggcatcacgccgtgtctctccttgacggaggcttgagacattggttgaggcagaacttgcccctatcctccggcaagtcacagcctgctccagcggaattccgggcacagctggacccagccttcatcaaaacctatgaagacatcaaggagaacttagaaagtcgccggtttcaggttgttgacagcagagcaaccggacggttccgaggaactgagccggaacctcctgccgtaggcattgagcccggtcacattccggggactgttaacattcccttcacggatttcctgagccaagatggctcctgggtggagtggtacatgagagctcgaccagaggacgttattagtgagggaaggggaaaaactcattag

SEQ ID NO: 124064 - DNA, 765 bp, synthetic construct
  misc_feature 1..765: note = Description of Artificial Sequence: Synthetic coding sequence
  source 1..765: mol_type = other DNA
atggaccctgcagcctcttcttgcatgcggagtctccagcctcccgcaccagtgtggggatgcctgcgaaatccgcactcggaaggaaacggtgccagcggcttgccacactatccccctactcctttttcgtttcatcaaaaacctgattttctcgctacagccaccgctgcgtaccccgacttctctgcatcgtgccttgcagcaactccacactcacttccacaggaggaacatatctttacggaacaacacccagcatttccgcagtcccctaattggcacttcccagtaagtgatgctagacggaggcccaacagcggccctgcaggtggaagcaaggagatgggtacaagctctctggggctcgtggacactaccggaggacctggcgatgactacggtgtgttagggtccaccgctaatgaaaccgagaagaagtcctctaggcgaaggaaggagtcgagcgataaccaggaaaatagagggaagccagaaggttcaagcaaggcccggaaagaaaggacagccttcaccaaagagcaactgcgggagcttgaggccgagttcgcccatcataattacctcacccgcttaagacgttatgaaatcgccgtcaacctggacctgtcggagagacaggtgaaggtgtggttccagaatcgccgaatgaagtggaagcgggtcaagggcgggcagcctattagtcctaacggccaggatccagaagatggcgacagcacagccagcccgagttccgagtag

SEQ ID NO: 124065 - DNA, 555 bp, synthetic construct
  misc_feature 1..555: note = Description of Artificial Sequence: Synthetic coding sequence
  source 1..555: mol_type = other DNA
atggatcccgcagcttcatcatgcatgaggagcctgcagcccccagcaccggtgtggggctgcctgcgaaacccgcatagcgaagggaatggtgcaagcggtttacctcactatccacctacccctttcagttttcatcagaaacccgatttcctggccactgccaccgcagcctaccccgatttcagcgcttcatgtcttgctgccactccacacagtcttccacaggaggaacacatcttcactgagcagcaccctgcattcccacagagccccaattggcacttccccgtgtcagatgcccggcgacggccaaactcaggacccgccggcggaagtaaagaaatgggaaccagttctctaggactggttgataccacgggtggcccaggtgatgactacggcgtccttggcagcactgccaacgagacagaaaagaagtcctcccgccggagaaaggagtctagcgggcagtccgtggtgcccgaacccaaggacgaggtggaggcttgcgaaggcaggtctgcacatctacctcagtgggcaggtccttag

SEQ ID NO: 124066 - DNA, 420 bp, synthetic construct
  misc_feature 1..420: note = Description of Artificial Sequence: Synthetic coding sequence
  source 1..420: mol_type = other DNA
atgggtactagctccctggggctggtcgacaccacaggaggtccaggagatgattacggagtcctggggagcaccgctaatgagacagagaaaaagtcttcgcgtagaaggaaagagtcctcagataaccaagagaatcgaggaaaaccagagggctctagcaaggcacgcaaggagagaactgcctttactaaagagcagctgcgtgaactcgaagcggaattcgcacaccacaattacctaacccgcctgaggcgctatgagattgccgtcaatctagacttgagtgagagacaggtaaaagtgtggtttcagaatcggcggatgaagtggaagcgggtgaaaggcggccagcccatcagtcctaatgggcaggatcctgaggatggcgattccactgcgagtcctagttcggaatag

SEQ ID NO: 124067 - DNA, 915 bp, synthetic construct
  misc_feature 1..915: note = Description of Artificial Sequence: Synthetic coding sequence
  source 1..915: mol_type = other DNA
atggagcacccgctctttggttgcctcagatcccctcatgccactgcccagggactgcaccccttctctcaaagttctctcgctctgcacggaaggagtgaccatatgtcctatcccgagctgtcaacttcttcatccagttgtattatcgccggctatccaaacgaagaggggatgtttgcatctcaacatcataggggacaccaccatcaccaccatcaccatcaccaccaccatcaccaacagcaacagcaccaggctcttcaaacgaactggcatttacctcagatgtccagccctccctcagccgccaggcattctctgtgtttgcagcccgattctggcggtccacctgaacttggcagctcaccacctgttctatgttctaatagctcttctctgggaagctccactccgacgggcgctgcgtgtgctcccggggactacgggcgccaggcactgtcccccgccgaggcggaaaaacggagtgggggcaagcggaagtctgactcttccgactcccaggagggcaattataagagcgaggttaattcaaagcctaggaaagagcgcacggcctttaccaaggaacagatacgagagttggaagcggagttcgcacatcataattatcttacgagactgaggaggtacgaaatcgctgtgaacctggaccttaccgaacgccaagtgaaagtttggtttcaaaataggcgaatgaaatggaagagagtcaagggtgggcagcagggtgctgctgcccgggaaaaagaattagtgaatgtgaaaaagggtactcttctcccatctgagctttctggtattggcgccgcaacactgcagcagactggagactctattgccaatgaggacagccacgactccgatcattcttccgaacacgcgcatctgtag

SEQ ID NO: 124068 - DNA, 705 bp, synthetic construct
  misc_feature 1..705: note = Description of Artificial Sequence: Synthetic coding sequence
  source 1..705: mol_type = other DNA
atggccgcatccagatgggccagaaaagccgtggtcctgctgtgcgcgtcggatctacttctgcttctcttactcctccccccacccggcagttgcgctgccgaaggttcacccgggacacctgatgagtccacaccccccccgcggaagaagaagaaagatatcagggattacaacgacgccgatatggctagactcctggagcaatgggagaaggacgatgacatagaagagggcgatctgcccgagcacaagcgaccatccgctccagttgacttttcaaaaattgatccgagcaagccagagtctattctcaagatgacaaaaaagggtaagacactgatgatgttcgttactgtgagtgggtctccaaccgagaaagaaactgaagagatcacctctctgtggcaggggtctctgttcaatgctaactatgacgtccagagattcatagtcggctccgacagagccatatttatgctcagggacggatcctacgcttgggagattaaagacttcctagtgggacaggaccggtgcgctgatgttacactggaggggcaggtatacccaggtaaaggcggaggttcaaaggagaaaaacaagacaaaacaggacaaaggtaaaaaaaaaaaggagggagaccttaaaagtcggagctctaaggaggaaaatagagctggaaataaaagagaggatctatag

SEQ ID NO: 124069 - DNA, 705 bp, synthetic construct
  misc_feature 1..705: note = Description of Artificial Sequence: Synthetic coding sequence
  source 1..705: mol_type = other DNA
atggccgcaagccgatgggcacggaaggctgtggtcctgctgtgcgctagtgaccttctgctactcctgctgctgctgcctccgcccggaagttgtgccgctgagggaagccccggcaccccagatgaatccactccaccaccgaggaaaaaaaagaaagacattagagactacaacgacgccgatatggctcgactattggaacagtgggagaaggatgatgacatagaggaaggtgacctgccagagcacaaaagaccctctgcaccagtagatttttcgaagatcgacccgagtaaacccgagtctattcttaaaatgaccaagaagggaaagactctgatgatgttcgtgactgtgtcaggctcaccgaccgagaaagagacagaggagatcacaagcctgtggcagggctccctgttcaacgccaactacgatgtgcagaggttcatagtcggctcagatcgagctattttcatgctgcgggatgggtcgtatgcttgggagatcaaggacttcctggtgggacaggatcgttgcgcagatgtcactctcgaagggcaggtgtaccctgggaaaggcggcggctccaaagagaagaacaaaacgaaacaggacaaaggaaagaagaaaaaagaaggcgatctgaaaagcagatcatccaaagaagagaaccgggccggaaacaagcgcgaagacctatag

SEQ ID NO: 124070 - DNA, 1194 bp, synthetic construct
  misc_feature 1..1194: note = Description of Artificial Sequence: Synthetic coding sequence
  source 1..1194: mol_type = other DNA
atggcgcagtcgccaccgcctcagagcttgttaggccatgatcattggatttttgcccagggctggggatgggcagggcactgggattctacctcccctgcctcttctagtgattctagcgggtcttgcccttgcgatggagcgcgtggcctcccccagccacaaccccccagctgcagctcccgggccgccgaagccgccgcaaccacgccacgccgggccagaacaggtcccgcaggcggacagaggcagagcgcctcagagcgcgagaagctgaggatgagaactctcgctagggcactgcatgagctgaggagattcctgcctccatcactagctccagcaggccagtccttaactaagatagaaacactgcgccttgcaatccgctatatcggccatttgtcagcagtgttgggtttgtccgaggaatcactccagtgtagacgccgtcaacgcggcgacgctggttctccatggggttgccccctgtgccccgatcgcggacctgctgaagctcagacccaggccgaggggcaaggacagggacaggggcaggggcaggggcagggccagggccaagggcaggggcaggggcaaggccagggccagggccgccggccgggcctggtgagtgctgtgctggcggaggcctcgtggggaagccccagtgcctgtccaggagctcaggcggctcctgaacgcctgggcagaggcgttcacgacactgatccatgggcgacacccccctattgccctaagatacagtcgcccccctattctagccagggaaccactagcgacgctagcctgtggactccgccacaaggctgcccatggacacagtcctctccagaacccagaaacccgccagttccgtggaccgccgcccccgctactcttgaactagctgccgtttaccagggcctgtccgtatcccccgaaccctgcctctcgctgggcgccccctctctcctgccacatccgagctgccagaggctacagccacagacaccagggaggtgttggtcacactcggctgaggtggtgccgaactctgaagaccagggaccaggggcagctttccagctttccgaagcttcaccaccgcagtcgtcaggcttaaggttttcaggctgtccggagttgtggcaggaggacttggagggtgctagactgggcatcttctattag

SEQ ID NO: 124071 - DNA, 3510 bp, synthetic construct
  misc_feature 1..3510: note = Description of Artificial Sequence: Synthetic coding sequence
  source 1..3510: mol_type = other DNA
atggagcctagggaaagcggcaaggcccccgtcacattcgatgacatcactgtgtatttgttacaagaagagtgggtcctcctctcacagcagcagaaagagctatgtggctctaacaagttggtcgctcctctaggacctactgtggctaatcctgagctgtttaggaagttcggacggggccccgagccttggctgggaagtgtccagggacaaaggtccttgctggaacaccatccggggaaaaaacagatgggatacatgggggagatggaggtgcagggaccaactagagagagcggccaaagtctcccacctcagaagaaggcatatttatcccacctgtctactgggtccggacacatagagggagactgggctggaagaaatagaaagttacttaaacctagatccattcagaaaagctggttcgtgcagttcccatggctcatcatgaatgaggagcaaactgccttgttctgctccgcctgtagggagtacccaagcattcgggacaagagaagccggcttatcgaaggctacactggtccgtttaaggtggagaccttgaaatatcatgctaaaagtaaggctcacatgttctgcgtgaatgccctggcggcccgagacccaatatgggcagctcgctttcgctctattcgcgacccacctggagatgtgttggcctccccggaacctctgttcaccgctgactgtccaatcttctaccccccagggccactgggcggattcgatagcatggccgagcttctcccttcgtcacgtgcagagctggaagatcctgggggtgatggcgcaattcccgctatgtatttggactgcattagtgatctgcggcagaaggagatcactgatgggatccatagctcttcagacataaacatcctgtacaacgacgcggtggaatcttgtatccaagatccttccgctgagggactttctgaggaggttccagttgtattcgaagagctgccagtagtctttgaagatgtggctgtttatttcactagggaagaatggggcatgctggacaagcgccagaaggagctctatcgagacgtcatgagaatgaattacgagctgttggctagcctcggtcctgccgctgcaaagcccgacctgatctccaagctggaaaggcgagccgctccatggatcaaagatccaaacgggcccaagtggggaaaagggaggccaccaggcaataagaaaatggtcgccgtgagggaagcggatacccaggcctccgcagccgattcagccctattgcccggcagcccagtcgaggcacgtgccagttgttgctcctcaagtatctgtgaagagggcgacggaccccggcgcataaaaagaacttataggccccgctccatccagcggtcatggtttggtcagtttccttggctggtcatcgatcccaaggagaccaagctgttctgctctgcgtgcattgaaaggcctaatctgcacgacaaatcatctcgcctcgtgaggggatacactggacctttcaaagtggagactctgaaataccacgaggtcagcaaggcccatcggctttgcgtcaacaccgtggagatcaaagaggacacacctcatacagccctcgttcccgaaatctccagcgacctgatggccaatatggagcactttttcaacgctgcttattcaatagcctaccattcccggccgttgaacgattttgaaaagatcctccaactcctccaaagtactggaaccgtgatcttgggtaagtaccggaataggacagcctgtacccaattcatcaaatatatctccgaaactctgaagcgggaaatcttggaagacgtgcggaacagcccgtgcgtgtcagtgctgttagacagctccaccgacgccagtgagcaggcctgcgtcggtatttacataaggtactttaaacagatggaggtgaaggaaagttatatcactctggcccccctctattctgaaacagccgacggctatttcgagaccattgttagcgctctggacgagctcgacatcccattccgcaaacccgggtgggtcgtgggccttggtacagatggcagcgccatgctcagctgccggggcggactggtggaaaagtttcaagaggtcatacctcagctgctgccagtacactgtgttgcccaccgactgcatctcgctgtggttgacgcatgcggcagcatcgatctggttaagaagtgcgatcggcatatccggacagtgttcaagttttatcaatcatccaacaagaggttgaacgaactccaggagggggctgcgcctctcgagcaggaaatcattcgactgaaagatctgaacgccgtcaggtgggtggctagtcgacgccggactctgcacgctctcctggtgagctggccagccttggcccgccatctgcagagagtagcagaggccggcgggcagatcgggcaccgggcaaaaggtatgctcaagctgatgcgtggcttccatttcgtgaaattttgtcattttttactggacttcctgtctatttataggccattgtcagaggtgtgccagaaagaaattgtcttaataaccgaggtcaacgctacactgggccgcgcctatgtcgccctcgagtcgctgaggcatcaggccggacccaaagaggaggagtttaacgcgagttttaaagatggacggctgcacggcatctgtcttgataaactcgaggtggctgagcaacgctttcaggcggatcgagagcgcactgtattaactggaatagaatatctgcagcagcggtttgacgcagatagacccccccaactgaagaacatggaggtgtttgatacaatggcctggccgtccggcattgagctcgcgagtttcgggaacgatgatatcctcaacctggcacggtactttgaatgttctctgccaaccggatattctgaggaagcattattggaagaatggttaggcctgaaaaccattgcgcagcacctgcccttcagtatgctctgcaaaaatgcgctggcccagcattgccgtttccctttgctcagtaagctcatggctgtggtcgtgtgcgtacctattagtactagctgctgtgaaaggggcttcaaggccatgaatagaatccgcactgacgaaaggaccaagctgtccaacgaagttctcaatatgctgatgatgacggccgtcaatggagtggccgtcactgagtacgacccacaacccgccatacagcattggtacctgactagctctgggaggcggtttagccacgtttatacctgtgcccaggtgcctgcccgctcccctgcctccgctcgcctcagaaaggaggagatgggggctctgtatgtagaagagccccggacccaaaagccacccatactgccttcacgcgaggccgccgaggtactgaaggattgcatcatggagccccctgaacgccttttgtacccacacacctcccaggaagctcctgggatgagttag

SEQ ID NO: 124072 - DNA, 981 bp, synthetic construct
  misc_feature 1..981: note = Description of Artificial Sequence: Synthetic coding sequence
  source 1..981: mol_type = other DNA
atgagagaatggtgggttcaggtcggtctgctggccgtaccactgctcgctgcgtatctgcacatcccccccccccagctgagccctgcgctccactcttggaaaagtagtgggaagttcttcacttataagggactccgtatcttctaccaggactccgttggtgtagtcggctcacccgagatcgtcgtgctgctccacggatttccaacttcctcctacgattggtacaagatttgggagggtctcaccctgcgatttcatcgggtcatcgcactcgacttcctggggttcggattctctgataaacctagaccacaccactattcaattttcgagcaagctagtattgtggaggccctgctgcggcacttgggactgcaaaatagaaggattaatctcctgtcccatgactatggagacatcgtggcccaggaattgttgtatagatataagcagaatcggtccggaaggctaaccatcaagagcctgtgtcttagcaatggcggcatttttcccgaaacacataggcccctcttactccagaagctgctcaaagacggaggtgtgctgtctccaatcttaactcgtctcatgaacttttttgtcttcagcagagggctgactcctgtgttcggaccatacactagaccctccgagagtgaattgtgggatatgtgggccggaatcagaaacaatgatggcaatcttgttattgactctttgctacagtatattaaccagcggaaaaagtttcggaggaggtgggtcggagcgctggccagcgtgactatcccgattcactttatttacggaccccttgacccagttaacccttaccccgaattcctggagctctacagaaaaaccctgcctaggtccacagtctccatcctggatgaccacatctctcattatccccagttggaagacccaatgggctttctgaatgcctatatgggcttcataaactctttctag

SEQ ID NO: 124073 - DNA, 981 bp, synthetic construct
  misc_feature 1..981: note = Description of Artificial Sequence: Synthetic coding sequence
  source 1..981: mol_type = other DNA
atgcgcgagtggtgggtacaggtcgggctactcgcggttcccctgctcgccgcctacctccacatcccacccccgcagctctctcctgctcttcattcttggaaatcgagcggcaagttcttcacctacaagggtctgagaattttttatcaggattcagtgggcgtcgtagggtctcccgaaatcgtcgtcctgctgcatgggttccctacctccagctacgattggtacaaaatttgggagggactgaccttaaggtttcatcgggtgatcgccttggatttcttgggtttcggcttctctgataagccacggccccaccattactcaatttttgagcaggctagcattgtggaggccctcctgcgccacctggggctgcaaaatagacgcataaatctcctcagtcatgactatggagatatcgttgcacaggaactgctataccggtataagcaaaaccgaagcggaagactgaccatcaagtccctctgtctaagtaatggaggcatctttccggagacccaccgccccctattgctccaaaagctcttgaaggatgggggagtgttatctccaatcctcaccaggcttatgaacttcttcgtcttctccagaggtctgacgcccgtgtttgggccatatactcggccttctgagagtgagttgtgggacatgtgggccggcatccggaataatgatggcaatctggttatcgacagccttctccagtatatcaatcagagaaaaaaattcaggcgacgatgggttggagccctagcatcagttaccattcctattcacttcatctacggcccattggatcccgtgaacccttatccagagttcctagaactgtatcgcaaaacgctgcctcgctccacagtcagcattttagacgaccacatctctcactatccgcaactggaagacccgatgggcttcctgaacgcctacatgggcttcatcaattcattctag

SEQ ID NO: 124074 - DNA, 357 bp, synthetic construct
  misc_feature 1..357: note = Description of Artificial Sequence: Synthetic coding sequence
  source 1..357: mol_type = other DNA
atgcgcgaatggtgggtgcaggttgggctcctggctgtccctcttctcgccgcatacctgcacatccccccaccccaactctcaccagcactccactcctggaagagcagtgggaaattttttacgtacaaaggacttcgcatattctatcaggattcggttggggtggtgggcagtcccgagatcgtggttttgctgcacgggtttccaactagtagctacgattggtacaagatatgggagggactgacccttaggttccaccgcgtgatcgccctggatttcctgggcttcggcttttccgacaagcctagaccacatcactattccatcttcgaacaggcaagcattgtgtag

SEQ ID NO: 124075 - DNA, 624 bp, synthetic construct
  misc_feature 1..624: note = Description of Artificial Sequence: Synthetic coding sequence
  source 1..624: mol_type = other DNA
atgcgggagtggtgggtccaagtggggctactggccgtgcctctactcgctgcctacctgcatatccctcctccacagctctctcccgcactgcactcttggaagtcctcaggcaagtttttcacatataagggactgcgtattttctaccaggattccgttggtgttgtcggctcccctgagattgtggtgttgcttcacgggttccctacctccagctacgactggtacaagatctgggaggggcttaccttgaggttccaccgagtgattgccctggatttcctgggcttcgggttcagtgacaaaccgagaccccaccactatagcatcttcgagcaagcatcgatcgtggaggcgttgcttaggcatttagggctacagaatcggagaatcaatctgctctcccacgactacggggatattgtggcccaggagctgctgtaccgttataaacagaacagaagcggacggctcaccatcaagtctctctgccttagtaatggaggaatttttcccgaaactcatagaccattgcttctccagaagctactcaaagacggcggggttctttcgcctatcttgacccgcttgatgaacttttttgtgttcagtagaggctag

SEQ ID NO: 124076 - DNA, 483 bp, synthetic construct
  misc_feature 1..483: note = Description of Artificial Sequence: Synthetic coding sequence
  source 1..483: mol_type = other DNA
atgcgcgaatggtgggttcaggttggcctgctggccgtgcccctgttggccgcataccttcacatccccccaccccagttgtcccccgcgcttcattcgtggaagagttccggcaagttcttcacttacaaagggctcagaatcttctatcaggattccgtgggagtggtggggagtccagagattgttgtattgctccatggcttcccaacaagttcctacgattggtacaagatctgggagggtctgacacttagattccaccgagtgattgccctggactttttaggattcggctttagcgataagcctcgcccacatcactactccatctttgagcaggcctccatagtggaagccctgttgagacatctgggactgcagaacagaagaataaatctgctctctcacgattatggtgatatcgttgcccaagaactgttataccggtataaacagaatagaagtggtagactcacctag

SEQ ID NO: 124077 - DNA, 384 bp, synthetic construct
  misc_feature 1..384: note = Description of Artificial Sequence: Synthetic coding sequence
  source 1..384: mol_type = other DNA
atgcgcgagtggtgggtccaggtggggctgctggcagttccccttctggccgcctatctgcatataccgccgcctcaactgagtccggctcttcacagctggaaatcttctggaaaattctttacttacaagggtctgcgcatcttttatcaggactctgtgggagtggtgggcagccccgaaatcgtagtcctattgcacggctttccgacatcctcatacgactggtacaaaatctgggaaggtttgacccttagatttcacagggtcatcgctctggattttctgggattcgggttctccgataaaccccggccccaccattactctatattcgagcaagcatcaatcgtcgaagcgctgctgcgacacttggggctatag

SEQ ID NO: 124078 - DNA, 522 bp, synthetic construct
  misc_feature 1..522: note = Description of Artificial Sequence: Synthetic coding sequence
  source 1..522: mol_type = other DNA
atgagagagtggtgggtccaagtgggcctgctggccgtacctctcctggccgcttaccttcatatccccccgcctcagctaagccccgccctacattcttggaagagcagcggcaaattcttcacttataaaggcttaagaattttctatcaagattctgttggcgtggttggatctcccgagatagtcgtgcttctgcatggatttccgacatccagctatgattggtataaaatctgggaaggtctgaccctgaggttccaccgggtgatagctctggatttcctcgggttcggctttagcgacaagccccgaccgcatcactatagcattttcgagcaggccagtatcgtcgaagctttgctgaggcacctcggactgcagaaccggcggataaatctgctcagccacgactacggcgatattgtggcacaggagctcctctaccgctacaagcagaataggagcgggaggcttaccatcaaaagcctgtgcctctccaatggcggcaattgcctctag

SEQ ID NO: 124079 - DNA, 879 bp, synthetic construct
  misc_feature 1..879: note = Description of Artificial Sequence: Synthetic coding sequence
  source 1..879: mol_type = other DNA
atgagggaatggtgggtgcaggttggactactggctgtgcctctgctggccgcttacttgcacatccctcccccccagttgtctcccgctttgcatagttggaagtcctcgggcaagtttttcacatataaagggctgaggatattctatcaggactcagtgggtgtggttggcagccccgaaatcgtcgtcctacttcacggcttccccactagcagctatgactggtacaagatttgggaaggactgaccctcaggttccaccgggttattgcacttgattttctgggatttggtttttccgataaaccccggccccaccactatagtatctttgaacaggcatccatcgtcgaggccctcctcagacacttagggctccaaaacagacggataaaccttctcagccatgactatggcgatattgtggcacaggagctcctgtatagatacaaacagaatagaagcggtaggcttaccattaagtctctttgtctttccaacggcggaatctttccggaaactcacagaccccttctactgcagaagctgctcaaagatggaggcgtcttgtcccctatactgacgagacttatgaattttttcgtattttcgcgaggcctgcttcagtacatcaaccagcggaagaagtttcgccggagatgggtcggagctcttgcttcagtgacgattccgatccatttcatatacggccctctggaccccgtgaatccatatcccgaattcttggagttatatcggaaaactcttcctcgcagcaccgtctccatcctcgacgaccacatctctcattacccacagctggaagatcctatgggtttcctgaacgcctatatgggcttcataaacagtttctag

SEQ ID NO: 124080 - DNA, 879 bp, synthetic construct
  misc_feature 1..879: note = Description of Artificial Sequence: Synthetic coding sequence
  source 1..879: mol_type = other DNA
atgagagagtggtgggtccaggttggtctcttggcagtccctctgctcgctgcatacctccatatccctccacctcagctgagcccagcactccatagttggaagtcttccggaaagtttttcacctataaaggcctcagaatcttctaccaggactcagtgggcgtggtaggttcccccgaaatcgttgtcttacttcacgggttcccaaccagctcttatgactggtacaaaatttgggaaggtttgactctccggttccaccgcgttatagcattggatttcctgggctttggctttagtgataagccgcgcccccatcactattctattttcgagcaggcgtctatcgtcgaggccctgctgcggcacctggggttgcagaatcgacgcataaatctgcttagtcatgattatggtgatatcgtcgcgcaggaactgctctataggtataaacagaaccggtccggtaggcttactattaaatcactgtgtctgtctaatggcggaatctttccagagacccacagaccactgcttctacagaagttgcttaaagacggcggtgtgctatcccccattttgactaggcttatgaatttttttgtgttttcacggggcctcctccagtatataaatcagcgaaagaagttccggaggcggtgggtgggcgcactggcatccgtcacaatccctattcatttcatttacggtcccctggatccggtgaatccctaccctgagttcttggagctttatcgaaaaaccctgccacgctccacagtgagcattctggatgatcacatctcccattacccccagctggaagaccctatgggcttccttaatgcatacatgggttttataaattccttttag

SEQ ID NO: 124081 - DNA, 582 bp, synthetic construct
  misc_feature 1..582: note = Description of Artificial Sequence: Synthetic coding sequence
  source 1..582: mol_type = other DNA
atggataatctacgagaaacgttcctgtctcttgaagatggtctgggtagctccgatagcccaggacttctgtcctcgtgggactggaaggatcgcgctggacccttcgagctgaatcaagcatcaccttcccagagtttatcccctgcaccgagtctcgaaagttacagcagctctccatgccctgcggtggcgggactgccttgcgaacatggaggcgcgtcttccggcggtagtgaaggctgttcagtgggcggggcatccggcctcgtggaagtggactataatatgttggcttttcagccaacgcaccttcagggtggtggtggacccaaggcacaaaaaggtactaaagtgcgaatgtccgtgcaacgcaggcggaaggcatctgagagggagaagcttcggatgaggaccttagccgacgccctgcacactctgagaaactatttgccccccgtgtattcacagaggggccagcccctaactaaaattcaaaccctcaagtacaccataaagtatatcggagaactgaccgatttgctcaataggggccgcgaaccacgggctcagtccgcatag

SEQ ID NO: 124082 - DNA, 1893 bp, synthetic construct
  misc_feature 1..1893: note = Description of Artificial Sequence: Synthetic coding sequence
  source 1..1893: mol_type = other DNA
atggcccttcctactgcccggccactgctgggctcctgcggtaccccagcattgggttccctgctgttcctcctttttagcctcgggtgggtgcaaccttcaaggacgctggctggcgaaaccgggcaggaagcagctcccttagatggcgtccttgctaatcccccaaacattagctctcttagccctcgtcagctgctcggcttcccatgtgcggaagtcagcggcctgagcacagagcgggtgcgcgaactggccgtggcccttgctcaaaaaaatgtcaagctaagcactgaacagctacgctgtctcgcccatcggctttctgaacccccagaagatcttgatgccttgccactggacctgcttttgttcctgaacccggacgcattcagtggaccccaggcttgcacccggttcttttctcgtatcactaaagcgaacgtcgatctgttaccgcgtggtgcccctgaacgtcaaagactgctgcccgccgccttagcctgctggggtgtgcggggctccctgctgtccgaggccgatgtgagagccctgggaggacttgcctgtgacttgccaggcaggtttgttgctgagagcgcggaagtgctactgcctaggcttgtcagttgccctggtccccttgaccaggaccagcaggaagccgcccgcgctgccctgcagggaggaggccccccatacggccccccctcgacctggtccgtctctacaatggacgctttgcggggtcttctaccagtgcttggacagccgattattcgatcaatccctcagggtattgtcgctgcctggagacagcggtcctctcgggacccttcctggagacagcctgaacggacaatcctccgaccccggtttcgcagggaggtggaaaagactgcttgtccatctggtaagaaagcacgagaaattgatgaaagcctcatcttttacaaaaagtgggaactggaagcgtgcgtggacgccgcactgctcgcaacacagatggacagagtcaatgcgatacccttcacctatgagcaactggatgtgctgaagcataaactcgatgaattgtacccacagggatatcccgaaagcgtaattcagcacctgggctacttgtttctgaaaatgtctccggaagacattagaaaatggaacgtcacctccctggaaaccctgaaagccctactggaagtgaacaaaggtcatgagatgtctccccaggctcccagacgccctctaccccaggtagccactctgatcgataggtttgttaagggccgcggacagctcgacaaagacaccctggataccctgactgctttttacccaggatacctttgcagcctttcccccgaggaactctcgagtgtccctcctagctctatctgggcagtgaggcctcaagatttagacacctgtgacccgaggcagctggatgttctttacccaaaggcaaggttggcttttcaaaatatgaacggttccgagtattttgtgaagattcagagtttcctgggtggagctccgaccgaagacctcaaggctctgtcccagcagaatgtcagcatggatctcgccacttttatgaaactccggaccgatgccgtgctgcctctgactgtcgccgaagtccaaaaacttttgggaccccacgtcgagggtttaaaagcagaggagcgccaccggccagtgcgagattggatactccggcaacgacaagatgacctggacacgttggggttaggtttacagggaggcatccccaatgggtatctagtgcttgacctgagtatgcaggaggccttgtcaggaaccccttgtctgttagggccaggcccagtgctgaccgtgctggctctcctgctggcctcgacgctggcctag

SEQ ID NO: 124083 - DNA, 1869 bp, synthetic construct
  misc_feature 1..1869: note = Description of Artificial Sequence: Synthetic coding sequence
  source 1..1869: mol_type = other DNA
atggcactgcccacagcccggccattgctcggaagctgtggcactcctgcccttggctcactgctgtttcttctcttctctttaggctgggttcagccctcccgcacccttgcgggggagactggacaggaggctgcccccctcgacggtgtgctggcaaaccctccaaacatttcctccctgagcccgcgacaactactggggtttccttgtgctgaagtttcagggctttctactgagcgcgtgcgtgaactggctgttgcgctggcccagaagaatgtgaagttaagcacagagcagctgaggtgcctagctcacaggttgtccgagccccctgaggatctggacgcacttcctttggatctgctgcttttcctcaatcctgatgccttctctggcccccaggcctgtacgcgcttcttcagccgtattacgaaagctaacgtggacttgctgcctaggggggcccccgagcggcagagactgctgccagcagcccttgcatgctggggggttcggggaagccttttgagcgaggcggacgtccgggccctcggaggtctggcctgcgacctccctggtcgcttcgtggcagagtccgccgaagttctgctgcctcgcctcgtgtcctgtccgggccccctcgaccaggaccagcaagaggctgcacgcgcagcactgcaggggggtggccccccctacggtccaccctcaacatggtctgtcagtacaatggacgctttgaggggacttctcccagtactgggccaaccaattatcaggtcgattccccaaggaatcgtcgcggcatggcggcagcgaagcagtcgagacccctcctggaggcagcctgaacgtacgatcctccgcccgagatttaggcgggaggttgagaagaccgcttgtcccagcggtaaaaaagcaagagaaattgacgaaagcctaatcttctacaaaaaatgggagttagaggcctgtgttgatgcagctctcctcgcaacacagatggacagggtgaacgctattccttttacttatgaacagctcgatgtgttgaaacacaagttagacgagctctatccgcaaggctatcctgagagtgtgatccagcacctgggatacctttttctaaagatgagtccagaggacatccgcaagtggaacgtcactagcctggagacactaaaagccctgctggaggtgaataaggggcacgaaatgtcaccccaggttgctactctgattgatagattcgtgaaaggtcggggccagctcgacaaagacaccttagacactctgacagctttttatcctggctacctctgctctctaagtcccgaggagctttcttctgtgccacccagcagtatttgggccgtgaggccgcaagacttggatacatgtgacccccgccagctggatgtgctgtatccgaaagctaggcttgctttccagaacatgaacggcagtgagtatttcgttaaaatacagtcctttctggggggtgcacccaccgaggacctcaaagccctctctcagcagaatgtgtcaatggatctggcaaccttcatgaagctcaggaccgatgctgtgttaccacttactgtggcagaggtgcagaagctgctgggaccccacgttgaaggtctcaaggctgaggaacgacacagaccagtcagggactggatcttgaggcagaggcaggacgatctagataccctgggattaggccttcagggagggatccccaatggatacctggttctcgacctgagcatgcaagaggccttgtccggaaccccatgtttattgggtcctggcccagtgttgactgtcctggctctcctcctggcatctaccctcgcatag

SEQ ID NO: 124084 - DNA, 1893 bp, synthetic construct
  misc_feature 1..1893: note = Description of Artificial Sequence: Synthetic coding sequence
  source 1..1893: mol_type = other DNA
atggccctcccaactgcccgccctctcctgggctcctgcgggactccagccctaggaagtctgctctttttgttgttcagtctgggctgggtgcaaccaagccggaccctcgccggcgagacaggacaggaagctgcacctctggacggtgtgctagccaacccgcctaacatctcgtccctgtcccctagacagcttctgggatttccatgcgctgaggtctctgggctcagcactgaacgggtgagggagctggccgtggcactcgctcagaagaacgtgaagcttagcaccgagcaactgaggtgcttggcccaccggctgagtgagcccccggaggatttagacgcgctccctcttgatctgctgctctttctcaatccagatgctttcagcgggccgcaggcttgcactagattcttctcacggatcaccaaggctaacgtggatctcctgccgagaggagctccagagagacagcggctcctgcctgccgcactggcctgctggggtgtgagggggtcactgttgtccgaggccgacgtgcgcgcactcggaggacttgcctgcgacctgcccggaagatttgtggctgaatcagccgaggtgctcctccctagactagtttcttgccccggacctctcgaccaggaccagcaggaagcagcccgcgctgcactccaagggggcggtccaccatacggccccccctcaacctggtccgtctccacgatggatgctctacgaggcctacttccagttctggggcaacctatcatcaggtcgattccacaaggtatcgtcgcagcctggcgccagagaagcagtagggatccgtcatggaggcagcccgagcgtaccatactgcgacccagattcaggagggaagtggagaagacagcctgtcccagcggaaagaaggcccgtgagattgacgaaagtctgattttttataagaagtgggaactggaggcttgcgtagatgccgccctcctggctacacaaatggatagggtcaacgcgattccatttacatacgagcagctggacgtgcttaagcacaagctcgacgagttgtatccccagggatatccggagtccgtaattcagcatttgggctatctgtttctgaagatgagtcctgaagacatccgaaagtggaacgtcacttcattggagactctcaaggcattactggaggtcaataaggggcatgagatgagccctcaggcgccacgccgccctttgcctcaggtagcgaccctgattgacaggttcgttaagggcagaggtcagctcgataaggataccctagatacattgacagcattctaccccgggtacctttgtagccttagtcccgaggaacttagcagcgttcctccttcctctatctgggccgtacggccacaggatttagacacctgcgacccaaggcagctagacgttctgtatcctaaggcgcggctggcgtttcagaatatgaatggttccgagtactttgtgaagatccagagctttctcggaggggctccaacggaggacctcaaagctctgagccagcagaatgtttctatggacctcgccactttcatgaagctgcgcactgacgctgtacttcctctcactgtagccgaggttcagaagctactgggcccccatgttgagggcctgaaggctgaagagcgacatcgcccagtgagggattggattctgcgccaaaggcaggatgatctggatactctcggcctcggactgcaaggaggcatccctaatgggtatctggtgctcgatctgtctatgcaggaggcactaagtggaacaccttgtttgctcggccctggacctgttttgacagtgctggccctactattggccagtaccctggcttag

SEQ ID NO: 124085 - DNA, 1869 bp, synthetic construct
  misc_feature 1..1869: note = Description of Artificial Sequence: Synthetic coding sequence
  source 1..1869: mol_type = other DNA
atggcactccccactgccagaccgctcctgggcagttgcgggacaccagcactgggcagcctcctcttcctgctgttctcactcggctgggtgcagcctagcagaactctggccggcgagaccggccaggaagctgcgcccctcgatggcgtgctcgccaatccacccaatatcagctcgctcagcccgaggcagctcctgggctttccttgtgctgaagtcagtggactgtccacagaacgggtgagggagcttgccgtggcattagcacagaaaaatgtcaagctctcgaccgaacagctgcgatgcttggcacacagactgagcgaaccccccgaggacctggacgctcttccactggacttactcctgtttctgaatcccgatgccttttcaggtccgcaggcctgtactcggttcttttcccggattaccaaagcaaatgtggatcttctgcccaggggagctcccgagagacagcggctcctcccagcagcgctggcctgctggggcgttaggggttccctcctgagcgaagcagacgttcgtgccctcggtggactagcttgcgacctgccagggcggttcgtggccgagagtgccgaggtgttgctgcctagactcgtcagctgtccaggccccttggatcaggaccagcaggaggcagctcgggccgctttgcagggcggtgggccaccttacgggcctcctagtacatggtccgtctctaccatggatgccttgcgcgggctgctgccggtgctggggcagcccataatacgttcgattccccagggcattgttgccgcatggcgccagcgaagcagccgtgaccccagttggcgccagccagagcgaactattctcaggccacgcttcaggcgggaagtggagaagaccgcttgtccaagtggcaagaaggccagggagatcgatgagagcttaatattttataagaaatgggagttggaggcttgtgtcgacgcagccctgttggcaacccagatggaccgggtgaacgctatcccgtttacttacgaacagctagatgttctgaaacacaaattggatgagctgtaccctcagggctatccggaatccgtcattcagcacctggggtacctattcctgaagatgtccccggaggacatcagaaagtggaatgtgactagcctagagaccctcaaagccttactggaggtcaacaagggccatgagatgagcccacaagtggcgacactgatcgaccgcttcgtaaagggcagaggccaactggacaaggataccttggacacactcaccgccttctatcctggttacctctgctcactgtcccccgaggagctgagtagcgttcccccgagctctatctgggctgtacggccccaggaccttgacacctgtgatcctcggcagctggacgtcctttacccaaaagctagactggccttccaaaatatgaacggctccgaatatttcgtaaaaattcaatcctttttgggcggggcacccacagaagatttgaaggcgttgagtcagcagaacgtgtctatggatttggctacctttatgaagctcagaacagacgcagtgctgccactgaccgtggcagaagtgcagaagctgttaggcccccatgtcgaagggcttaaagcagaggaacggcatcggccagtccgggactggatcctcaggcagaggcaggatgatttagacacattaggcttgggattgcaggggggtatccccaatggctatctcgtgctggacctttctatgcaggaggctctgagtggaacgccatgccttctgggcccaggtccagtgttgacagtactggccctgctattagcaagcacgttggcttag

SEQ ID NO: 124086 - DNA, 1869 bp, synthetic construct
  misc_feature 1..1869: note = Description of Artificial Sequence: Synthetic coding sequence
  source 1..1869: mol_type = other DNA
atggcgctgccgaccgctaggcccctgcttggaagctgtgggacacccgccctcggcagcttattgttcctcctgttttcccttggttgggtgcagccatcccgcacattggcaggagagaccggccaggaggctgcccccctcgatggggttctggcgaatccccccaatatttcctctttatcccctagacagttgctgggtttcccctgtgccgaagtttccgggctctctaccgagcgagtccgcgagctggccgtggctctggctcagaagaacgtgaaactcagcacggagcaactgaggtgtctcgcacatagactgagtgagccacctgaggatcttgacgccctcccattggaccttcttctgttcttgaatccagacgcattttctgggcctcaagcatgtacacgcttcttttcacgcatcacaaaggccaatgtggacttgttgccccgaggagcccccgagcggcagaggctcctgccagctgctctggcttgttggggagtgcggggatcactcctgagtgaggctgatgtcagagcacttgggggcctggcttgtgaccttcccggcaggttcgtggctgaatcagccgaagtgcttctaccccggttagtatcatgtccaggccccttggaccaggatcagcaggaagcggcaagggccgctctccagggtggcggaccaccctatggcccgccctctacttggtccgtgagtaccatggacgcgttacgtggcctactgccagttctgggccagcccatcattcgaagcatccctcagggtatcgtggcagcatggcgacagaggagttccagagaccccagctggcggcagccagaacggacgatattgagaccaagatttcgccgagaagtcgaaaagacagcctgccccagtggaaaaaaggccagagaaattgacgagtccttgattttttacaagaaatgggaactagaggcttgcgtggacgcggccctactagccacccagatggatcgcgtgaacgccatcccatttacctatgagcagttggacgttcttaagcataagctagacgagttatatccccaaggctacccagagtccgtcattcagcacctcggctacctctttttaaagatgagtcctgaggatatcaggaagtggaatgtgacctccttggaaaccctcaaggcactactggaggtcaacaaggggcacgaaatgtctccacaggtggccacgctcattgaccggtttgtgaaaggccgcgggcagctggacaaagataccttggataccctgactgccttctatcccggctatctgtgctcactctctcctgaggagctttcctccgtgccccccagctccatctgggccgtccgcccccaggatctcgacacatgcgatccgcggcagctggacgtcttgtacccaaaggccaggctcgccttccagaacatgaatggctctgaatatttcgtcaagatccagagcttcctcggcggcgcgcccaccgaagacctgaaggctctgtcgcaacagaatgttagcatggatttggcaaccttcatgaaactcaggaccgatgcggtgcttcccttgaccgtggccgaagtacagaagctgctgggccctcatgtggaaggactgaaggccgaggaaaggcacagaccagtgcgggactggatcctaagacaacggcaggacgaccttgacaccctggggctggggctgcagggaggcataccaaatgggtatttggtgctggacctttcaatgcaggaggctttatccggaacaccatgtctgctggggcccggaccagttctaacggttttggctttacttctggcctcaacccttgcctag

SEQ ID NO: 124087 - DNA, 1782 bp, synthetic construct
  misc_feature 1..1782: note = Description of Artificial Sequence: Synthetic coding sequence
  source 1..1782: mol_type = other DNA
atgagggatagcactggcgccggaaattctctcgtgcataagaggagtccattgcggcgtaaccagaagacacctacttcactgactaagctgtcgctccaagatggacataaggcaaagaaacctgcttgcaagtttgaagagggccaagacgtgctggcacggtggtcggacggcctcttctacctggggacaataaagaaaataaacatcctgaagcaatcctgcttcattatctttgaggactctagcaaaagctgggtgctgtggaaagacatacagacaggagccactgggagcggggagatggtgtgtacgatatgtcaggaggagtactcagaggcgcccaacgagatggtgatttgtgacaagtgcggtcaagggtatcatcagctctgccacactccgcatatcgactgcagtgtgatcgattccgacgagaagtggttgtgcagacagtgcgtgttcgcaactacaacaaagagaggcggggctttgaaaaaagggccgaacgcaaaggctctgcaggttatgaaacaaaccctgccatattctgtcgccgatctggaatgggacgcaggtcacaagaccaatgtgcagcagtgctattgttactgcggcggaccaggcgactggtatctaaagatgcttcaatgctgtaagtgtaagcagtggtttcacgaggcatgtgtgcagtgcctccagaagcctatgctatttggcgacaggttttacactttcatctgcagcgtgtgcagttcaggcccagaatatctgaaaaggctgcccctccagtgggtggacatcgctcacttatgcctgtacaacctgagcgtgatccacaagaaaaagtactttgattctgagctggagctaatgacatatatcaacgaaaattgggatcgcttgcatcctggcgagctcgctgacacccctaaaagtgagcggtatgaacacgtgctcgaggccctcaatgactataaaaccatgtttatgtctggaaaggagattaagaaaaaaaaacatcttttcggtctgcgcatccgtgtaccccctgtgcctccgaatgtggcctttaaagccgagaaggagccagaggggacgtcacacgaatttaaaattaagggtcgcaaggcctctaaacctatctctgactcccgagaggtttcaaacggcattgagaagaaggggaagaagaaatctgtgggacggcccccagggccctacacaaggaaaatgatccagaagactgccgagcctctcttggataaggagtctatctcagaaaacccaactcttgacctcccttgttccatcggccgtactgagggtacagcccacagttcgaataccagcgacgtggatttcacaggggccagctcagcaaaggagaccacctcctcctcgatcagtcggcactacgggctatccgacagtcggaaacggaccagaacgggcaggagctggcctgcagccattcctcacttgcgcagaagacgagggaggttaccccggcgagccctccaaacccagaactcagagattgtcaaggacgacgaggggaaagaggactaccaatttgacgagttgaatacggagatccttaataatcttgccgatcaggaactgcagttgaatcacctgaaaaattccattacctcttactttggagcagcaggacgaattgcctgtggcgaaaaatacagggtccttgcaagacgtgtgacactggatggaaaggtgcagtacttagtggagtgggaaggcgctaccgcatcctag

SEQ ID NO: 124088 - DNA, 1611 bp, synthetic construct
  misc_feature 1..1611: note = Description of Artificial Sequence: Synthetic coding sequence
  source 1..1611: mol_type = other DNA
atgcgggattccacaggtgctggaaacagtctggtacacaagagatcccccctcaggcgtaaccaaaaaacccccactagccttaccaagctgagtcttcaggatggtcataaagctaagaagccagcttgcaaatttgaggaagggcaagacgttctggcgcggtggtctgacggactgttttacctgggcacaatcaagaaaatcaacatactaaaacaaagttgctttatcatttttgaggacagttcgaagtcctgggtgctctggaaagatatccagacgggcgcgacgggtagtggggaaatggtgtgtacaatctgtcaggaggaatactcagaggcacccaacgaaatggtaatctgcgataaatgcggacagggataccatcagctttgccacacgcctcacattgattgtagcgtgattgatagcgatgagaaatggctgtgccgccagtgcgtctttgccacaacaactaaacgcgggggcgccctcaaaaaaggtccgaatgctaaggccctccaggtcatgaaacagactttgccatatagtgtggccgacctggagtgggacgcaggacataaaaccaacgtgcaacagtgttactgctattgcggaggccccggggattggtacctgaagatgctgcagtgttgcaaatgcaagcagtggttccacgaggcctgcgtgcagtgtctccagaagcccatgttatttggagaccggttttatacatttatttgttcagtgtgtagctcggggcccgagtatctgaagcgattgcctctgcaatgggtggacattgcccatctgtgcctgtataacctcagtgtcattcataagaagaagtactttgattcagaactcgagctaatgacgtatatcaatgaaaactgggaccggctccatccaggcgagttggccgatacaccaaaaagcgagagatacgaacacgtcctcgaggcactcaatgattacaagacaatggaagtctcgaatggaattgaaaagaaagggaagaagaaaagcgttggccgtcctccaggaccctatacccgcaagatgatccagaaaaccgccgagccgctgctggacaaagagagcattagtgaaaaccctacgttggatttgccttgttccatcgggcgtaccgagggtaccgcgcacagctccaacacttcagacgttgatttcactggtgcatctagcgccaaggaaactacaagctcttctattagcagacactacggtctaagcgacagcagaaagaggacacggacaggccggtcatggccagccgccattcctcacttacgccgaaggaggggaagactgccccgtcgcgccctgcagactcaaaattctgaaatcgtgaaagatgacgaggggaaagaagattaccagttcgatgaactgaacactgaaatcctaaacaatctggccgatcaggagctgcagctgaatcatctgaaaaattccattactagttatttcggcgctgccggccgcatagcatgtggagagaagtaccgcgtactggctaggcgagtgacactggacggtaaggtgcagtacttagtggagtgggagggtgcaactgcttcatag

SEQ ID NO: 124089 - DNA, 861 bp, synthetic construct
  misc_feature 1..861: note = Description of Artificial Sequence: Synthetic coding sequence
  source 1..861: mol_type = other DNA
atggtttgcaccatttgtcaagaggagtacagcgaagcaccaaatgagatggtaatttgcgataagtgcggccaagggtaccatcaactgtgtcatacgccccatattgattgctctgttatagacagtgacgagaagtggctctgtcgccagtgcgttttcgcgactacgaccaagagaggtggagcactcaaaaaaggacccaacgccaaagctttgcaagtcatgaagcaaaccctcccatactctgtggccgacctcgagtgggacgccggacacaaaaccaacgtgcagcaatgctattgttactgtggtggccccggagactggtacctcaagatgttacaatgctgcaaatgtaaacagtggttccacgaggcatgtgtgcagtgcttacaaaagccaatgttgttcggtgaccgtttttatacattcatatgttccgtctgttcatccgggcctgaatacctgaagaggctcccattgcaatgggtggatatcgctcacctgtgcctgtacaatctgtccgtgatacacaaaaagaaatactttgatagcgagctggagctgatgacctatattaacgagaattgggaccgtctgcatcctggtgagctggcagatacccctaaaagtgaaagatatgagcacgtgcttgaggccctcaatgactataaaaccatgtttatgtctgggaaagagatcaaaaaaaaaaaacatctgtttggtctgcggattcgggtaccaccggttccgccaaacgttgcattcaaagccgagaaagagccagagggcacgtctcacgaattcaagctgaaagcagagcggcacccaaacctgtacctcatccaaggaaaatag

SEQ ID NO: 124090 - DNA, 1476 bp, synthetic construct
  misc_feature 1..1476: note = Description of Artificial Sequence: Synthetic coding sequence
  source 1..1476: mol_type = other DNA
atggtctgcaccatttgccaagaggagtattctgaagctcctaatgaaatggtcatttgcgacaaatgtggccaggggtatcaccagctatgccataccccacatatcgattgctctgtgatcgactccgatgagaagtggctgtgtcgacagtgcgtcttcgctacgactaccaagcgaggcggcgcgctgaagaagggtcccaacgccaaggccctccaggtgatgaaacaaaccttgccatattccgttgcagatctagagtgggacgctggccacaagactaacgtgcagcagtgctactgctactgtggcggccccggtgactggtacctgaaaatgctccagtgctgcaagtgcaagcagtggtttcacgaggcatgcgttcagtgtttgcaaaagcctatgctgttcggtgataggttctacacatttatttgctcagtttgttctagtggccctgagtatttaaagcggctgcccctgcagtgggtggatatcgcccatctctgtctgtacaacttaagtgtgattcacaagaagaagtactttgatagcgagctggagcttatgacatacataaatgagaactgggaccgtctgcacccgggcgagctcgccgatactcctaagagtgagcgatatgaacacgtcctggaagccctgaacgactacaagactatgtttatgtccggaaaagagataaaaaagaaaaaacatctgttcggactgagaattcgggtgccacccgtaccccccaatgttgcttttaaagccgagaaggagcccgagggcacctcacacgaatttaaaatcaagggccgcaaggctagtaaacccattagcgattcccgcgaggtctccaatggcatcgaaaagaaaggtaaaaagaaatccgtgggcagaccacctgggccatacacacgaaagatgatacagaagacagccgagccacttctggataaagagtccatctcagagaatcccactttggatctgccttgttccattggtcgcacagagggtactgcgcactctagcaacacatctgacgtagattttaccggagccagtagcgccaaggagactactagcagcagcatttcacggcactacggcctcagcgacagccgaaagagaacgaggactgggcgatcttggcctgcagcaatacctcacctcagacgccgccgcggcaggctgcctaggagggctttgcaaacccaaaacagcgaaattgtgaaggacgatgaaggtaaggaagattatcagtttgatgagctcaacaccgagattctgaataacctggccgatcaagagctccagctaaatcacttaaagaattccataaccagttattttggtgcggcgggacggatcgcatgcggtgagaaatatcgggttctggcacgcagagtgactcttgacggaaaagtccagtatctggtggaatgggagggagcgacggcaagctag

SEQ ID NO: 124091 - DNA, 1476 bp, synthetic construct
  misc_feature 1..1476: note = Description of Artificial Sequence: Synthetic coding sequence
  source 1..1476: mol_type = other DNA
atggtatgcaccatttgtcaagaagaatattctgaggcacccaacgagatggtgatctgtgataaatgtgggcagggatatcaccaactgtgtcatacccctcacattgattgttctgtcattgatagtgacgaaaaatggctttgtagacagtgtgtgttcgccacaacaaccaaacgaggcggcgcattaaagaagggacccaatgctaaagccttgcaggtcatgaaacagacactaccctatagcgtggcagatctggagtgggacgcgggccataagacaaatgtgcagcagtgttactgctattgcggcggccccggggattggtacctcaagatgctgcagtgttgtaaatgcaagcagtggttccatgaggcttgcgtgcagtgcctgcagaagccaatgctgttcggcgaccgcttttacaccttcatatgcagtgtctgttcatcagggccagagtatctaaagcggctccccttgcaatgggtcgatattgcccacctgtgcctgtacaatctttctgtcattcacaagaagaagtatttcgactccgagttggaactcatgacatatatcaacgagaattgggaccggctgcaccctggtgagctggcagacacaccaaagtcagagcggtacgaacacgtgcttgaggcactcaatgactataaaacaatgtttatgtccggtaaggagataaaaaagaaaaagcacctcttcggtctgcgaattagggtgcccccagtccctcccaatgtggcattcaaagcggagaaggagcccgaagggacctcccatgaatttaagattaagggaagaaaggccagtaagccaatttctgatagccgggaggtgtcaaatggcatagagaagaagggcaagaagaagagcgtgggacgcccaccaggaccttatacacgaaaaatgatccaaaaaaccgctgaacccctgctggacaaggagtcaattagtgagaaccccaccttagacctgccttgctcaatcggcagaaccgaaggaaccgcccattcatcaaatacatccgatgtggactttacgggcgcgagttctgctaaggaaaccaccagttcctcgattagtagacattacggactcagcgattcccgaaagagaacccgcaccggccgaagctggcctgccgcgattccacatctacgccgtcgccgcggccggctgcccagaagggctcttcagacacagaactctgagatcgtcaaagatgacgaaggcaaagaggactaccaatttgatgagctgaataccgaaatcttgaacaatcttgctgaccaagagctgcagcttaaccatctgaagaattccattactagctacttcggcgctgcagggcgtatagcctgcggggagaagtatcgcgtgctcgcacgtagagttactcttgatggcaaggtccagtacttagtggagtgggagggagcaacagcaagctag

SEQ ID NO: 124092 - DNA, 1191 bp, synthetic construct
  misc_feature 1..1191: note = Description of Artificial Sequence: Synthetic coding sequence
  source 1..1191: mol_type = other DNA
atggcgatgatcgaattgggatttggacggcagaatttccatcccctaaaacgcaaatctagcctgctgctgaagctcatagctgtggtgttcgcagtgctgcttttttgcgagtttttgatttattacctcgctattttccagtgcaattggcccgaggtcaaaaccaccgctagcgatggtgagcagactacccgggaaccagtgttgaaagcaatgttcctagcagatacgcacctgcttggtgagtttttagggcattggttagacaaactgagacgagagtggcagatggaaagagctttccagactgccttgtggctactccagccagaggtggtgtttatcctaggtgacatcttcgatgaaggtaaatggtccacaccggaggcatgggccgatgacgtagaaaggtttcagaagatgttcagacacccatcccatgttcagctgaaggtcgtagccgggaaccacgatataggattccactatgaaatgaacacatataaagtggagagatttgagaaagttttctccagcgagaggctgtttagctggaagggcatcaatttcgtgatggttaacagtgtggctttaaatggggatggatgtgggatttgcagcgagaccgaggcagagctaatagaagtgagccatcgtctgaattgtagccgcgaagcacgtggatcctcccgatgtggcccgggtccactccttcccactagtgccccagtactcttacagcactaccctctgtaccgtaggtctgacgcgaattgcagtggcgaagatgcggccccagccgaggaaagggacatcccatttaaggagaactacgatgtcttgagccgggaggccagtcagaagctcctctggtggctgcagccccggctggttctctccgggcatactcacagtgcttgcgaagtgcatcacgggggccgtgtaccagaattaagtgtgcccagtttctcttggcgcaacagaaacaaccctagtttcatcatgggatccatcaccccgaccgactacaccctcagtaaatgttacctgcccagggaagacgttgtcctgataatttactgcggggtggtgggttttttggtcgtgttgacattgacccatttcggattgttagccagtccttttctgtccggcctcaatctgctagggaagcgcaaaactaggtag

SEQ ID NO: 124093 - DNA, 1002 bp, synthetic construct
  misc_feature 1..1002: note = Description of Artificial Sequence: Synthetic coding sequence
  source 1..1002: mol_type = other DNA
atggccatgatcgaactgggatttggcagacagaatttccacccacttaagcgtaaatctagcctgctgctgaagctgattgctgtggtctttgctgtcctgctgttttgcgagtttctcatttattatctcgcaatattccagtgtaactggccagaagttaagacaaccgcctctgatggcgaacaaactactagggagcccgttctgaaagccatgttcctcgccgacacccacctgcttggtgaattcctgggacactggctagataagctgagaagagagtggcagatggagcgggcattccagacagcactgtggctgttacagcctgaggtggtgttcatcttgggagacatcttcgacgagggcaagtggtccacacccgaagcgtgggcggatgacgtagagcgcttccagaaaatgttccggcatccatcccatgttcagctcaaggtggtggccgggaaccacgatatcggcttccattacgagatgaatacatataaggtggaaagattcgaaaaggtgttctcctcggagagactcttcagctggaagggtattaattttgtaatggttaactctgtggcactgaatggggatggatgcggcatatgctctgaaacggaggctgaactgattgaggtaagccaccggctcaattgcagccgcgaattactctggtggctgcagcctagactggtcctgagcggccatacccactccgcttgcgaagttcaccacggcgggagagtgcctgagctgagtgttccttcatttagttggagaaacagaaataatcccagtttcataatgggcagcatcactcccacagattataccctgtctaaatgttatttaccccgggaagatgttgtgcttatcatatattgtggagtcgtgggtttcctggtggtgctgaccttgacacatttcggactgctcgcctctcccttcctgagcggactgaatctgctcggcaagcggaagacccggtag

SEQ ID NO: 124094 - DNA, 732 bp, synthetic construct
  misc_feature 1..732: note = Description of Artificial Sequence: Synthetic coding sequence
  source 1..732: mol_type = other DNA
atggagagggccttccagacagctctgtggctcttgcagccggaggtggtgtttattctcggcgacattttcgacgaggggaaatggagtacgcctgaggcctgggctgatgacgtagagagattccagaagatgttcagacatccttctcacgtccagctaaaggttgttgcggggaaccatgatattgggtttcattatgagatgaacacatataaggtggaacgcttcgagaaggtatttagcagcgagcggttattcagttggaaagggatcaattttgttatggtgaatagtgtggcccttaacggagacggatgtggaatctgttccgaaactgaggccgaacttatcgaggtgtcccacaggcttaattgtagtcgggaggccagaggaagcagtcgctgcggaccaggacccctgctcccaacctccgcgcccgtgcttttgcagcactatccattgtacaggagaagcgacgcaaactgctccggcgaagatgcagctccagcagaggaacgtgacatcccattcaaggaaaattatgacgtgctgtccagagaggcatcccagaaactactctggtggctccagccgagactggtgctctctggtcatacacattctgcatgtgaagtgcatcacggtgggagggtgcctgagctgtcagttccaagcttcagctggaggaaccggaacaaccccagcttcatcatgggtactgatgcttag

SEQ ID NO: 124095 - DNA, 1194 bp, synthetic construct
  misc_feature 1..1194: note = Description of Artificial Sequence: Synthetic coding sequence
  source 1..1194: mol_type = other DNA
atggctatgatcgaattgggtttcggtagacagaacttccatcctctgaaacgcaagtcctcactcctgctgaaactgattgccgtggtgttcgctgtgctgctgttttgcgaattcctgatttattatctcgctattttccaatgcaattggcccgaggttaaaacgaccgccagcgatggcgaacagaccacaagggagcctgtgctcaaggcaatgttcctggccgatacgcaccttcttggcgagttcctggggcactggctggataagcttcggagggagtggcagatggagagagcctttcagacggcattgtggcttctgcagccggaggtggtgttcattctgggagatatctttgatgagggcaagtggtccactccggaagcgtgggctgacgatgtcgagcggttccagaaaatgtttaggcatccctcccacgtgcagctgaaagtggtggcagggaaccatgacattgggttccattacgaaatgaacacctataaagttgagaggtttgagaaagtcttttcttccgagagactctttagctggaaaggtattaattttgtgatggtcaactctgtggcactgaatggagatggatgcggtatctgttcagagaccgaagctgagctgatcgaagtgagtcataggcttaactgtagcagagagcaggctcggggaagcagccgatgtggccccggtcccctgttaccaacaagtgccccagtattgttgcaacactatccattgtatagaagatcagacgccaattgcagcggagaagatgctgccccggccgaagaacgcgacatcccctttaaagaaaattacgacgtgctcagtcgggaggcgtcccagaaactgttgtggtggttgcagccacgcctggtcctttcgggccatacccactcagcatgcgaagtacatcacggcggccgtgtgcccgaattgagcgtacccagcttctcctggcgcaatagaaataacccttccttcattatgggctccataaccccgaccgattataccctgtccaaatgctatctcccccgcgaggacgttgtgctaataatttactgcggtgtggtgggatttttggtcgtgttaaccctcactcattttgggctactggcctcgcccttcttgagtggactgaacttgttgggtaagaggaagacaagatag

SEQ ID NO: 124096 - DNA, 1026 bp, synthetic construct
  misc_feature 1..1026: note = Description of Artificial Sequence: Synthetic coding sequence
  source 1..1026: mol_type = other DNA
atggccatgattgaacttggctttggtagacagaacttccacccactcaaaaggaaaagtagtctgctgttaaaactgatagccgtcgtgtttgccgtgctcttgttctgtgagttcctgatctattacctagcaatctttcaatgtaactggccagaggtcaagactactgcctctgacggcgaacagaccactcgagagcccgtgctcaaagcaatgtttttagccgatacacacctgctgggggaattccttggtcactggcttgacaagctgcgccgcgagtggcagatggaacgcgcctttcagactgctctgtggctccttcagcctgaagttgtgtttatcctgggcgatatattcgatgagggcaagtggtctacgcccgaggcttgggccgacgacgtcgagagatttcagaagatgtttcggcatccttcacacgtccaactgaaggtcgtcgctggcaaccatgatataggcttccactatgaaatgaacacctataaagtggagaggttcgaaaaagtgttttcaagtgagaggctgttctcctggaaaggcatcaacttcgtcatggtgaacagcgtggctctcaatggcgatggttgcggaatctgttccgaaaccgaggccgaactcatcgaggtatcacatcgtctgaactgctctagagaacaggctcggggttcgagcaggtgcggcccgggaccgctgctgcctactagcgcccccgtcctgttacagcactaccctttatatagacgatcagacgccaattgctctggcgaggatgccgcacccgcagaagagagggacataccatttaaagagaattatgatgtgctgagccgggaagcttcacagaagttactgtggtggctgcagccacggcttgtgttgtctggccacacccactccgcctgtgaggtgcatcacggcggaagggtgcctgaactatccgttcctagcttctcatggcggaaccgaaacaatcctagctttattatgggcaccgacgcgtag

SEQ ID NO: 124097 - DNA, 1191 bp, synthetic construct
  misc_feature 1..1191: note = Description of Artificial Sequence: Synthetic coding sequence
  source 1..1191: mol_type = other DNA
atggcaatgatagagctgggtttcgggcggcagaattttcatcctctgaagaggaagtcatccctcctgctcaagcttatcgcagtggtctttgccgtactgctcttctgcgaattcttaatctactacttggccatcttccaatgcaattggcccgaggtcaagaccactgcttccgacggggagcaaacgaccagggaacccgtcttaaaagccatgttcttggccgacactcatctcctgggcgagtttttgggacactggcttgacaaacttcgcagggagtggcaaatggagagagccttccagacagctctgtggctgttgcagcccgaggtggtgtttattctgggggatatctttgatgaaggaaagtggtcaacacctgaggcctgggctgacgatgtagaaagattccagaaaatgtttcgccatcccagccatgtgcagctgaaggtggttgctggcaatcatgacatcggattccattatgaaatgaacacctacaaggtggagaggttcgagaaggtgttctcttcggagcgattattctcgtggaagggcataaacttcgtcatggttaatagtgtggctctcaatggcgacggttgtgggatatgtagtgagacagaagcggagctgattgaagtcagtcaccgattgaattgcagtcgcgaggcacgaggtagctcccgctgcggccctggccctttactacccacctccgctcctgtcctcctgcaacattaccccctgtacagacggagcgatgcgaactgtagcggtgaagacgctgcccccgctgaggagagagatatcccatttaaggagaactacgacgttctgtcaagggaagctagccagaagctgctgtggtggctgcagccaaggcttgtgttaagcgggcacacgcactctgcatgtgaagttcaccacggcggacgggtccctgaactgtccgttccctctttttcttggagaaaccggaataatccaagttttatcatggggagcattactccgacagattataccctgtccaaatgttacttaccccgtgaggacgtcgttctgatcatttattgtggcgtagtgggatttcttgttgtgctaacattgacacacttcgggcttttagcctctcccttcctttcgggcttaaacttgctgggcaaacgaaagactcgctag

SEQ ID NO: 124098 - DNA, 360 bp, synthetic construct
  misc_feature 1..360: note = Description of Artificial Sequence: Synthetic coding sequence
  source 1..360: mol_type = other DNA
atgtggcgatcaaggtgggacgcctcagttctgaaagccgaggccttggctctgctcccctgcggactaggcatggcattctctcagagccacgtgatggccgcaaggcggcaccagcatagtaggcttataattgaggtagatgaatactcctctaatccgactcaggccttcacgttttacaatatcaaccaagggaggttccagccccctcatgtgcagatggttgatcccgttccgcatgacgcccccaagccccccggctacacccgttttgtgtgtgtgtccgacacacacagcaggaccgacccaattcagatgccatacggggacgtcctgatccatgccggcgatttttag

SEQ ID NO: 124099 - DNA, 663 bp, synthetic construct
  misc_feature 1..663: note = Description of Artificial Sequence: Synthetic coding sequence
  source 1..663: mol_type = other DNA
atgccatacggggacgttcttatccacgctggcgattttacggaactcgggctgccttcagaagtgaagaagttcaatgagtggctgggatctctgccttacgaatacaaaattgtgatcgccggtaatcacgaactaacatttgaccaggaattcatggccgacttgatcaaacaggatttttattactttccgagtgtgagcaagctgaagcctgaaaactatgagaacgtccagagcctcctgacgaactgcatatacctgcaagattcagaggtgactgtgcgtggctttcgcatctacggctctccctggcagccatggttttatggctgggggttcaacctccctcgtgggcaggccctcctagagaagtggaatctaattccggagggagttgatatattgatcactcacggcccccctttgggcttcctggactgggtgccgaagaaaatgcagagagtggggtgcgtggaactcctgaacactgtgcagaggcgggtgcaaccacgtttgcacgtgtttgggcacatccacgaaggctacggagtcatggccgatggaaccactacgtacgtcaatgcctccgtgtgcacagtgaattaccagcctgtgaaccctcctattgtgattgacctcccaaccccacgcaacagttag

SEQ ID NO: 124100 - DNA, 981 bp, synthetic construct
  misc_feature 1..981: note = Description of Artificial Sequence: Synthetic coding sequence
  source 1..981: mol_type = other DNA
atgtggcgctcccgctgggacgcctcagttctgaaagcggaggcactagccctacttccttgtggcctgggcatggcgttcagtcagtcccacgtgatggcagcccgtcgccatcagcactcgcgactgattattgaggttgacgagtacagtagtaacccaacccaggccttcacattttacaatatcaaccaaggcagatttcagccacctcacgtgcaaatggtggacccagttccacatgacgcccccaagcctccgggctatacacgcttcgtctgtgtctctgatacccactccagaacagaccccatacagatgccgtatggagatgtgctcatccatgctggggattttacggagctgggccttccatcagaggtgaagaaatttaacgagtggttaggttctctcccttacgagtacaaaatcgtgattgctggaaaccatgagcttacatttgatcaggaattcatggccgatctcattaaacaagatttttattatttcccaagcgtcagcaagctcaagcctgaaaattacgaaaacgtgcagagtctgctgaccaattgcatatatctccaggactcggaagtgacagtgcgcggattcaggatatatggaagcccgtggcaaccatggttctatggatggggatttaatctgccccgtgggcaggcactgctggaaaagtggaatctgatccctgagggagtggacatactcatcactcatggtccgcccctcgggtttttagactgggtccccaaaaagatgcagcgggtcggctgcgtcgaactgctgaatactgtgcagaggagggtccagccacggcttcacgtttttggacacattcatgagggatatggtgttatggcagacggcactactacatacgtcaacgcttctgtgtgtacagtgaactaccagcctgtgaaccccccgatagtaattgaccttccaaccccaaggaactcttag

SEQ ID NO: 124101 - DNA, 507 bp, synthetic construct
  misc_feature 1..507: note = Description of Artificial Sequence: Synthetic coding sequence
  source 1..507: mol_type = other DNA
atggccgacttaatcaaacaggacttttattacttccccagtgttagtaagctcaagccggagaactacgaaaatgtacagtctctactgaccaattgtatttacttgcaggatagcgaagtaacggtgcgaggcttccggatatacgggtcaccatggcagccctggttttacgggtggggattcaatctccctagaggacaggctctgttagagaagtggaacctcattcccgaaggggtcgatatccttatcacccacggaccccccctaggttttttagactgggtacctaaaaaaatgcagcgcgtgggctgcgttgagctgcttaatacagtgcagcgtcgagttcagccccgactgcacgtgttcgggcatatccatgagggctatggcgtgatggcggacgggactacaacttatgtcaatgcctcagtctgtacagtgaattatcagcctgtgaaccctcccatcgtgatagatcttcccactccaaggaatagctag

SEQ ID NO: 124102 - DNA, 981 bp, synthetic construct
  misc_feature 1..981: note = Description of Artificial Sequence: Synthetic coding sequence
  source 1..981: mol_type = other DNA
atgtggcgttcaagatgggacgcctctgtgttgaaagccgaggccctggctctactaccttgtgggctgggaatggccttcagccaaagtcacgtaatggcggctagaagacatcaacattctaggctgatcattgaggtcgacgagtatagttccaatcccacacaagctttcaccttttataatattaatcaggggaggttccagccaccgcacgtccagatggttgatcccgttcctcacgatgctcccaaaccccccggctatactcggtttgtgtgcgtctcagatacgcatagcaggaccgatcctatccaaatgccctatggagacgtgcttatccacgccggcgacttcaccgagctcgggttgcccagtgaggtcaaaaagttcaatgaatggcttggaagcctcccctacgaatataagattgtgattgcaggcaatcatgagttgacatttgatcaagagtttatggccgacctgataaagcaggatttctactacttcccctcggtgtccaagttaaagcccgagaactacgagaacgtgcagagtctcctgaccaactgcatctacctgcaggatagcgaagtgaccgtccgcgggttcaggatctacggtagcccttggcagccatggttctatgggtggggcttcaacttgccccgagggcaagcactgctcgaaaaatggaacctgattcccgagggggtcgacatcctgattacccacggtcctccactcggatttctggattgggtgcccaagaaaatgcagcgagttgggtgtgtggagctgctcaataccgtccagaggagagtgcagccccggctgcacgtgttcggtcatattcatgaggggtatggggtgatggcagacggaaccacaacctatgttaacgcctccgtgtgtaccgtgaactatcagcctgtgaacccccctatcgtgatcgatcttcccaccccgagaaactcctag

SEQ ID NO: 124103 - DNA, 225 bp, synthetic construct
  misc_feature 1..225: note = Description of Artificial Sequence: Synthetic coding sequence
  source 1..225: mol_type = other DNA
atgtggcgatcccgttgggacgcttcagtgctaaaagccgaggccctggcgctcctcccctgtggccttggcatggccttcagtcagtctcacgtaatggccgctaggcggcaccagcattctagactgatcatcgaggtggacgaatattcctcaaatccaactcaggcattcactttctataacattaaccagggaaggttccagcccccgcacgtgcagtag

SEQ ID NO: 124104 - DNA, 1080 bp, synthetic construct
  misc_feature 1..1080: note = Description of Artificial Sequence: Synthetic coding sequence
  source 1..1080: mol_type = other DNA
atgaatggtagagagacacagagtgtcagtcgaagcggaggaggccctggctgtggcggaggttctggcggacggtgtagaggaggtcgaagacggagtatgtggaggagcaggtgggacgccagcgtgctgaaagcagaggccctagctctgctcccctgtggcctcggaatggccttttcccagtctcacgtgatggcggcccgcaggcaccagcacagccggctcataatcgaagtggatgaatattctagtaatccaactcaagccttcactttttataatatcaaccagggacgcttccagcctccccacgtgcaaatggtggatcctgttccgcacgatgctccaaagccacccggctatacacggttcgtttgtgtatcagacacccactcgagaactgaccctatccagatgccatacggggacgttttgattcacgccggggatttcactgaactgggactgccctccgaggtcaaaaagttcaacgagtggttgggatctcttccatatgaatacaagatcgtgatagcaggtaaccacgagttgaccttcgaccaggagtttatggctgaccttatcaagcaggatttctattattttccctctgtgtctaagttgaagcctgaaaactacgagaacgtgcagagtcttcttactaattgtatatacctccaggactctgaggtcaccgttcgcggctttcggatctatggcagtccatggcagccatggttttacgggtggggttttaacttaccacgaggacaggctctgctggagaaatggaatcttattcccgaaggtgtagacatacttattacccacggtcctccattagggtttctggattgggtcccaaaaaaaatgcagagggtcgggtgcgtagagcttctgaatacagtccaacggcgggtgcagccacgactgcacgtgtttggacacatccacgagggatacggagtcatggcggacggcaccactacctacgtgaacgcgtccgtttgtaccgtgaattaccagcccgttaacccgccgatagtgattgacttgcccacccccagaaacagctag

SEQ ID NO: 124105 - DNA, 981 bp, synthetic construct
  misc_feature 1..981: note = Description of Artificial Sequence: Synthetic coding sequence
  source 1..981: mol_type = other DNA
atgtggagaagcaggtgggacgctagcgttctgaaggctgaagctctggccctgctgccgtgcggactgggtatggccttttcccaatctcatgtgatggcggctcgccggcatcagcactctagacttattatcgaagtcgacgagtatagttccaatcccacccaggcattcaccttctacaacataaatcaaggacgcttccagcctccacatgtgcagatggtagatccggtgcctcacgatgctcccaaaccaccaggttacaccaggttcgtgtgtgtgagtgacacgcatagtagaactgatcctattcagatgccatacggcgacgtactcattcacgctggagattttacagagttaggactgccctctgaagtgaagaaatttaacgaatggctgggatcattgccctacgagtacaaaattgtgattgcgggcaaccacgaattgacctttgatcaggagtttatggccgacttaatcaaacaagacttctattacttccctagcgtgagcaaacttaagccagaaaactacgagaatgtgcaaagcctgctgacaaattgtatctacctgcaagacagtgaggtgacggtgagggggtttcgcatatacgggagcccctggcagccttggttctatggttggggattcaacctacctcgaggccaggctctactggaaaagtggaacctaattcctgaaggggtggacatcctgattacacatggaccgcctctcggctttctggactgggtgcccaagaaaatgcagagagtcggatgtgtcgaattgctcaacaccgtgcagagacgggtacaaccccggctccacgtgtttggccacatacacgagggatacggtgtaatggcagatgggaccaccacatacgtgaatgccagtgtctgtactgttaattatcagccggttaacccccccatcgtcatcgatctgccaacaccacgtaattcctag

SEQ ID NO: 124106 - DNA, 915 bp, synthetic construct
  misc_feature 1..915: note = Description of Artificial Sequence: Synthetic coding sequence
  source 1..915: mol_type = other DNA
atgtggcgcagcttctctcaatctcatgtgatggccgctagacgccaccagcattctagactaatcattgaagtcgatgagtattcatcaaaccctacccaggccttcactttttacaatattaatcagggccgtttccagccgccacatgtgcagatggtggaccctgtgcctcatgacgcccccaagccccccggctacacacgcttcgtctgcgtttcagacacacatagcaggactgaccccatccaaatgccgtacggagacgtcctaattcatgccggcgatttcactgaacttggcctgccatccgaagtgaagaaattcaacgagtggctggggagtcttccctacgaatacaagatcgtcatcgccggaaatcatgaactcacattcgaccaagaattcatggccgatctgatcaagcaggacttctattattttccttcagtttctaagttgaaaccggagaattatgagaacgtgcagtccctgctgacgaattgtatctatcttcaggactctgaggtaacagtgagaggcttccgcatctacggctcaccatggcaaccctggttctatggctggggctttaacctgccacgaggccaggcactgctggaaaagtggaacctcattccagaaggggtcgacatactcattactcatgggcctcccctcgggtttctagactgggtgcctaagaaaatgcagcgagtcggctgtgtggagttgttaaacactgtccaacgacgtgttcagccccgcctgcacgtctttggacatatacacgagggttacggggtcatggctgatggaactacaacttatgtaaacgcttccgtatgcaccgtgaactatcagcccgtgaatccaccaattgtgattgatctgcctaccccccgaaactcatag

SEQ ID NO: 124107 - DNA, 885 bp, synthetic construct
  misc_feature 1..885: note = Description of Artificial Sequence: Synthetic coding sequence
  source 1..885: mol_type = other DNA
atggcccatggcatacccagtcaggggaaggtgacgatcactgtggatgagtactcttccaatccaacgcaggccttcacccactataacatcaatcagagtcgattccagcctccccatgtccatatggtggatcctattccctacgatacccccaaacccgctgggcacaccagatttgtctgcattagtgatacacactctagaactgatggcatacagatgccgtatggggatatattgttgcacactggagactttaccgaactgggtcttccttcagaagtgaaaaaatttaacgactggttgggtaatctgccatacgaatacaagattgtaatcgccggcaatcatgagctgaccttcgataaggaattcatggctgacctagtcaaacaggattactatcggttccctagcgtttcaaagctgaaaccagaggacttcgacaatgtgcaaagtctgctaacaaactccatttacctacaggactcagaggttaccgtcaagggtttccgcatttacggcgccccttggactccatggttcaacgggtggggctttaatcttcctaggggacagtcgcttcttgacaaatggaaccttatcccagagggcatcgatattctgatgacgcacggacctcccctgggcttccgagattgggtccctaaagagttgcagagggtgggctgcgtggagctactgaacacagtgcaacgacgggtgagacccaagctgcatgtgtttggcgggatccacgaggggtatggcatcatgaccgacggctacactacatatattaatgcctccacttgcacggtgtcctttcagccaacaaatcctcccataatcttcgacctgccgaatcctcagggtagctag

SEQ ID NO: 124108 - DNA, 834 bp, synthetic construct
  misc_feature 1..834: note = Description of Artificial Sequence: Synthetic coding sequence
  source 1..834: mol_type = other DNA
atggcgcacggaattccctcccaggggaaggtgacaatcacggttgatgagtatagctcaaatcccactcaggctttcacacattacaatattaatcagagcaggttccagcctccacacgtccacatggtcgaccccatcccctatgatacccccaagccggcaggacatacacgatttgtatgtattagcgacactcacagccgcacagacggaatccaaatgccttacggtgatatcctcctccataccggggacttcacagagctcggcttgccatcagaggtaaagaagttcaatgattggttaggcaacctgccttacgaatacaagattgtgatagccggcaatcatgagctcacctttgacaaggaatttatggccgacctggtgaagcaagattattatcgatttcctagcgtttcaaagctgaagcctgaagatttcgataatgtacagagcttgctgactaacagcatttatctgcaggattccgaggtcacagttaaggggtttagaatctacggagccccctggacaccgtggttcaacggatggggatttaatctacctcggggccagtcacttcttgataaatggaaccttatccccgagggcatcgacatcctgatgacgcacgggccacccctgggctttcgagattgggtgcctaaggaacttcagagagtcgggtgtgtcgagttgctgaatacagtccagcgtagagtgcgacctaaactccacgtattcggggggatccacgaagtaaaccccgtaagcatttctaaagcgctccgaaccaaaatttgcagcctgccttccaagacgtcatag

SEQ ID NO: 124109 - DNA, 132 bp, synthetic construct
  misc_feature 1..132: note = Description of Artificial Sequence: Synthetic coding sequence
  source 1..132: mol_type = other DNA
atggcacatgggattccatcgcaaggcaaggtgaccataactgtggacgaatactcttccaatcccactcaggctttcacgcattataacataaatcagtccaggttccaacctcctcacgtgcacatgtag

SEQ ID NO: 124110 - DNA, 186 bp, synthetic construct
  misc_feature 1..186: note = Description of Artificial Sequence: Synthetic coding sequence
  source 1..186: mol_type = other DNA
atggaccctaactgttcctgcgccaccggagggagctgtacctgcaccgggtcgtgcaaatgcaaggaatgcaaatgcacctcctgcaaaaagtcatgttgtagctgttgtcccatgtcttgcgcgaaatgtgcacaagggtgcatttgcaaaggcgcgagcgagaagtgttcttgttgcgcatag

SEQ ID NO: 124111 - DNA, 186 bp, synthetic construct
  misc_feature 1..186: note = Description of Artificial Sequence: Synthetic coding sequence
  source 1..186: mol_type = other DNA
atggatccaaactgcagttgcaccaccggtgggagctgcgcatgtgctgggagttgtaaatgcaaagaatgtaagtgtacctcctgtaagaagtgctgctgctcttgttgccccgtcggttgtgcgaagtgtgcccaagggtgcgtatgcaaaggtagcagtgagaagtgcaggtgctgtgcgtag

SEQ ID NO: 124112 - DNA, 186 bp, synthetic construct
  misc_feature 1..186: note = Description of Artificial Sequence: Synthetic coding sequence
  source 1..186: mol_type = other DNA
atggatcctaattgcagctgcgccactggtgggtcttgcacatgtgccggaagttgtaagtgtaaagagtgcaagtgtacatcatgtaagaagtcatgttgcagttgctgcccagtggggtgtgcaaaatgcgcacagggctgtgtttgcaagggtgcctccgaaaagtgctcctgctgtgcctag

SEQ ID NO: 124113 - DNA, 384 bp, synthetic construct
  misc_feature 1..384: note = Description of Artificial Sequence: Synthetic coding sequence
  source 1..384: mol_type = other DNA
atggatcctaactgctcctgcgccaccggcggatcctgcacttgcgcgggctcatgcaagtgcaaggaatgcaaatgtacaagttgcaagaagagtgagtgtggggccatctcgcggaacttgggactgtggctgcgtctagggggcaactcacgcctggccctctctgcgagcttttgggggacagggcttagcctgcctagcttgccggtgtctttccccctgcaggccttttgcccaaagttccggtggggccgcacggctttcttcagttgggacaccaaccccaactgtactccttacggctttcggactgaattgtgtcagactaaaaaaagtatcctctgggtgtgggttctgagctcttcccaggcttgctactag

SEQ ID NO: 124114 - DNA, 186 bp, synthetic construct
  misc_feature 1..186: note = Description of Artificial Sequence: Synthetic coding sequence
  source 1..186: mol_type = other DNA
atggaccccaattgtagctgtgccgctggtgtgtcctgtacctgtgccgggagttgcaagtgtaaagagtgtaagtgtacatcatgtaaaaaatcctgctgcagctgctgtccagtaggctgcagtaagtgtgcacagggctgtgtctgcaaaggggcctctgagaagtgttcctgttgtgactag

SEQ ID NO: 124115 - DNA, 189 bp, synthetic construct
  misc_feature 1..189: note = Description of Artificial Sequence: Synthetic coding sequence
  source 1..189: mol_type = other DNA
atggaccccaattgttcttgtgccgcagcaggcgtttcttgcacctgtgccggaagctgcaaatgcaaagagtgtaaatgcactagctgcaagaaaagttgctgcagctgttgccccgttggttgcagtaagtgcgctcagggatgtgtgtgtaaaggggcctccgagaagtgcagctgctgcgattag

SEQ ID NO: 124116 - DNA, 189 bp, synthetic construct
  misc_feature 1..189: note = Description of Artificial Sequence: Synthetic coding sequence
  source 1..189: mol_type = other DNA
atggaccctaactgttcttgcgcggcagctggcgtgagctgcacatgcgcgagttcctgcaagtgcaaagaatgcaagtgcacctcttgcaaaaaaagttgctgctcttgttgcccagtcggctgcgccaaatgcgcccaaggctgtatttgtaagggagcctccgagaagtgttcatgctgcgcctag

SEQ ID NO: 124117 - DNA, 186 bp, synthetic construct
  misc_feature 1..186: note = Description of Artificial Sequence: Synthetic coding sequence
  source 1..186: mol_type = other DNA
atggaccccaattgttcttgcgccgctggcgtgagttgcacctgtgcctcctcttgcaaatgtaaggaatgcaagtgtacctcctgcaagaaatcctgttgttcctgttgtcctgtagggtgcgccaagtgcgcacaggggtgcatttgcaagggcgctagcgaaaagtgtagctgttgcgcttag

SEQ ID NO: 124118 - DNA, 186 bp, synthetic construct
  misc_feature 1..186: note = Description of Artificial Sequence: Synthetic coding sequence
  source 1..186: mol_type = other DNA
atggatccaaattgtagctgtgaggccgggggatcatgtgcatgcgcagggtcatgtaaatgcaagaaatgcaaatgtaccagttgtaaaaagtcctgctgtagctgctgtcccttggggtgcgccaaatgtgcccaaggatgcatttgcaagggtgcatccgagaagtgctcatgttgcgcttag

SEQ ID NO: 124119 - DNA, 186 bp, synthetic construct
  misc_feature 1..186: note = Description of Artificial Sequence: Synthetic coding sequence
  source 1..186: mol_type = other DNA
atggaccccaattgttcatgttctcccgtaggcagctgcgcctgtgccggctcctgtaaatgcaaggaatgtaaatgtaccagctgtaagaagtcttgttgcagctgctgtccagttgggtgtgccaagtgtgctcaagggtgcatttgcaagggcacatcagacaaatgctcctgctgtgcctag

SEQ ID NO: 124120 - DNA, 186 bp, synthetic construct
  misc_feature 1..186: note = Description of Artificial Sequence: Synthetic coding sequence
  source 1..186: mol_type = other DNA
atggatcccaattgttcttgcgcagccggcgattcttgtacctgcgctggtagctgcaagtgcaaagaatgcaagtgtaccagttgcaaaaagtcctgctgctcctgttgtcccgtgggctgtgctaagtgcgctcaaggctgcatctgcaagggtgcctctgacaagtgctcttgctgcgcttag

SEQ ID NO: 124121 - DNA, 207 bp, synthetic construct
  misc_feature 1..207: note = Description of Artificial Sequence: Synthetic coding sequence
  source 1..207: mol_type = other DNA
atggatccagagacctgtccctgcccttccgggggatcatgcacctgtgccgacagttgtaaatgtgagggctgcaagtgtaccagctgcaaaaagtcctgctgttcatgctgcccagccgagtgcgagaagtgtgcgaaggactgtgtttgcaaaggtggcgaagcggctgaagcggaagccgaaaagtgtagttgctgtcaatag

SEQ ID NO: 124122 - DNA, 687 bp, synthetic construct
  misc_feature 1..687: note = Description of Artificial Sequence: Synthetic coding sequence
  source 1..687: mol_type = other DNA
atgaagatcaagcccggatttatggggaaagcgacaccaccatacgatgtgcagttccatatggaagcaagtgtagagaattgtataatagtctccatgaacacagcagatcctggaagccagggaattacgcattccctgctcctacaagtgattgacgataagggatctattctcccgccgaacaccgaaggaaatatcggaattagaataaagcccgtgcgtcctgtctctctatttatgtgctacgagggggaccccgagaagactgcaaaagtagaatgtggcgatttctacaataccggcgatagagggaagatggacgaggaggggtatatctgttttttgggacgctcagatgatattattaatgccagcggctatagaataggacccgccgaggtggagtcagccctggtggagcacccggctgtcgctgagagcgccgtcgtcggtagtcctgatcctatccgtggggaggtcgtcaaggccttcatagtgttgactccgcagttcctgtctcacgacaaggatcagctgacaaaagagctacagcaacatgtcaagtccgtgactgccccctacaagtacccccggaaagtggagttcgtatcggagcttccaaagactatcacagggaagattgaacgcaaggaactgcgcaagaaagaaaccggtcagatgtag

SEQ ID NO: 124123 - DNA, 1527 bp, synthetic construct
  misc_feature 1..1527: note = Description of Artificial Sequence: Synthetic coding sequence
  source 1..1527: mol_type = other DNA
atggaggaaggccccctccctggggggctaccgtcacccgaggacgctatggtgaccgagctgctgagtcctgaagggccatttgcctccgagaacattgggctgaaagctcctgtcaaatatgaggaagacgagttccatgtgtttaaagaagcctacttgggcccagccgaccctaaagagccagtgctacacgcatttaatccggctctgggtgcggattgtaagggtcaagttaaggcaaaactggccggcggagactccgatgggggggaactcctcggcgagtaccctggaatccctgagttatcagccctggaagatgttgccttgcttcaggcgccgcaacctcctgcctgtaacgttcactttctgagctcattgctccccgctcacagaagtcccgccgtgctacccttaggggcttgggtcctcgaaggcgccagccacccgggcgtacgcatgatccccgtggagataaaggaagcagggggtaccacaacctcaaacaacccagaggaagcaaccttacaaaatctcctagctcaggaaagctgctgcaagtttcccagcagccaggagctggaagatgccagctgctgctctctgaaaaaagatagcaatcctatggtcatttgccagctaaaggggggtactcagatgctgtgcattgataattccaggactcgagagttgaaggctctccacctcgtgcctcaatatcaggaccagaataattatctgcaaagtgatgtccccaaacctatgacagccttggtgggcagatttttgccagccagcacaaaactgaacctcataacccagcagctggagggagccctaccatctgtcgtgaatggcagtgcatttccctccgggtcaacccttcctggacctcccaagatcactctggccggctactgtgactgcttcgccagtggagatttctgtaataactgcaactgcaacaactgttgcaataatctacaccacgacatcgagaggtttaaagccattaaggcttgtctcgggaggaacccggaagcctttcagcccaagatcggtaagggacagttgggcaatgttaagccccagcataataagggatgtaactgtcgtaggagtggttgtttgaagaactactgtgaatgttatgaggcccagatcatgtgcagctccatctgcaagtgcatcggttgtaagaactacgaggagtctccagaacgaaaaacactgatgtcgatgccaaactatatgcagacgggaggcctcgaaggctcccactatctgccccctaccaaattttctggccttcccaggttcagccatgaccgtcggcctagcagttgtataagctgggaagtggtcgaagcaacctgcgcctgtctcctcgcccagggcgaagaggctgagaaggagcattgctctaagtgtttggctgagcagatgatcctggaagagtttgggcgctgtctgtcccagattcttcacaccgagttcaagagtaagggcttgaaaatggagtag

SEQ ID NO: 124124 - DNA, 756 bp, synthetic construct
  misc_feature 1..756: note = Description of Artificial Sequence: Synthetic coding sequence
  source 1..756: mol_type = other DNA
atggaagaggggccccttcctggaggtctgcccagtccagaggacgccatggtgactgagctgcttagccccgaaggtccattcgccagcgagaatatcggcctgaaagcccctgtcaaatacgaggaggatgagtttcatgtctttaaggaggcttacctaggaccagctgatcccaaagagccggtgcttcatgccttcaatcccgccctgggcgcagactgcaaaggtcaggtaaaggctaaactagcgggtggcgattcggacggtggcgagctcctaggggagtacccaggcattcccgaactctctgctttagaagacgttgcactgttgcaggcccctcagccacccgcctgtaacgtgcattttctgtcatcattactgcctgcacacagatctccagccgtcttaccactcggtgcttgggttctggaaggggcttcccatccgggcgtcagaatgattcccgtcgaaatcaaagaggcaggaggcacaacaacgagtaacaaccccgaagaggcgaccctacaaaacctcctagcacaggagagttgctgtaaatttccctcctctcaagagctggaagatgcgtcctgttgctcactgaagaaggattctaaccccatggtcatctgccagctgaaaggcggcacacaaatgctgtgtattgacaattccagaacaagagagctgaaggctcttcacctggtgcctcagtaccaagaccaaaacaactatctacaaagtgcttag

SEQ ID NO: 124125 - DNA, 921 bp, synthetic construct
  misc_feature 1..921: note = Description of Artificial Sequence: Synthetic coding sequence
  source 1..921: mol_type = other DNA
atggaggaaggtccactgcccgggggactgccaagccctgaggatgctatggttacagaactgctgtcccccgaggggccgtttgcgagtgaaaacatcggcctgaaggcacctgtcaaatatgaagaggatgaattccatgtttttaaggaggcttacctgggccctgcagacccaaaggagcccgtgcttcacgcatttaatccagcgctgggagctgactgtaaagggcaggtgaaggccaaactggcaggaggggacagcgatgggggggaactcttaggagagtaccctggcatccctgagctgtccgccctcgaggacgtcgctctgcttcaggcaccacagccgccagcatgtaatgtgcactttctgtcgtctctccttcccgcccacagatccccagcagtgctcccgctaggtgcatgggtgctggagggggctagccatcccggtgttcgcatgattccggtcgagatcaaagaggcgggcggcacaacaaccagtaacaatccagaggaagccacactgcagaatctactggctcaagagtcatgttgcaaattcccctccagccaggagctggaagacgccagttgttgctcgctaaagaaagactccaaccctatggtgatatgccagctgaagggaggcactcaaatgctgtgtatcgacaactcaagaacccgagagctgaaagcccttcatctagtccctcagtatcaggaccaaaataactatctgcagtctgatgtcccaaagccaatgactgcgctggtcgggagatttctgcccgctagcacaaagctaaacctgattacacagcagctcgagggagccctaccatctgtggtgaatgggtctgcctttccttctgggagtacacttccggggccccccaaaatcactctcgcggggtag

SEQ ID NO: 124126 - DNA, 2262 bp, synthetic construct
  misc_feature 1..2262: note = Description of Artificial Sequence: Synthetic coding sequence
  source 1..2262: mol_type = other DNA
atgggcgaacactcacccgacaacaacatcatttacttcgaggcagaagaagacgaactaacacctgatgacaagatgctgaggttcgtcgacaagaacggcctggtcccttcatcttccgggacagtgtacgaccgaacaactgttttaatcgaacaggaccccggtacattggaggatgaagatgacgatggtcagtgtggcgagcacctgccttttctagtaggcggggaagaaggattccacctcatcgaccatgaagctatgtctcaaggttacgtccagcatatcatctctcccgatcagatccaccttaccattaacccaggctccacaccaatgccgcgtaatatcgagggcgccacactgacgctccagagcgagtgccctgagacaaagcggaaggaagttaagcgataccagtgcacattcgagggctgccctagaacatactccaccgccggaaacctgaggactcaccaaaaaactcaccgaggtgaatatacttttgtttgtaatcaggaaggatgcggcaaggcattcttgacttcctacagcctaagaatccacgtgcgagttcacacaaaggagaaaccctttgagtgtgacgtgcaggggtgtgagaaggcctttaatacactgtaccgactcaaggcacatcagcgactccatacaggtaaaacttttaactgtgagagtgagggttgctccaaatattttacaaccctgtcagatctgaggaagcatatcaggacccacacaggagaaaaaccgtttcgttgcgaccacgacggatgcggcaaggctttcgctgctagtcaccacctgaagactcacgtcagaacgcacacaggcgagagaccattcttttgcccttctaatggctgtgagaaaaccttctctactcagtatagccttaagtcccatatgaaggggcacgacaacaaaggtcacagttataacgctttgcctcagcataacggttccgaggacaccaaccactcactgtgtctgtctgatcttagtcttctgtcaacagacagcgagctgcgagagaattcatctacgacccaaggccaggacttgtccaccatctctccagctattattttcgagtcaatgtttcagaattctgacgatacagccatccaggaggatccacagcaaaccgcatccctaaccgagagctttaacggtgacgctgagtccgtatcagacgtgcccccaagcaccggcaactccgcctctctgtccttgccgctggtgttgcagcccgggctgtccgagcctccccagcctctcctgcccgcctcggccccttctgcaccacctcctgcaccaagcttgggtcccgggtcgcagcaggctgctttcggcaaccctccggctctgttacaaccccccgaagtaccagtaccccactccacccagttcgccgctaatcaccaggagtttttaccacacccccaagctccgcagcccatcgttcctgggttgagcgtagtggcaggggcatcagcatccgctgccgccgtggcatccgccgtggctgccccagcccctcctcagagcacaactgagccactgcctgcgatggttcaaacattgccactcggggctaattctgttctgacaaataatcctaccatcactatcactccaacgcctaataccgctatattacaatctagcctggtgatgggagaacagaacctgcaatggatactaaatggagctacctccagtccgcagaatcaagaacaaatccagcaagcttccaaggtggagaaagtgttcttcaccactgccgtgcctgtggctagctcccctggctccagcgtccagcagattggactgagcgtgccagtgataatcatcaaacaggaggaagcctgccagtgccagtgcgcctgtcgcgacagcgccaaagagcgggcaagctcaagacgcaaaggctgctccagcccccctccacctgaacctagccctcaagctcctgatggacctagcctgcagctccctgctcaaacattttcctccgctcccgtaccagggtcgagttcctccacacttccaagcagttgtgagcagtcaaggcaggccgagaccccaagcgacccgcagacagagacactgtcagccatggatgtctccgagttcctgtccctgcagagtctggacaccccctctaacttgataccaatcgaagcgctccttcagggagaggaagaaatgggcttgacatcatcatttagcaagtag

SEQ ID NO: 124127 - DNA, 603 bp, synthetic construct
  misc_feature 1..603: note = Description of Artificial Sequence: Synthetic coding sequence
  source 1..603: mol_type = other DNA
aaacagagccaggtcaagaggtaccagtgtacattcgaagggtgccctcgcacatactctacagctgggaacttgcggacacaccaaaaaacccaccgcggagaatacacgtttgtatgcaaccaggagggctgtggaaaggcgtttttaactagctactctctacgtattcatgtgagagtacataccaaggaaaagccatttgagtgcgacgtgcaggggtgtgaaaaggcatttaacacgctctacaggctgaaggcccaccagcgtttacatactggcaagacttttaattgcgagtccgagggctgttcaaagtatttcaccaccctgtcggatctgaggaagcatatccggacacatacgggcgagaaaccatttagatgcgaccatgatggctgcggaaaggcctttgcggcatcccaccatctgaaaactcacgtgagaactcatactggtgagcgaccttttttttgtccgtccaatgggtgtgagaaaacttttagcactcagtactctttgaaatcacacatgaagggccatgacaacaagggccatagctataacgcgctcccgcagcacaacggatccgagtccacctag

SEQ ID NO: 124128 - DNA, 2559 bp, synthetic construct
  misc_feature 1..2559: note = Description of Artificial Sequence: Synthetic coding sequence
  source 1..2559: mol_type = other DNA
atgcttataaccgagcggaagcacttcagatccggccggattgcccagagtatgtcagaggcaaaccttatagatatggaggccggtaaactgtccaaatcctgcaacatcacagaatgccaagatcctgatcttctgcataattggcccgatgcatttaccctccggggcaacaacgcttcaaaggtggccaacccattttggaatcagctatctgcctccaatcccttcctcgacgatatcactcaattacggaacaacagaaagaggaacaatatctcaatcttgaaagaagacccttttctgttctgccgggagatcgagaacggaaattcttttgattcctcaggggatgagctggatgtgcatcagctcctccgtcaaacatctagcagaaatagtggacgcagtaagtcagtgagcgagttgctagacattctggacgatacagcccacgcacaccagtccatacacaatagtgaccagatactcctgcatgaccttgagtggttaaaaaatgacagggaagcctataaaatggcgtggctcagccagcgccagctagcccggtcatgtctggatctgaacacgatctcacaatctccggggtgggctcagacacagctggctgaggtgaccatagcttgcaaagtcaatcatcaaggtggatcagtgcagttaccggagtccgacataacagtgcatgtccctcaaggacacgtcgctgttggagagtttcaggaggtaagcctgagagccttcctcgatccacctcacatgttaaaccatgatttatcatgtactgtgtctccactcctggagatcatgctgggcaacttgaatactatggaggccttactcctggagatgaaaatcggtgcagaagtgagaaaagatcctttcagccaggtgatgactgagatggtttgtctgcatagtctaggtaaggaaggtccgtttaaagtgttgagcaattgttacatatacaaggacacaatacaagttaaattaatcgacctctcccaggtcatgtatttggtggttgctgcccaagctaaagctctgcccagtcccgcagctacaatttgggattatatccacaagacaacctctatcggaatctatgggcccaagtacatccacccctcctttactgtggtcttgacggtgtgtggccataattatatgcctggccagctgacaatcagcgacattaagaagggcggtaaaaacatatcacccgtggtcttccagttgtgggggaagcagtcatttctcctggataaacctcaagatctgtccatttccatattctcctgtgaccctgactttgaggttaagacagagggggagaggaaggagattaagcagaaacaactggaagctggggaggtagtacatcagcagtttctgttctctcttgtggagcatagagagatgcatctgtttgacttttgcgttcaagtagagcccccaaacggagagccagtcgctcagttttccatcacaacacccgatcctaccccaaacctgaaaagacttagcaacctcccagggtatctgcagaaaaaagaagaaatcaagtctgcccctctctccccaaagattcttgttaaatacccaaccttccaggataagaccctgaatttttcaaactatggtgttacactgaaagctgtgctacgtcagtcaaagatcgactacttcctggaatacttcaagggggacactatcgccttgctcggcgagggcaaagtcaaggcaattggccagtcaaaggtgaaggaatggtacgtgggagtgctacggggcaagattggactggttcactgcaaaaacgtgaaagtaataagcaaagagcaggtaatgttcatgtcagatagtgtctttacaacgcggaatctgctggagcagattgtgttgcctctgaagaaactaacctatatttattccgtcgtgttgacgctagtgtccgagaaggtatacgactggaaggtgttggcagatgtactgggctactctcacctctctctcgaggacttcgaccagattcaagccgataaggagagtgagaaggtgagctacgtcattaaaaagttgaaagaggactgccacaccgagaggaataccagaaaattcctctatgaacttattgtggctttgctcaaaatggattgccaggagctggtggcaaggctgatccaggaggctgccgtgctcacaagcgccgtcaaactgggtaagggttggagggagctagcagagaaactcgtgagactgaccaaacaacagatggaggcctacgaaatcccccaccggggtaacacaggggacgtggccgtggaaatgatgtggaaaccagcctatgacttcctttacacctggtcagcccattatgggaacaactatagggacgtcttgcaggacctacagagcgccctggatcgaatgaagaaccccgtgaccaagcattggagagaactgactggtgttctgattttggtgaacagtttagaagtcctgcgtgtgacggcattttcaacgagcgaggaggtctag

SEQ ID NO: 124129 - DNA, 2559 bp, synthetic construct
  misc_feature 1..2559: note = Description of Artificial Sequence: Synthetic coding sequence
  source 1..2559: mol_type = other DNA
atgctcattaccgagcgcaagcatttccgctccggtcgtatcgcccagtctatgagcgaggccaatttgattgatatggaggctggaaaactaagtaaaagttgtaacattacagagtgccaggaccccgatctgctccacaattggcctgacgccttcaccctcaggggcaataacgcaagtaaggtggctaatccgttctggaaccagctctcagccagtaacccattcctcgatgatattacccagttgagaaacaaccggaaaaggaataacatttcaattctcaaagaggacccgtttctgttttgtagagaaatcgagaacggcaactctttcgactcttcgggcgacgagttggacgtacatcagcttctccggcagacgtcttctcggaattccggccggtcaaagagtgtgtctgagctgctagatattctggacgacactgcacacgctcatcaatccatccacaattctgaccagatcctcctgcatgaccttgaatggttaaaaaacgaccgtgaggcctataaaatggcgtggctgagtcagaggcagttagcgcggtcttgtctcgacctgaacaccatctcacagagcccgggctgggcccagacacagctggcggaagttaccatcgcctgtaaggttaatcaccagggtggtagtgtgcaattgcctgagagcgacatcactgtacacgtgcctcagggccatgttgccgtgggcgagttccaggaggtatcccttagggcttttctcgaccccccccatatgctgaatcacgatctgtcatgcactgtctcccctttgttggaaatcatgcttggcaacctgaacaccatggaagctctgctactggaaatgaagattggtgctgaagtgaggaaggacccttttagccaggtgatgacagaaatggtctgcctccattccctgggtaaagaggggccattcaaggtgctaagcaactgttatatctacaaggataccatccaagtcaaattgatagacctgtcacaagtgatgtatctggtagtcgctgcccaagcaaaagcactgccatcccctgccgccactatctgggactatattcataagaccaccagtatagggatatatgggcccaagtatatccacccaagttttactgtagtgcttaccgtctgtgggcataattatatgcctgggcagctgaccatctctgacattaagaaaggaggaaaaaacatcagccccgtggtgttccagttgtgggggaagcaaagttttctgctggacaagcctcaggatttaagtattagcatctttagctgtgatcccgattttgaggtgaagactgaaggcgagaggaaggagatcaaacagaagcagctggaagccggagaagtggtgcaccagcagttcctctttagcttagtggagcatagagaaatgcacctttttgacttctgtgtacaggttgaacctcccaacggagagccagtcgcacagtttagcattacgactccagatcccacaccgaacctgaagcgtctctctaatcttccaggctatctgcagaaaaaagaggaaatcaagtcggccccgctgtcccctaagatcctagtcaagtacccgacttttcaggacaagaccctcaacttctccaactacggggtgacactaaaagctgtgctccgccagagtaagatcgactactttttagaatattttaagggggacacaattgccttattgggggaaggcaaagtaaaagctattgggcaatctaaggtgaaagaatggtatgtgggcgtgctgcggggcaagatcgggctagttcattgcaaaaacgtgaaggtcatctctaaggaacaagtaatgttcatgagcgacagcgtgtttacaacacgaaatctcctggaacaaattgtcctgcctctaaaaaaactcacatacatttacagcgtcgtgctgacactcgtatccgaaaaggtgtatgattggaaagtactcgccgatgtcttgggctatagtcaccttagtctggaagatttcgaccagattcaggccgataaggaatccgaaaaggtatcttacgtcatcaagaaattgaaagaggactgtcacaccgagagaaacacaagaaagttcctgtacgagctgattgtggccctgttgaaaatggattgtcaggaactggtggctaggctgattcaggaagcagcagtgttaacatcagccgttaaactgggaaaaggctggcgggagctcgccgagaagttagtgcgcctaacaaagcagcagatggaagcgtatgagattccgcatcgagggaacactggcgatgtggccgttgagatgatgtggaagccagcgtacgattttctctacacatggtcagctcattatggaaataactatagggatgtactacaggatctgcagtctgcactggatagaatgaagaacccagtgacaaagcattggagagaattaacaggggttcttattctagtgaatagtctggaggtcctccgtgttaccgccttctccacgtctgaggaggtatag

SEQ ID NO: 124130 - DNA, 1308 bp, synthetic construct
  misc_feature 1..1308: note = Description of Artificial Sequence: Synthetic coding sequence
  source 1..1308: mol_type = other DNA
atgctgctcggcggaccaccccgatcgcctcgatccggaacaagtccaaaaggaccgtggtccagcacaggacacgttcagttcggaaagtctccccaaacatggcctcggaggacccgtccgcgcagcccagagccagctgccccgtctggcgtgaggggcagtacttggacccgccggcgtgatacaccccggcgggcgggtcccactgcactgagccgctatgttgggcacttatggatgggaaggcggccccctagtcccgaagcacggggtcctgtacctcggtcatctgccgcttctagagccaggagatcattggcttccccaggcatcagcccaggtcctctgactgcaacgattggcggcgccgttgctggcggggggcctcgacagggacgcgccgaagcccataaggaagtgttccccgggcagagggtgggtaagatggctgctcccatggaactgttctgctggtccggcggatggggattaccaagtgtagaccttgatagtctggctgttctcacctacgctcggtttactggtgcaccactgaaggtgcataagattagcaacccgtggcagtccccatccggcacactccccgcactgagaacatctcacggagaagtgattagcgtccctcacaagattataacacacttaagaaaggaggtgcacaccttctggattgacactaaaaactacgtggaggtgacaagaaaatggtatgccgaggccatgcccttccctctgaacttcttcctgccaggccgtatgcaaaggcagtacatggaacgtctccagctcttgacaggggagcaccgcccagaagatgaggaggagcttgagaaagaactctatagggaggctcgtgagtgtctgaccctgttgtctcaacgactgggctcacagaagttttttttcggcgacgcacccgccagtctcgacgcatttgtgttcagctacctcgcgctcctgctccaggctaaactgccatcgggcaagctgcaggtccatctgagaggattgcataacttgtgtgcgtactgcacacatatcttaagcctctactttccttgggacggcgccgaggtcccacctcagcggcagactcctgctggtccggagacagaggaagaaccctatcgccgcagaaatcagattctatcagtgctggccggactcgccgccatggtaggttacgccctcttgtccgggatcgtgagcatccagcgcgccactcctgctcgggcaccagggactcgcactctggggatggcagaagaggacgaggaggaatag

SEQ ID NO: 124131 - DNA, 1401 bp, synthetic construct
  misc_feature 1..1401: note = Description of Artificial Sequence: Synthetic coding sequence
  source 1..1401: mol_type = other DNA
atgctgctcggtggtcctcccagatctcctcgctcgggaacgtctccaaagggcccgtggtcctccaccgggcacgtgcagttcggtaagtctcctcagacctggccccggcggaccaggccacgcagtccggaaccagccgctccctcaggcgtgaggggtagcacttggacgcgccgccgtgatacccccagacgggcaggcccgaccgctcttagcaggtacgtgggccacctctggatgggtaggcggcctccctcgcctgaggcccggggccccgtgccacgttcctccgcagcgtcgagggctagaaggtcactcgccagccctggaattagcccaggcccgctgaccgccaccattggaggagcagtagcagggggcggccccagacaggggcgggcggaagcccacaaggaggtgttccctgggcagcgcgtcggcaagatggccgcacctatggaactgttctgttggagtggcgggtgggggctccccagcgtggatctcgactcattagccgtcctgacatatgcccggttcacgggtgcccccctgaaggtccataagatttccaacccatggcagtcaccctctggaaccctgccagcattaaggacgtctcacggagaagtgataagtgtcccccacaaaatcattacacacttacggaaagaaaagtataacgcagactatgacctcagcgctagacagggagccgatacactggctttcatgtccctgctggaggaaaagctcctgccagtattagtgcatacgttttggatcgataccaagaactacgtcgaagtgaccagaaagtggtatgccgaggccatgccctttccactcaactttttcctgcctggccggatgcaacggcagtacatggaacgactgcagctgctcacgggggaacaccgcccagaagatgaggaggagctggaaaaggaactctacagggaggcccgagagtgcttaacactcctttcccagcggctagggtctcagaaattcttctttggcgacgcccccgcttcactggatgcattcgtgttttcatacctggctctgttattgcaggccaagctgccaagcggtaaactgcaggtgcatctccgaggcctgcataatttatgtgcatattgtacccatatactgtccctgtactttccgtgggacggggctgaggtgccccctcagagacagacacccgctggcccagagacagaggaggagccatataggcggagaaaccagatcctgagcgttctcgccggcctcgcagcaatggtcgggtacgcactgctgtcgggcattgtgtccatccagagagcaaccccagctcgggcccctgggactagaactcttgggatggccgaagaggatgaggaagaatag

SEQ ID NO: 124132 - DNA, 951 bp, synthetic construct
  misc_feature 1..951: note = Description of Artificial Sequence: Synthetic coding sequence
  source 1..951: mol_type = other DNA
taggagggaggacaagatggaggagctcatggtgcggtgctgctggttagagggctgggagccgcggtaagtgggcccggacagcctggaagagcagacctctgccagatctattggtgctctaccgagggcacacaggatcagcagccactggccgagcctttccggtatccagtgagcctgggtggcacgctccctgcgctaaggaccagccatggggaggtgatctccgtcccacacaaaattattacccatttacggaaagagaagtataacgctgactacgatttgtccgcccgacaaggagctgacaccctcgcctttatgagtcttttagaagagaagctgctgccggtcttggtgcataccttctggattgacaccaagaactacgtggaggttacccggaagtggtatgcagaagctatgcctttccctttgaacttctttctgcccgggcgcatgcagcgccagtacatggaacgactgcagttgctaacaggggaacatcgacctgaggatgaagaggaactggagaaggaactgtaccgagaggcacgggaatgcctgacactgttgtcccagagactcggatcacagaagttttttttcggcgatgcccccgcaagcttggacgcctttgtgttttcgtacctagccttgctgctccaggccaagttaccaagcgggaagctccaagtgcatctgcgaggactgcacaatctctgcgcctattgcacacacattctgagtctgtacttcccttgggacggtgccgaggtacctcctcagagacagactccagccgggccggagacagaagaggagccttatcgcaggcgtaatcaaattctctctgtgctggccgggcttgcagctatggtaggatatgcacttctgtccggaatagtctccatacagcgggccacaccagcaagggcgcctggctag

SEQ ID NO: 124133 - DNA, 1188 bp, synthetic construct
  misc_feature 1..1188: note = Description of Artificial Sequence: Synthetic coding sequence
  source 1..1188: mol_type = other DNA
atgaatggccctgtggacggcctttgtgatcattccctgtccgaaggggtgttcatgttcacttctgagtcagtcggcgaggggcatcctgacaagatttgtgatcagataagcgacgccgtgctggacgcccatctcaagcaagatcctaacgcaaaggttgcttgtgaaactgtgtgtaagacaggtatggtcctactgtgcggagagatcacatcaatggccatggtggattatcagcgcgtcgttagggacaccatcaagcacataggctacgacgactccgcaaagggattcgatttcaaaacctgcaatgtcctggtcgccttggaacagcaatcccccgacatcgcccagtgcgtgcatcttgatcggaatgaagaagacgtgggtgctggggaccaaggacttatgtttggttatgccactgatgaaacggaggagtgtatgccactgacaatcatcctggctcataaactcaacgcacggatggctgatttacgaagatctggactgttaccctggctccggcctgacagcaagacccaggtgacagtgcagtacatgcaagacaacggcgcagtcatccctgttcgaatccacacaatcgtgatttcagttcaacacaacgaggacatcacgctggaggaaatgcgccgagcactgaaggagcaggtcattagagctgtggtgccagcaaaatacttggacgaagatacagtctaccacctccagccatcggggcgattcgttatcggcggcccccagggagatgcaggtgtgaccggcaggaaaataattgttgacacatacggcggatggggtgcacacggaggcggggcattcagcggtaaggattatactaaagtcgacaggtcagctgcctacgctgccagatgggtggccaagtccctggtcaaggccggactgtgccgacgggtgctggtacaggtgtcatatgctatcggggtggctgagccactgtccattagcatctttacttacggtacttcccaaaaaaccgaaagggaactgctggacgttgtgcacaaaaatttcgacctccgacctggcgtaattgttcgagatctggatttaaaaaagcctatctaccagaagactgcctgctacggacatttcggacgaagcgagttcccatgggaagtcccgcgcaaactggtattctag

SEQ ID NO: 124134 - DNA, 1188 bp, synthetic construct
  misc_feature 1..1188: note = Description of Artificial Sequence: Synthetic coding sequence
  source 1..1188: mol_type = other DNA
atgaatggacccgtggatggtctgtgcgaccatagcctttcggaaggcgtatttatgttcacttcagaatccgtgggcgagggccatcccgacaagatctgtgatcagatttccgatgccgttctggatgcacatctgaaacaagatcccaacgctaaggtagcatgtgaaacagtttgcaagacaggcatggtcctgctctgcggcgaaataaccagcatggctatggtggactaccagcgggtcgtgcgggacacgataaaacacataggctacgatgacagtgcaaagggctttgacttcaagacatgcaacgtcctcgttgccctcgaacagcagtcgcctgatatagcccagtgtgtgcaccttgataggaacgaggaggacgtgggcgccggcgaccagggactgatgtttggctacgcaacggatgagacagaagaatgcatgcctctgacaatcatactggcccataagttgaacgcacgtatggcggatcttcgacgatcaggacttctgccctggttgcgtccggattccaagacgcaggtgactgtccaatacatgcaagacaacggagctgtcattcctgtgagaattcataccatcgtcatctcagttcagcataacgaggacatcactcttgaagagatgagacgggccttgaaggaacaggtcattagggcggttgtccccgccaagtatcttgatgaggacacagtttaccacctgcagccttccggaaggttcgtcattggaggacctcagggagacgctggtgtaaccggtagaaagattattgtggacacctacggcggatggggggctcacggcggtggcgcattctcaggcaaagactatactaaggtcgaccgctcagccgcttacgccgctcggtgggtagccaaaagtttggttaaggcgggtttgtgccggcgagtgctggtccaagtctcttatgctatcggagtcgccgagccattatcgatctccatttttacttatggtacttctcagaaaactgagcgcgaattattggatgtcgttcacaagaattttgatctaagacctggtgtgattgtgcgtgatctggatcttaagaagccaatatatcaaaagaccgcatgctatggacacttcggccggtcagaatttccatgggaagtgcctcgcaagttagtgttctag

SEQ ID NO: 124135 - DNA, 438 bp, synthetic construct
  misc_feature 1..438: note = Description of Artificial Sequence: Synthetic coding sequence
  source 1..438: mol_type = other DNA
gaatcagtaggcgagggacacccggataagatctgcgatcagatttcagacgccgtcttagatgcccaccttaagcaggacccaaatgcaaaggtggcatgcgggtttgactttaagacctgcaatgtcctggtcgccctggagcaacagagtcctgatattgcccaatgtgttcacctggaccgcaatgaagaggacgtaggagcgggggaccagggcctgatgtttggatacgccacagacgaaacagaagagtgtatgccgcttactataatcctcgctcataagctcaatgcaagaatggccgatctgcggcgctccggcttgttaccttggttacgacctgactccaagactcaggtgactgtgcaatacatgcaggataacggtgccgtcattccagtccgtatccatactatcgtgatttcagttcagtag

SEQ ID NO: 124136 - DNA, 1188 bp, synthetic construct
  misc_feature 1..1188: note = Description of Artificial Sequence: Synthetic coding sequence
  source 1..1188: mol_type = other DNA
atgaacggacagctcaatggcttccacgaagcatttatagaggagggcaccttcctcttcacatccgagtctgtcggggagggtcatcccgataaaatttgcgatcagatctcagatgcggtactggatgctcacttgcagcaagatcctgatgccaaagttgcctgtgaaacggtcgctaagacaggcatgatactcttagccggggagataaccagtcgggctgctgtggactatcagaaggtagttagggaagcggtcaaacacattgggtacgatgactcctccaaagggtttgattacaaaacttgtaacgtgcttgttgcactagagcaacagtcccccgacatcgctcagggcgtgcacctggatagaaacgaggaagacatcggggctggtgaccaaggcctcatgtttggttacgctacagatgaaactgaagagtgcatgcccctgacaattgtattggcacacaagctcaacgctaaactggcagaactgcgcaggaatggaaccctcccatggttgcggcccgactccaagactcaagtgaccgtacagtatatgcaggacaggggggcagtactgccaataagagtgcacactatcgtcatctccgtgcaacacgacgaggaggtttgtttggatgagatgcgagatgccctaaaggagaaagttatcaaggctgtggtaccggctaagtacctcgatgaggatactatttatcatttgcagccaagcgggcgcttcgtgatcggtggaccgcagggtgatgctgggctgacggggaggaaaattatcgtggacacctatggaggatggggggcccacggtggcggggcctttagcggtaaggactatactaaagtggatcgctcagctgcttatgcagcccgctgggttgctaaatccctggtcaaaggcggattgtgcaggagagttctggtgcaggtgtcctatgccatcggagtctctcatcctctctccattagcatcttccactacggcacctcccaaaaatccgagcgagagctgctggaaattgtgaaaaagaatttcgacctgcgtcccggggtcatcgtccgcgacctcgacctgaagaaacccatctatcagcggaccgccgcctacggtcactttggccgtgacagctttccgtgggaggtcccgaagaaactgaagtactag

SEQ ID NO: 124137 - DNA, 531 bp, synthetic construct
  misc_feature 1..531: note = Description of Artificial Sequence: Synthetic coding sequence
  source 1..531: mol_type = other DNA
atgaatggacaactaaacggattccatgaagcctttattgaggaaggtacttttctcttcacctctgaaagcgtcggcgaggggcaccctgacaaaatatgcgaccagatcggagacgcggggcttacaggtaggaaaatcatcgttgatacatacggaggctggggtgcccacggaggtggagctttctcagggaaggactataccaaggtggaccgcagcgctgcctatgctgctaggtgggttgctaaaagcttggtgaagggaggtttgtgccgtcgggttcttgtccaggtcagctatgccatcggggtctcccaccctctgagcatttccattttccattacgggacttctcaaaaatcggagcgcgagctgctggagatcgtcaaaaaaaactttgatctccgcccgggagtgatagtacgtgacttggacttgaaaaagcctatttaccagaggactgctgcctatggccattttgggagagattcttttccatgggaggtgccgaaaaagctgaagtactag

SEQ ID NO: 124138 - DNA, 549 bp, synthetic construct
  misc_feature 1..549: note = Description of Artificial Sequence: Synthetic coding sequence
  source 1..549: mol_type = other DNA
atggctagactcctgtggttgcttcgcgggttgacacttgggacagcacctaggagggccgtgcgaggacaagctgggggtggtggaccaggtaccggcccaggtctcggtgaagctgggtcactggcaacctgtgaactcccactcgccaaatccgaatggcaaaagaagctgacccccgagcagttttacgtgaccagagagaagggcacagaacctccattctctggcatctacctcaacaataaggaagcgggtatgtaccactgcgtctgctgcgactccccattattttcctcagaaaaaaaatactgttcaggcacgggatggccttctttttcagaagcccatgggacatctggcagcgacgagtcacacacgggcattcttaggcgcctagatacaagtcttggctctgctcgaacagaagtcgtgtgcaaacaatgcgaggcacacctggggcatgtctttccagatggaccaggacctaatgggcaaagattctgcattaacagcgtcgccttaaagtttaagcccagaaagcactag

SEQ ID NO: 124139 - DNA, 558 bp, synthetic construct
  misc_feature 1..558: note = Description of Artificial Sequence: Synthetic coding sequence
  source 1..558: mol_type = other DNA
atgagtgcatttaatctgctccacttagtgactaagtcccagcctgtcgccctcagggcctgcggtctcccttctgggagttgtcgggacaagaagaactgtaaagtggtgttttcccagcaggaactccgcaaacgactgacaccgttacaataccacgtgacccaggaaaagggcacagaaagtgccttcgaaggagagtatactcatcacaaagaccccggtatttataaatgtgtcgtgtgtggtaccccccttttcaagtctgaaaccaaattcgattctgggtcgggctggccatctttccacgacgtcatcaactctgaagcaatcacttttaccgatgactttagttacgggatgcaccgtgtggaaacttcctgtagtcagtgcggagcacatctgggccatattttcgatgacggtccccgccccaccggcaaacggtactgcattaatagtgccgccctgtccttcacacccgctgacagtagtgggacggctgagggcggtagcggagtggcaagcccagcgcaggccgacaaggcagagctgtag

SEQ ID NO: 124140 - DNA, 579 bp, synthetic construct
  misc_feature 1..579: note = Description of Artificial Sequence: Synthetic coding sequence
  source 1..579: mol_type = other DNA
atgtctccgagacgcacattgccaagacctctgagcctgtgtttatccctgtgcctgtgcctctgtttagctgcagccctcggaagtgcccaatccggatcttgtcgcgataaaaagaactgtaaagtcgtgttcagccaacaggagctgcgcaagaggctgacaccacttcagtaccacgttacacaggaaaagggcacggaaagcgcattcgaaggagaatacacacaccacaaagaccccggtatctataagtgtgtcgtttgcggcacgcccctgtttaagtccgagaccaaatttgattctggctctggttggccgtcattccatgacgtgattaactctgaagccattacttttactgacgatttttcatacggtatgcaccgcgtcgagacttcgtgctcacagtgcggcgcgcaccttggacatatttttgacgatggccctcgccctacggggaagagatattgcattaattctgccgccctgtcattcacacccgccgattcatcaggaactgccgaaggtggcagcggagtagcgagcccagctcaggcagacaaggctgaactgtag

SEQ ID NO: 124141 - DNA, 495 bp, synthetic construct
  misc_feature 1..495: note = Description of Artificial Sequence: Synthetic coding sequence
  source 1..495: mol_type = other DNA
atgagcgcttttaatctcttgcacctggtgaccaagtcccagcctgtggccctacgggcctgcggcctcccatcagggagctgcagggacaagaagaactgtaaagtggtgttctctcagcaggaactgcggaaacggcttactccacttcaataccatgtcactcaggaaaaaggcaccgaatcagccttcgaaggtgaatacacacaccacaaggatccgggtatatataagtgcgtcgtatgtggaacacccttgttcaagagcgaaaccaaatttgactctggttcaggttggccatcttttcatgacgtgatcaacagcgaagccatcaccttcaccgacgacttttcttatgggatgcaccgggttgagaccagttgttctcaatgtggggcccatctgggacacattttcgacgatgggccacggcccacgggcaaacggtattgcatcaatagcgctgccttgtcattcactccagcagatagttag

SEQ ID NO: 124142 - DNA, 558 bp, synthetic construct
  misc_feature 1..558: note = Description of Artificial Sequence: Synthetic coding sequence
  source 1..558: mol_type = other DNA
atgtcggcttttaatcttcttcacctggttaccaagagccagccagtcgcgttgcgagcttgtggactgccatccgggtcctgtagagacaagaaaaattgcaaggtggttttttcacagcaggaattacgtaagcgcctcacacctctgcagtaccatgtgacgcaggaaaagggaacagagtcagcattcgagggagagtacacccatcacaaggaccctggcatctataaatgcgtggtctgcggcacacccctcttcaaatccgagacaaaattcgatagcgggtcaggatggccgtccttccacgatgtcatcaacagtgaggcaatcacctttaccgatgatttctcatacggtatgcatcgtgtggagacgtcctgctctcagtgcggcgcacacctgggccatatcttcgatgatggaccacggcccacaggcaaaaggtattgcattaacagtgccgccttgtcatttacccccgctgacagcagcggcaccgctgaaggtggcagcggtgttgcttcccccgcccaggccgacaaagccgaactctag

SEQ ID NO: 124143 - DNA, 354 bp, synthetic construct
  misc_feature 1..354: note = Description of Artificial Sequence: Synthetic coding sequence
  source 1..354: mol_type = other DNA
atgtccgcttttaatctgctgcacttagttacaaagagccagccagtcgctttgcgggcttgtggtctaccttccgggagctgccgtgacaagaagaattgtaaggtggtgttctcccaacaggagttacggaaacgtctgaccccgctccaatatcacgtgacccaggagaaaggaactgaatcagcttttgaaggcgaatatacacaccacaaggaccctggtatttacaaatgtgtggtctgtggaacccctcttttcaagagcgagaccaaatttgattccggcagtgggtggccctccttccatgatgtgattaactccgaggcgatcacttttaccgatgacttctag

SEQ ID NO: 124144 - DNA, 2703 bp, synthetic construct
  misc_feature 1..2703: note = Description of Artificial Sequence: Synthetic coding sequence
  source 1..2703: mol_type = other DNA
atgaggctctttgtctccgacggcgtcccaggttgtcttcccgtcttagccgccgccgggcgggccaggggacgagccgaggtgttgatttctaccgtaggtcctgaggactgtgtggtcccattcttaactcgtccaaaggtgcccgtgcttcagctcgactcgggtaactatttattttctacatctgccatttgtaggtatttttttcttctgtcagggtgggaacaggatgacctgacgaaccagtggctggagtgggaggccacagagctgcaacctgcactgtcagctgccctctactacctggtggtgcaagggaaaaaaggtgaggatgtcctaggaagcgtccgcagagcactgactcatatagaccactctttgagccgccaaaattgcccgtttttggccggggaaaccgaatctttggccgacatcgtcttgtggggagctttataccccttgctgcaagaccctgcatacctgcccgaggaactgtccgccttgcactcttggtttcaaaccctatcaacgcaggaaccgtgccaacgcgcggccgagacagtgcttaagcagcagggtgtgctcgccctaaggccgtacctgcagaagcagccccagcctagtcctgcagaggggagggcggtgaccaacgaacctgaggaggaagaactggccacactgtccgaagaagagatagctatggccgtcaccgcttgggagaagggattggagagcctccctcctctgagaccacagcaaaacccggtcctgcctgtggctggcgagagaaatgtccttattacaagtgcactgccttacgtcaacaacgtaccgcatcttgggaacatcataggatgcgtgctcagtgccgacgtatttgcccgttacagcaggctgcgccagtggaatacattatacctatgcggcacagacgaatatggaactgccaccgagaccaaggctctggaagaaggacttacacctcaggaaatctgcgacaagtaccatattatccacgcagacatctataggtggtttaatattagcttcgatatatttggccgtacaactactccgcaacagaccaagatcactcaggacattttccaacagctcttaaagaggggattcgtgctccaggataccgtggagcagttgcggtgcgagcactgtgcaagatttttggctgaccggtttgtggaaggagtgtgtccattctgcggatacgaggaagctagaggggatcagtgtgacaaatgtggcaagttgatcaacgcggtggagctcaaaaaacctcagtgcaaagtatgccggagctgcccagttgtgcagtcttcacagcatctctttctggacctgcctaaactggagaaacgcctcgaggaatggctggggcggactttgccagggtccgactggaccccgaatgcacagttcatcacccggtcctggctccgggatggcctgaagcctaggtgtatcacccgggatctcaaatggggtacaccagtccctctggagggctttgaggacaaagtgttttatgtctggtttgacgctacaattggttacttatccataacagccaactataccgatcaatgggaacgctggtggaagaaccccgagcaggtggacctctatcagtttatggccaaagataatgtgccattccattctctggttttcccctgtagtgccctgggagcagaggataattatacactggtctcacatctgatcgccactgagtatttaaattacgaagacggaaagttctcgaaatctcgtggtgtaggggtttttggcgatatggcccaggataccggcattcccgcggacatatggaggttctatctgctgtacatccgccctgaggggcaagattctgccttctcttggacagaccttcttttaaagaataactctgagctgctgaataacctggggaacttcataaaccgagctggtatgttcgtgagtaaattctttggcgggtatgtgcctgagatggtccttacaccggacgatcagagactgctagcacacgtgaccctggagcttcaacactaccaccagcttctcgagaaagttagaattcgggatgcactgaggagcattctgacaatcagtagacacggtaaccaatacatccaggtcaacgagccctggaagcgaatcaaagggtcagaggccgacaggcagcgggccggaactgttaccggtctggccgtaaacattgccgctctgctttctgtgatgctccaaccctacatgccaactgtgtccgcgaccattcaggcccagctacaactcccacccccagcgtgctctattttactcaccaacttcctgtgtacgctgccagcagggcatcaaatcggaacagtctcccccctcttccaaaagctggagaacgatcagattgagtctctgagacaacgttttggcggcgggcaggcaaaaacatcccccaaaccagcagtggtggaaactgtaaccaccgccaaaccccagcaaatccaggctctgatggatgaagtgaccaagcagggaaatatcgtgcgcgagctgaaggcgcagaaggcggacaagaatgaggtagccgcggaagtggccaaacttttggatttaaagaagcagctggctgttgctgagggaaaaccacccgaggcacctaagggcaaaaaaaaaaagtag

SEQ ID NO: 124145 - DNA, 1908 bp, synthetic construct
  misc_feature 1..1908: note = Description of Artificial Sequence: Synthetic coding sequence
  source 1..1908: mol_type = other DNA
atggccgttaccgcctgggagaaaggtttggaatcccttccaccgctgcgaccacagcagaaccctgtccttcctgtggccggcgaaaggaatgttttaattacgagtgccttgccatatgttaataatgtgcctcatttgggaaatatcatcgggtgcgtattgagtgccgatgttttcgcacgatatagccggctccggcagtggaacacgctgtatctttgcggtaccgacgagtacggaacagcaactgagaccaaagccctggaggaagggctaaccccacaggaaatttgcgacaaataccacatcattcacgctgacatttacagatggtttaacatcagtttcgacatcttcggacgcactacgaccccccagcagacgaagatcacccaggatattttccagcaactgttgaaaaggggattcgtgttgcaagacactgtcgagcaactccggtgcgagcactgtgcacgattcctggcagacagattcgttgagggggtatgccctttttgcggctacgaagaagctagaggtgaccagtgcgacaaatgcgggaagttaattaacgccgtcgaactaaagaaaccccagtgcaaagtttgtcggtcttgtcctgtcgtccagagcagccagcacttgtttctggacctacccaagctcgaaaagagattggaagagtggctgggcagaacactccccggaagcgactggactccaaacgcgcagttcataacccgatcttggctccgagatggcctcaaacctcgctgcatcacgagggacttgaaatggggaaccccagtccctctggaaggctttgaggacaaagtgttctacgtgtggtttgacgccacaataggttatctgagtattacggcgaattacacagaccaatgggagaggtggtggaagaatccagagcaggtcgatctgtatcaatttatggctaaagacaacgtgcccttccatagtttggtcttcccctgctcagctctgggcgccgaggacaactatactttggtgtcacatcttattgctaccgagtatcttaattatgaggatggcaaattcagtaagagtcggggtgtgggagtgttcggtgatatggctcaggatacgggtattcctgctgacatttggaggttctacttactgtacatacgtcctgaggggcaggattcagccttttcatggacagatctcctgctcaaaaacaacagtgaattactgaacaacttaggcaactttattaatagagccgggatgttcgtctctaagtttttcgggggctacgtccctgagatggtcttgacgccagacgatcagcgcctcttagcccacgtaaccctggagctgcagcactatcaccagctgctggaaaaggtgcggataagagatgctttgcggagcatactgaccatcagcagacatggcaaccagtacattcaggttaatgagccctggaaacgaattaaaggctcagaggctgaccgacaaagagcgggaactgtcactggcctggccgtgaatatcgccgccctgctgagcgtcatgctgcaaccatacatgccaactgtgtctgccacgatccaagcacagcttcaactgcccccacctgcatgctccattctcctgaccaattttctgtgcacgctgcccgcaggtcatcagatcggcacagtttccccactcttccagaagctagagaacgaccagattgaaagtctcagacagcggtttggaggcggccaggttagaaagctcaaagcagtaccttccctgcacaattcgcatagtatcacgtctttgatttccctcagcagcccccaccccagcctattcccaagtttcggccccgcagcaagttcactgacagtgttcctgtcctgccttaactag

SEQ ID NO: 124146 - DNA, 1641 bp, synthetic construct
  misc_feature 1..1641: note = Description of Artificial Sequence: Synthetic coding sequence
  source 1..1641: mol_type = other DNA
atgcgcctgtttgtctccgatggggttccagggtgcttacctgtgctagcagccgcaggcagggcccggggccgggccgaagttctgattagcacagtgggccccgaggattgcgttgtcccattcctcactaggccgaaggtgccagtcctgcagctggattccggaaattatctgttctccacctccgccatctgccgctatttctttcttttgtcagggtgggaacaggatgacctgacaaaccagtggcttgaatgggaggccacagagctccaaccagctctaagcgccgcactgtattacctggttgtgcaaggaaaaaagggagaagacgtgctcggcagtgtgcgcagagccctgactcatatagatcacagtcttagtaggcagaattgcccattcttagctggcgagaccgagtccctggctgatattgtgctatggggcgccctctatcccctcctccaggacccagcctacctgcccgaggagcttagcgctctgcactcctggtttcaaaccctgtcaacacaggaaccgtgccagcgcgcggctgagaccgtgctcaaacagcagggtgtgcttgctctgcgcccatacctgcagaagcagccccagccttcgccggccgagggccgagctgtgactaatgagcccgaagaagaggagttggccacactgagcgaagaggaaattgcaatggcggtcacagcatgggagaaaggcctggagtcactgccacccctcaggcctcagcaaaatcccgtactgcccgtggctggggaaagaaatgtattgataacgagcgcactaccatacgttaacaatgtgcctcatctgggaaacatcatcggctgtgtcctctccgcagacgtgtttgcgcgatacagtaggttgcgccaatggaacacactctatctgtgcggaactgatgaatacgggacagctactgaaactaaggcgctggaggagggcctcacacctcaggaaatttgcgataaatatcatatcattcacgccgacatttaccgttggttcaacatcagcttcgacatctttggcaggaccaccaccccccagcaaaccaaaatcacccaggatatcttccaacaactcttgaaacggggcttcgttctgcaggacacagtggagcaactgcgctgcgagcattgcgcaagatttctggcagaccgttttgttgaaggtgtttgtccattctgcggctatgaggaagcacggggggaccagtgcgacaagtgcggtaagctgatcaatgctgtggagctaaaaaagcctcaatgtaaggtgtgtcgtagctgtcccgtcgtacagtcatctcagcacctcttcctggacctgcccaaactcgagaagcgactggaggaatggctaggaaggaccctgcctgggtccgactggactcctaatgcacagttcatcacccgcagttggctaagagacgggctgaaaccacgctgcataacccgggaccttaaatggggtactccggtccctctcgagggctttgaggacaaggtgttttacgtttggtttgacgctactatcggctacctgagcattacagctaactataccgaccagtgggagcggtggtggaagaatccagaacagccttag

SEQ ID NO: 124147 - DNA, 1782 bp, synthetic construct
  misc_feature 1..1782: note = Description of Artificial Sequence: Synthetic coding sequence
  source 1..1782: mol_type = other DNA
atgctcagaacaagcgtgctgagacttttagggaggacaggtgcctcacgcctatccctgctggaggatttcggaccccggtactactccagtggcagcctgagcgctggagatgacgcttgtgacgtgagagcctattttaccacacctatcttctatgtgaatgcagctccccacattggtcacctttattcagcccttctcgctgatgccttgtgcaggcatcgcagactgaggggacctagcacagcagccacccgctttagtacaggcacggacgagcacggactgaagatccaacaggccgcggccactgctggcctggctcctaccgagctttgtgaccgggtgtcagaacagttccagcagctgttccaggaagctggcattagttgcactgattttatccgaactaccgaggcccgccacagagtggccgtccagcatttttggggagttctgaagagcaggggcctcctctacaaaggcgtttatgaaggatggtattgtgcttcggacgagtgtttcttgcccgaggctaaggttacccaacaacccggaccgagcggcgatagctttcctgtgtcgttggaatctgggcatccagtgagctggacaaaggaagagaactacatcttccgcctttcgcaattccgtaagcccctgcaacgatggctgcggggtaaccctcaggctattacacccgagccctttcaccatgtggtactgcagtggttggacgaggagttgccagacctttctgtgagtcgccgcagctcacatcttcactgggggattccagtgccaggcgacgatagccaaacgatctatgtttggctagatgctctggtgaactacctgacggttattggatacccgaacgccgaattcaaatcatggtggcctgctactagccacattatcgggaaagatatcctcaagttccacgccatctattggccggcatttctgctcggggcgggcatgagcccaccccagcgtatttgtgtgcacagccattggactgtatgcggccagaaaatgagcaagagtctaggtaacgtggtggacccgcgcacttgcttgaaccgatacacagtagacgggtttaggtacttcctcctgaggcagggggtacctaattgggattgcgactactacgacgagaaagtagtgaaactgctgaactccgaactcgcagacgcccttggtggcttactgaacagatgcacggcaaagagaattaacccctctgagacctatccagccttctgcaccacttgctttccatcagagcctggtttagtgggcccaagcgttagagcccaggccgaagattatgcgctagtgagtgccgtggcaacattaccaaaacaagtcgccgaccattatgataacttccgaatctacaaggccttggaggccgtctctagctgtgtccgccagaccaacggcttcgtacaacggcacgccccctggaaactcaattgggaatctccggtggacgctccctggttaggaaccgttctgcacgttgcactggagtgtctgagggtcttcggtacactgctgcagccggtgactccaagtcttgccgacaagctcctaagccggttaggggtgtctgcctctgagcggagtctcggcgaactatacttcttaccacgattttacggacatccttgcccttttgagggccggcggctgggacctgaaacaggcttgctatttcccagattggaccagtcgcggacctggctggtaaaagcccaccgaacctag

SEQ ID NO: 124148 - DNA, 1563 bp, synthetic construct
  misc_feature 1..1563: note = Description of Artificial Sequence: Synthetic coding sequence
  source 1..1563: mol_type = other DNA
atgttgcgtacctccgtgctccgactgcttggcaggaccggagcgtctcgcttgtcactgctggaggacttcggtcccaggtattactcctctggtagtctgtctgccggtgacgacgcttgcgacgtccgggcctattttaccacgccaattttctatgtcaacgccgccccccacatcggccatctgtactccgcattattggccgatgccctctgccggcatagacggttgcgaggcccttctaccgccgctactcgtttttctactggtacagatgaacatggactaaagatccagcaggccgcagcaaccgctggcttagctcccacagaactctgtgaccgggtgtctgaacagttccaacaactgtttcaggaggctggcatttcctggactaaggaggagaactatatattcaggttgagccagttcaggaaacctctgcagaggtggctgcgaggcaacccccaagccattactcctgaaccatttcatcacgtagtgctccagtggcttgatgaggagttgcccgatctttcagtgagccgacgttcgtcacacctgcactggggcattccggtacccggcgacgattcacagactatctacgtgtggttggatgcccttgtgaattatctgaccgtcatcgggtatccgaacgcagaattcaaatcttggtggccagccacatctcacataattggaaaagacatcctgaagttccacgcaatttactggccagcctttctcttgggggccggcatgtcaccaccacagcgtatctgcgtacactctcattggactgtctgtggacagaaaatgtccaaatccttgggcaacgtggtggacccccgaacttgcctgaatcgctacacggtggatggattccgctactttttgcttagacagggagtgcctaattgggattgtgactattacgacgaaaaagttgtgaagcttttaaacagtgaactggcggacgctctgggcggactgcttaaccggtgtactgcaaaaaggataaatccatccgagacttaccctgctttctgtacaacctgtttcccaagcgaaccggggttagttggcccttctgtcagggcacaggctgaggactatgctctggtgagtgccgtggccacgctgccgaaacaggtagccgatcactatgacaatttcagaatttacaaggcattggaggctgtcagcagctgcgtccggcagaccaacggctttgtccagaggcacgccccctggaagctgaattgggaatcacccgtggacgctccctggctgggtacagtgttacacgtggcgctggagtgcctgcgcgtgttcggtacccttctccagcctgtgacacctagcctggctgataaactactatcccgcctgggcgtttctgcttcagagagaagcttgggtgagctgtacttcctgccccgcttttatggccatccgtgccctttcgagggccgccggctgggtcctgagacaggcctcctattcccccgccttgaccagtctcgcacctggctcgtcaaagcacatcgcacatag

SEQ ID NO: 124149 - DNA, 1461 bp, synthetic construct
  misc_feature 1..1461: note = Description of Artificial Sequence: Synthetic coding sequence
  source 1..1461: mol_type = other DNA
atggttgccggtatgctcgggttaagggaagaaaagagcgaagatcaggatctgcaggggctaaaagacaaaccactgaagtttaaaaaagttaagaaagacaagaaggaggagaaggagggaaaacacgaacccgttcaaccttcggcacaccatagcgccgagcccgccgaggcaggcaaagcggagacaagcgaggggtccggaagtgcaccagcggttccggaggcgtccgcctctccaaagcagaggagatccatcatccgtgacaggggccccatgtatgacgaccctactctcccagagggctggactaggaagttgaaacagagaaagagcggccgatctgccggcaagtacgatgtgtacctgattaacccccaaggcaaggccttcaggtctaaagttgagctcatcgcttacttcgaaaaagtgggagacaccagtcttgacccaaacgatttcgactttaccgtcacaggtcggggcagtccgtctagacgcgagcaaaaaccacccaaaaaacccaaatcgcctaaagctcctggcaccggaagaggccggggaagacccaagggatcagggacaaccaggccaaaggccgcaacatctgaaggggtacaggtgaaaagagtcctggagaaatcaccagggaaactattagtcaaaatgcccttccagacatctccgggcggcaaagcagagggaggtggagcgacaacttcaacacaggttatggtgattaaaaggccaggacgcaaaagaaaggccgaggctgacccccaggccattcctaaaaagcggggaaggaagccaggctccgttgtcgccgcggcagcagcagaagcaaaaaaaaaggccgttaaggagtctagcatccgaagtgtccaagagacagtgctgcccattaaaaagaggaaaacccgagaaacagtatccatcgaagtcaaggaggttgtgaagcccctgctggtcagtacacttggcgagaaatcaggaaagggacttaaaacttgcaaatctcccggccgtaaatcgaaggagtcatcccctaagggacgctcaagctccgcctccagcccccctaaaaaggagcaccaccaccatcaccatcattctgagagtcccaaagcgcctgtgcctctgctaccccctctgccccctccacctcccgagccagagagctccgaagacccaacctcgcccccggagcctcaagacctctcttcgtctgtgtgcaaagaggaaaagatgccgcgaggagggtcactggagagtgacggctgtcccaaagagccggccaaaacacaacccgccgttgccacggccgctaccgccgcagagaaatataagcataggggcgagggagagcgaaaggacatagtttcctccagtatgcctcgtcctaacagagaggagcccgtggattctagaactccagttaccgagcgggtgagctag

SEQ ID NO: 124150 - DNA, 816 bp, synthetic construct
  misc_feature 1..816: note = Description of Artificial Sequence: Synthetic coding sequence
  source 1..816: mol_type = other DNA
atggttgccgggatgctaggcctgcgtgaggaaaagagtgaagaccaggatcttcagggcctgaaagataaaccccttaagttcaagaaagtgaaaaaggataaaaaggaggaaaaggagggaaaacatgaacccgtacagccttcagcccaccatagcgccgagccagcagaggctggcaaagctgagacctccgaagggagcgggtcagcaccagctgtgcctgaggccagtgcctcacccaagcagagacggtcgattattcgggatagaggccccatgtacgacgatcccacactcccggaaggatggactaggaagctgaaacagagaaagtcggggcggagtgccggtaaatacgatgtttatctcatcaacccccaaggtaaagcatttcgctctaaggtggagctgatcgcctactttgagaaggtcggagacacatccctggacccgaatgactttgatttcacggtgaccggcagaggctccccctcccggcgggaacagaagccacccaagaagcccaaaagcccaaaagcccctggtacaggtaggggccgaggcagacccaaaggcagtggaaccacaaggccaaaggccgcaacttccgaaggggtacaggttaaaagggtgttggagaagagtcccggcaagcttcttgtaaagatgccattccagacgagccctggggggaaagctgagggaggaggggccacgacatccacccaggtcatggttatcaagaggcccggccgcaagcggtccccccgggcaccacgcacccctcccgcccctctctccccacgaacctag

SEQ ID NO: 124151 - DNA, 153 bp, synthetic construct
  misc_feature 1..153: note = Description of Artificial Sequence: Synthetic coding sequence
  source 1..153: mol_type = other DNA
atggtggccggtatgttgggtttaagggaggaaaagagcgaggaccaggatctgcagggcttaaaggacaagccccttaaatttaagaaggtgaagaaagataaaaaggaagaaaaagagggtaagcacgaacctgttcaaccctctgcctag

SEQ ID NO: 124152 - DNA, 1497 bp, synthetic construct
  misc_feature 1..1497: note = Description of Artificial Sequence: Synthetic coding sequence
  source 1..1497: mol_type = other DNA
atggcagccgctgcagccgctgcaccgagtggcgggggcgggggcggagaggaagaaaggctcgaagagaagtcagaggaccaagaccttcaagggctgaaggacaagccactgaaattcaaaaaggtaaagaaggataaaaaggaggaaaaggaaggcaaacatgagcctgtccaacctagcgcccaccattccgccgaacccgctgaggctggaaaggcagaaacctcagaaggatcaggtagtgcaccggcagtgcccgaagcctcagcaagccctaagcagaggaggtctataatcagagatcgaggccccatgtacgacgaccccacactgccggagggatggacacgaaagctgaagcagcgcaagtccggtagaagcgctgggaagtatgacgtgtacctgattaaccctcagggtaaagccttcagatctaaagtggaactcattgcctactttgaaaaggtaggagatacctccctcgaccctaatgactttgactttaccgtgacaggaaggggctcacctagccgtcgcgaacaaaaaccacccaaaaaacctaagtcacccaaggccccgggtaccggtagagggcgtggccgccctaaaggatcagggacaacgagacccaaagccgcgacatcagaaggcgtgcaggtgaagagggtcctagaaaagtctccggggaaactgctagtcaagatgcccttccagaccagcccaggggggaaggctgagggtggcggtgcaacaaccagcacacaggtgatggtcatcaagagaccaggtagaaagcggaaggccgaggctgaccctcaggccatccctaagaagagaggacgaaagccggggtctgtcgtggctgcagctgccgctgaggcaaaaaagaaagccgttaaggaatctagcattagatcagtccaagaaactgtgctccccataaagaagcgaaagacacgggagaccgtttctatcgaagttaaagaggtcgtgaagccgctgctggtgagtacactcggcgaaaagtctgggaaaggtcttaagacctgtaagagcccggggcgtaagtcaaaagaatccagccccaaagggagatcatcatcagcaagtagccccccaaaaaaggagcaccaccaccaccatcaccactccgagtctccgaaggcccctgtgcctctgttgcctccgttaccgccacccccaccagaacccgagagttctgaggatcccacttcacctcccgagccacaggatctatccagcagcgtgtgtaaagaagaaaagatgccaagaggcggaagcttagaatcggacgggtgccctaaggagccggcaaaaacccagcccgcagttgctacggccgccaccgccgcagagaaatataaacaccgcggagaaggtgaacggaaggacatagtgtcatcatctatgccccgacccaatcgagaggaaccagtggatagccgaacacctgtgacggagcgtgtgtcctag

SEQ ID NO: 124153 - DNA, 1185 bp, synthetic construct
  misc_feature 1..1185: note = Description of Artificial Sequence: Synthetic coding sequence
  source 1..1185: mol_type = other DNA
atggtggctggcatgttgggccttagggaagagaagtccgaagaccaggatctccaaggtttaaaagataagcctcttaaattcaagaaggtcaagaaagacaaaaaagaggagaaagaaggcaagcacgagccagttcagccaagtgcccaccatagcgcagagccagccgaggcaggaaaggcagagaccagtgaggggagtggctccgcccccgcggtccctgaggccagtgcatctccgaagcagaggagatccatcatccgggacagaggcccaatgtacgatgaccccacgctccccgagggctggacaaggaagctgaaacagaggaaaagtggaaggagcgccggcaagtacgacgtgtacctgatcaacccacaggggaaggcttttcggtctaaggtggagctcattgcctactttgaaaaggttggcgacacgagtttggaccccaatgactttgattttacagtgaccggacgcgggtccccctctcgccgggagcagaagccacccaaaaagcctaaatcgcctaaggctccaggaacagggcgaggtagggggcgtcccaaaggcagcgggaccaccaggccaaaggccgccacatccgaaggggtccaggttaaacgcgtcctggagaagtcgccagggaagcttcttgttaaaatgccgtttcagacctctccagggggaaaagcagagggcgggggcgccaccacttctactcaggtgatggtcattaaacgacctggacgtaaaagaaaagccgaggccgaccctcaagccataccgaagaagcgtggccggaagcccgggagtgttgtggctgcagctgcggctgaggctaagaagaaggcagttaaagagtcttcgattagaagcgtgcaggagactgtgctcccaatcaaaaagcgtaagaccagggagactgtctccattgaggtgaaagaagttgtgaagccgcttcttgtgagcaccctgggggaaaaatcaggaaagggactcaagacttgcaaatcccccggccggaaaagcaaggagtcttccccaaaaggtcggtcctcctctgcatcatcgccgcctaaaaaagaacatcatcatcatcatcaccacagcgagtcacccaaggccccagtgccaactcgaataaaggccgctgtggtgagttccccctatgggtag

SEQ ID NO: 124154 - DNA, 1818 bp, synthetic construct
  misc_feature 1..1818: note = Description of Artificial Sequence: Synthetic coding sequence
  source 1..1818: mol_type = other DNA
atggcggaggattggctcgattgccccgcgctaggccctgggtggaagagacgcgaggtgttccgcaaaagcggcgcaacttgcggtaggtccgacacctactatcagtcccctacaggcgaccgcataaggtccaaggtggagctgacccgctacctggggcctgcctgtgacctgaccctctttgattttaaacagggcatactctgctaccctgccccgaaggcgcacccagtagcagtagccagcaaaaagcggaagaagccatcgcgcccagccaagactaggaaaaggcaggtgggtccgcagtcaggagaggttcgcaaggaggcaccacgcgacgaaacgaaggccgacacagacactgcgccagcaagcttccctgcccctggctgttgtgagaattgcggcatttccttttccggggatggaactcagcgccagagactgaagacactttgcaaagactgcagggctcagcgcattgcctttaacagagaacaaagaatgtttaaacgggtgggctgtggtgaatgcgctgcctgtcaggtgactgaggactgcggggcctgctcaacatgcctacttcagctcccacatgacgtcgcaagtggcctgttctgcaaatgcgagaggcgccgatgcctgcggatcgtcgagcgctctcgaggatgtggcgtgtgtagaggttgtcagactcaggaagactgtggacactgtcccatatgtctgagacctcccaggcctgggctacgacggcagtggaagtgtgtgcagaggcgatgtctgagaggcaagcacgccagaagaaaagggggatgcgacagtaagatggccgcgaggagacgcccgggcgcccaacccttgcccccccccccaccttcccaaagccctgaaccgactgagccccatccgcgagccctggcgccctcccctcctgccgagtttatttactattgtgtcgacgaggatgaattgcagccttacactaacagaagacaaaacaggaagtgcggcgcatgtgctgcatgcttgaggagaatggactgtggccgatgcgacttttgttgtgataagccaaaatttgggggaagcaatcagaaaaggcagaaatgtagatggagacagtgcctgcagttcgccatgaaaaggctgctcccgagcgtctggtcggaatcggaggacggcgccgggtccccccccccctaccggcggaggaagcggcctagctcagctcggcggcatcacctcggacctacgctaaagccaacactggcaacaaggaccgcccagcctgaccacacacaggcacccaccaaacaggaagccggcggaggtttcgtgctcccacctccaggaaccgatctcgtgttcctccgcgagggagctagtagcccggttcaggtgcccggtcctgttgctgctagtaccgaagccctgctgcaggaagctcagtgtagtggattgagttgggtcgtcgcgttaccacaggtcaagcaagaaaaggccgacactcaggatgaatggacacccggaaccgctgtgctgacatcacctgtacttgtgccggggtgcccatccaaagccgtagatcctggccttccctcagtgaagcaggagccgcccgacccagaagaggataaagaggagaataaggacgactcggcgagcaagctcgctccagaagaggaagccgggggggctggaacacctgtgatcacagaaatctttagtctcggcggaaccagatttagggatacagcggtctggctgcccagatctaaagatttgaagaaacctggagctcgcaaacaatag

SEQ ID NO: 124155 - DNA, 1761 bp, synthetic construct
  misc_feature 1..1761: note = Description of Artificial Sequence: Synthetic coding sequence
  source 1..1761: mol_type = other DNA
atggctgaagactggttggattgccccgctctggggcccggctggaaacgacgcgaggtttttagaaagagcggcgcaacttgtggccgttcagacacctattaccagagtccaactggcgatcgcatccggagtaaagtcgagcttaccagatacctgggcccagcgtgcgatttgacactgttcgactttaaacagggtatcctttgttaccctgcacccaaagcccacccagtggctgtggcgagcaagaaacggaagaagcccagcagaccggccaagactaggaagaggcaggtaggtccacagtccggcgaggttcggaaggaggccccgcgcgacgagacaaaagcggacactgacacagccccggccagctttcctgccccaggctgctgcgagaactgcggaatttcgttttcgggcgacggcactcagagacagaggctaaagaccttgtgtaaagattgccgggcccagcggattgcgttcaacagagaacagaggatgttcaagcgcgttggctgcggcgagtgtgcagcttgtcaggtaaccgaagactgcggcgcttgttccacttgcctgctgcagcttccccacgatgtcgcctccggcctgttctgcaagtgcgaacggcggcggtgtctgcggattgtcgagcgctctcgcggatgtggagtctgtaggggttgtcagacccaggaagattgtggtcactgtcccatctgtctgcgccccccacggccaggtctccgcagacagtggaaatgcgtacaacgacggtgtctgcgaggcaaacacgctagacggaaggggggctgtgattcaaagatggctgccagacgtaggccaggagctcaacctcttccacccccccctccctctcagagcccagagcccaccgagccccaaccctataccaaccgccgccaaaatcggaagtgtggcgcttgcgccgcatgcctgcgcagaatggattgtggcagatgcgacttctgctgcgataagcctaaatttggcggtagtaatcaaaagcggcagaagtgccgatggcgccagtgcttgcagtttgctatgaaaagattgctgcccagtgtctggagcgagtccgaggatggagccggttcccctcctccatatcggagacggaaacggccgtcaagtgcccgccgccatcatttgggaccaacgctcaagcccacactggcgacccgcacggcacagcccgatcatacacaagccccaaccaaacaggaggcaggcggcgggtttgtgctgcctcctccaggaaccgatcttgtatttctgcgcgagggagctagcagcccagtgcaagtcccaggccctgtggctgcaagcaccgaagcgctgctgcaggccgtggaccccggactgccctccgttaaacaggagccacccgacccagaagaggataaggaggagaataaagacgacagcgcttctaaactagcacctgaagaggaggccgggggagctggcacccctgtgattaccgagatatttagccttggagggactagattcagagacacagcagtctggctccctagcctgcagggccgccacagcggtcgcgaagacggctgtaaagtgtgggaaacggaggacacggttgaaccaacctcaaccagttggaacccaagggggtggcccgggacacacgtcagcctgtccccgccccctgcttccatgatgtgggtttcctgtagacgttcatggtgtccctcgagtcagtcgtag

SEQ ID NO: 124156 - DNA, 1653 bp, synthetic construct
  misc_feature 1..1653: note = Description of Artificial Sequence: Synthetic coding sequence
  source 1..1653: mol_type = other DNA
atggctgaggattggcttgactgccccgcactgggtcccggttggaaacggcgcgaagtctttcggaaatccggagccacatgtggtagatccgatacctactaccaaagcccgacgggagatcgtataagaagcaaggtagagctgacacggtatctcggacctgcctgcgatttaaccttgttcgacttcaaacaggggatcctctgttatccagctcccaaggctcaccccgtcgccgtcgcaagcaaaaagaggaagaagccctcacgcccggctaagacccgtaaacgccaggtgggaccacagagcggggaagtgcgaaaagaagcaccgcgagacgaaaccaaagccgacaccgacaccgcaccggcctcttttcctgctcccgggtgctgcgaaaattgtggaatcagctttagcggcgatggtacccagagacagcgcttgaaaaccctgtgcaaagactgtcgcgcccagagaattgcctttaatagggagcagagaatgttcaagagagtcgggtgtggtgagtgcgctgcttgtcaggtgacagaggactgtggggcctgctctacttgtctgctccagctccctcatgatgtggctagcggacttttctgtaagtgcgagaggcgacggtgtttgagaattgtagagcgctccagaggatgtggagtctgcaggggctgtcagacccaggaggactgcggtcattgccctatctgtttgagaccaccacgccctgggttgcggaggcaatggaagtgcgtccagcgacggtgtctgcgcggaaaacacgctcgtcggaaaggaggttgcgactcaaaaatggctgctcgcaggaggccgggcgcgcagcccttgccacctccacccccctcacagtcaccggagcccacagaaccccatccccgagccctcgctccaagtccgcctgccgaattcatttattactgtgtcgacgaggacgagctgcagccctataccaacaggcggcagaatcgcaagtgcggcgcctgtgctgcctgtctgcgtcgcatggactgtggccggtgcgatttttgttgtgataagcctaaattcggtggtagtaatcagaaacgacagaaatgtaggtggaggcaatgtctacagttcgccatgaagagattgctgccttctgtatggagcgagtctgaggacggggccgggtccccacccccatatagacgacgcaaacgcccctctagtgcacgacgccaccacctggggcccacgttaaagcctactttagctactcggacagcacagccagaccacactcaggccccaacgaaacaggaggccggcgggggttttgttctcccgccccctggtactgacctggtctttctgcgcgagggtgccagcagtcctgtgcaagtacctggacccgtggctgcatccaccgaggctctactgcaggcggtggaccccggacttccgtcagtcaaacaggaaccacctgaccccgaggaggacaaggaagagaataaggatgattccgcttcgaagttagcgccggaagaggaggcaggcggcgccgggactcctgtggaacctacgactcaaccgcaatacagcggaaatttcgataatgacctgtatgaaatatacctgatcgacatctag

SEQ ID NO: 124157 - DNA, 1650 bp, synthetic construct
  misc_feature 1..1650: note = Description of Artificial Sequence: Synthetic coding sequence
  source 1..1650: mol_type = other DNA
atggccgaagactggctcgactgcccagccctcggcccggggtggaaaagaagagaggtctttaggaaatctggcgcaacttgtggacgatctgatacctactatcagtcccctaccggggaccgcattaggtccaaggtagagctgacccgttatctgggccccgcctgtgaccttactctgttcgactttaagcagggaattctttgttatccagccccgaaagcacaccctgttgctgtcgcatctaaaaagagaaaaaagccctcccgccctgctaaaacccggaaacgacaggtgggtccgcagtctggcgaggtgcgtaaagaggcccccagggacgagaccaaggctgataccgacaccgcacccgcctctttcccagcaccagggtgttgcgagaattgcgggatctcattttccggcgacggcacacaacgacagcggttgaagactctgtgcaaggattgtagggcacagcggatcgctttcaaccgggagcaaaggatgtttaaaagggtgggctgcggcgagtgcgctgcttgtcaagtgacagaagactgtggcgcatgtagtacgtgtctactccagctccctcatgacgttgcatccggactgttctgcaaatgtgagcggcgcaggtgccttcgcattgtcgaacgaagtcgcggctgcggtgtctgcaggggctgtcagacccaagaagattgtgggcattgtcccatttgtctacgccctccaagacctggcctccggcggcaatggaagtgtgtccagcgccgttgcttgagagggaaacacgctaggaggaagggcggatgtgactcgaaaatggctgcacgcagacgcccaggcgcccagcccctgccccccccaccaccaagccagagccccgaaccgaccgaaccacacccgcgcgcccttgccccaagccctcccgcagagtttatttactattgtgtggatgaggacgagcttaaaagactattgcctagtgtttggagtgaatctgaagacggtgccggctcccctccgccatacaggaggcgcaagcgaccttcatccgctcgccggcaccaccttgggccaactttgaagccgacccttgctacgaggacagcccaacctgaccatactcaggcacccaccaagcaagaagctggaggcggtttcgtcttgccaccaccgggaactgacctggtttttctgcgggagggagcttcttcaccagtgcaagtacctggtcccgtagctgcgtccactgaggcactgctgcaagaggcacagtgctctggcttgagttgggttgttgccctcccccaggtgaagcaggagaaagcagacacacaggatgagtggacacccggaactgccgtcttgacttctcccgtcttggtgccaggatgtccttccaaagcagtggatcctggactgccatccgtgaaacaggaacctcctgaccccgaggaagacaaagaagagaataaggacgactctgccagtaaattggcccccgaagaggaagcaggtggagctgggacgccagtcatcaccgaaatctttagcctggggggaacccgcttcagggataccgccgtgtggttgccaaggagcaaagatctgaaaaaaccaggagctagaaagcagtag

SEQ ID NO: 124158 - DNA, 1512 bp, synthetic construct
  misc_feature 1..1512: note = Description of Artificial Sequence: Synthetic coding sequence
  source 1..1512: mol_type = other DNA
atggctgaggactggctcgactgccctgccctgggcccgggatggaaaaggagagaggtttttcgcaaaagcggagccacatgtggccggtccgacacatactaccagtccccaaccggcgaccgtatcagatctaaagtggagcttacgaggtacttaggacctgcttgcgacctcaccctgtttgatttcaagcagggtatcctttgttaccctgctcccaaagcgcatccagtggccgttgcgtccaagaagcggaaaaagccaagtagaccagccaagactagaaaaagacaagtgggcccacagtccggagaagtgcgcaaagaggctccaagagatgaaacgaaagccgataccgacacagcccctgcttcttttcccgcgcctggctgctgcgaaaactgtggtatttcctttagtggggatggcacccagaggcaacgcttgaagacgttgtgtaaggattgtcgcgcacagaggatagcttttaatcgtgaacagaggatgtttaagcgcgtcgggtgcggagaatgtgccgcttgtcaggtgacagaggactgcggagcctgcagcacttgcctcctgcaactgcctcatgacgttgcttccggattgttctgcaaatgcgagcgccgccggtgcttgcgcatagttgagagaagccgcggatgcggcgtgtgtaggggttgccagacgcaggaggattgcggccattgccccatatgcctgcgccctccccgacccggactgcgaaggcagtggaagtgtgtgcagaggcggtgtctgagggggaagcacgctcgcagaaagggaggatgcgatagcaagatggccgcccgcaggagaccaggggcccagcctttgccacctcctcccccaagtcaaagcccagaacctacagagccacaccctcgagcccttgcaccctctccgccagccgagtttatatactactgcgttgatgaagacgaacttaagagactgttgccctcagtctggtctgaatctgaagatggcgctggctccccccccccttatagacggagaaagaggccaagctccgccagaagacatcacctgggcccaacactgaagccaaccctagccactcgaactgcacagccagatcacactcaggctcccacgaagcaagaagccggtggcggattcgtgctaccgcctcccggcaccgatctggtcttcctgagagaaggagcatcctccccagtgcaggtccctggtcccgtcgctgcatcaaccgaggccctgttgcaagcagtggacccagggctgccttccgtcaaacaggaaccccccgatcccgaggaagacaaggaggagaataaggatgatagtgcttctaagttggccccagaggaggaggcaggcggtgccgggacacctgtgatcacagaaattttttcactgggcggtacccgcttccgagacacggccgtctggttgccgagatcgaaagacttgaaaaagcccggagctaggaaacaatag

SEQ ID NO: 124159 - DNA, 1671 bp, synthetic construct
  misc_feature 1..1671: note = Description of Artificial Sequence: Synthetic coding sequence
  source 1..1671: mol_type = other DNA
atggctgaagactggcttgattgcccagcattgggtcccggatggaaacggcgggaagtatttagaaaatcaggtgctacttgcgggcggtccgatacatattaccaatctcccacaggcgacaggattaggtctaaggtagagctcactcggtatttagggcccgcctgcgatctgacattgtttgacttcaaacagggaatcctctgctaccccgccccgaaggcgcaccctgtggcagtggctagcaaaaagcgtaagaaacccagtcgccctgcaaaaaccaggaaaagacaggtcggacctcagtccggcgaagtgcggaaggaggcccctagggacgagacgaaggccgatacggataccgcaccggcatcttttcccgccccggggtgttgtgagaattgtggcatttccttctcgggggacggaactcagcggcagcggcttaagacgctatgcaaagattgtagagcacaacgcattgcttttaacagggagcagcgtatgttcaaaagcagaggctgcggagtgtgtcggggctgtcagactcaggaagactgcggccactgtccaatatgccttcgcccacctcggccaggccttagacggcagtggaagtgtgtgcagcgtcgctgcctacgagggaagcatgctaggagaaaaggaggttgcgattctaaaatggctgctaggcggcgcccaggtgctcagcccctgccaccccctccaccatcacaaagccccgagcctaccgagccacatccccgagcactggcaccgtcaccccctgccgaattcatttactactgtgtcgacgaagacgagttacagccctacactaaccgacgtcagaaccgcaagtgcggagcctgtgccgcttgcttgcgccggatggattgtggtcgttgtgatttctgctgcgacaaaccaaagtttggcgggtccaatcagaagagacagaaatgtaggtggcgacagtgcctccagttcgctatgaaaaggcttctgcccagcgtttggagtgaatcagaagatggagcaggcagccccccaccttacaggagacgcaagagaccaagctctgcacgacggcatcatttaggtcccaccctgaagccaacattggccactagaaccgcccaacctgaccacactcaagcccccactaaacaagaggcgggcgggggattcgtcctcccacccccaggcacagacctggtgttcctgcgtgagggtgcttctagccccgtgcaggtgccagggccagtcgcagccagtactgaagctctactgcaggaggctcaatgtagcggcctaagctgggtggtcgccctcccccaggttaagcaagaaaaagccgatacccaagacgaatggaccccagggactgccgtgctgactagcccagttcttgtgcccggatgccccagtaaagcagtggatcccggactgccttccgtcaagcaggagccgcctgatcctgaagaagacaaagaggagaacaaggacgattcagccagcaaactggctcctgaagaggaggccggtggggcaggaaccccggttattacagagatcttcagcctgggcgggacgcggtttagagatacggccgtttggctgccacgctctaaggacctgaaaaagcctggagcgaggaagcaatag

SEQ ID NO: 124160 - DNA, 1818 bp, synthetic construct
  misc_feature 1..1818: note = Description of Artificial Sequence: Synthetic coding sequence
  source 1..1818: mol_type = other DNA
atggctgaggattggcttgattgtcccgcccttggccccggttggaaacggcgcgaagttttccggaagtcgggcgctacgtgtgggaggtccgacacttattaccaatccccaacaggtgaccgaatccggtcaaaggtcgaactgacgcgttacctgggtccagcgtgtgacttaacactgtttgacttcaaacagggtatattatgctatcctgctccgaaggcccatcctgttgcggtcgcaagcaagaaacgaaaaaaaccttcaagacccgcaaagactaggaagagacaggtgggccctcaatccggtgaggtgagaaaagaggcccctcgggacgaaaccaaagctgatactgacacagcccctgccagttttccggcccctggttgttgcgaaaattgcggaatttcctttagcggagatgggactcagagacagagactgaagaccttatgcaaagattgccgcgctcagcgtatcgcattcaacagagagcaacggatgttcaaaagggtagggtgcggagagtgtgccgcctgccaagtgactgaagattgtggcgcctgcagcacctgtctgctgcagcttccccatgacgtagcgtcagggttattttgcaaatgtgagcgacggcgatgcttgcgaatagtcgaacgaagtagagggtgtggcgtttgtcggggttgccagactcaggaggactgtgggcattgcccaatctgtctgagacccccccgcccggggctgcgacggcaatggaaatgtgtccagcggcgatgcttgcgcggaaagcacgctaggcggaagggcggctgcgactcaaagatggccgccagaagaaggcccggagcccagcctctgccgcccccccccccgtcacagagtccagagccaaccgaacctcacccacgcgcccttgctccttctcctcccgccgagtttatctattactgtgttgatgaggatgagcttcaaccttacaccaacagacgccagaaccgcaaatgcggggcctgcgccgcctgtctaagacgcatggattgtggacggtgtgacttttgctgtgataagccaaaattcgggggcagcaatcagaagagacagaagtgccgctggcgtcagtgcctgcaattcgctatgaaacgcttattgccgtccgtgtggtctgagagcgaagatggagcaggaagtccaccaccttatcgtagacggaagcgcccgtcaagcgcacgacgacatcacctgggtcctacactgaaacccacgctcgccacaaggacggcacagcccgaccatactcaggctccaacgaagcaggaggccggaggtggtttcgtgctgccaccgccaggtaccgatctggtgttcctgagagagggagcatctagccccgtacaggtgcccggccctgtggccgcaagtactgaggccctgctgcaggaagctcaatgctccgggttgagctgggtggtggctcttcctcaggtgaaacaggagaaagctgatacacaggacgaatggacccctggcaccgcagttctcacaagcccggtcctggtgcctggttgtccaagtaaggccgtcgacccaggactgccgtctgtcaaacaggaaccaccggatcccgaggaggacaaggaggaaaacaaggacgactcggcaagcaagcttgcccccgaagaagaagccggcggggctggcactcccgtcattacagagattttcagcctaggaggtacacgcttccgggatactgctgtttggctccctcggtccaaggatctgaagaagcctggcgcacgaaagcaatag

SEQ ID NO: 124161 - DNA, 1512 bp, synthetic construct
  misc_feature 1..1512: note = Description of Artificial Sequence: Synthetic coding sequence
  source 1..1512: mol_type = other DNA
atggcggaggactggttagattgtcccgcgcttggccctggctggaagagacgggaagtgtttagaaaatcgggagccacctgcgggcgatctgatacttactaccagtccccaaccggtgaccggatcagatctaaggtggaactgacccgttacctcggccctgcctgtgaccttacactcttcgattttaagcagggcattctttgctaccctgctcccaaggcccaccctgtggccgtggcctctaagaagcgaaaaaagccgtcacgacctgccaagaccaggaagcgacaggttggccctcagtccggggaagttaggaaggaggcccctcgggatgaaaccaaggcagacaccgatactgcacccgcttctttcccagcaccaggctgttgcgagaactgcgggatcagcttttccggcgacgggacccagagacaacggctcaaaaccctttgtaaggattgccgtgcccagaggatcgccttcaatcgagaacagaggatgtttaaacgggtaggatgtggagaatgtgctgcttgtcaggtgactgaagactgtggtgcctgttccacatgtctgctccaacttccacatgacgtggcaagtggactgttctgcaagtgcgagcgtcgccgctgcttacgcattgtagaacgatcgagaggctgcggggtctgtcgcggttgccagacccaagaagattgcgggcattgtcctatctgcctccgcccaccaaggcctggcctgcggcggcagtggaaatgtgtgcagcgccggtgtctgcgcggaaagcacgcccgacgcaaaggaggctgtgattctaagatggccgctagaagaaggcctggggcgcagccgctccctcctcccccgccctctcagagtcctgaacccacagagcctcatcctcgagccctggcaccatcccctccagccgagttcatctattactgcgtagacgaggacgaactgaagcgcttactcccatctgtgtggagcgagagtgaggatggcgcaggaagtcctcccccttaccgccgtaggaagcgccccagttcggcgaggaggcatcaccttgggcccacactcaagcctacattggctacccgcactgcacagccagatcacacccaggcccctaccaagcaggaggcaggaggaggatttgtccttccgccacccggaacggatctggtcttcctgcgggagggtgcctcatcacccgtgcaggtgcccggcccggtggcggcgtctaccgaagcacttctccaggcagtcgacccaggactgccctccgtgaagcaggagcctccggatcctgaggaggacaaggaggaaaataaagacgactctgctagtaaattagcccctgaggaggaggccgggggcgcagggacccctgtgattaccgaaatcttttccttggggggcactcgctttcgagacacggcggtgtggctccccagaagcaaagacctcaaaaagcctggtgcccgaaagcagtag

SEQ ID NO: 124162 - DNA, 1650 bp, synthetic construct
  misc_feature 1..1650: note = Description of Artificial Sequence: Synthetic coding sequence
  source 1..1650: mol_type = other DNA
atggcagaagactggcttgactgcccggccctagggccagggtggaaacgacgcgaggtgtttcgtaaatccggcgcaacctgcggcagatctgacacctactatcagagcccaacaggagatcgcatacgctctaaagtcgaattgacgcggtatctcggcccggcctgcgacctcaccctgtttgattttaagcagggaatcttgtgctatcccgcccctaaagcccaccccgtggccgtggcaagtaagaagcggaagaagcctagcaggcctgccaagactcgaaaaagacaggtgggtccacaatccggcgaggtccgtaaagaggccccccgggatgaaacaaaagcggacactgacacagcccccgcgagtttccccgcgccagggtgttgcgaaaattgcggaatttccttttctggggacgggacgcagcgccagcggcttaaaaccctgtgtaaggattgtagagcccagcgtattgcctttaaccgcgaacaaagaatgtttaaaagagtggggtgtggggaatgcgccgcctgccaggttactgaggactgtggcgcttgttcaacatgtctcctccagttgccccatgacgtcgcgagtgggctgttctgcaagtgcgagaggcgccgctgtctccggatcgttgagcgatctcgagggtgtggtgtgtgccggggttgtcagacccaggaggattgcggacactgccccatctgtctgaggcctccacgacccggcttacgccgtcagtggaaatgtgtgcagagaaggtgtctgaggggtaagcacgcgcggcgaaaaggcggctgtgacagtaagatggccgccagacggcgacccggggcccaaccactgccccctcctccaccatcgcagtcgccggaaccaacagaaccccatcctagagcgctggccccttccccccctgctgaatttatatattactgcgtcgacgaggacgaactcaagcgcctcctccctagtgtgtggagcgaatcagaagatggcgccggatccccaccgccataccgcaggcgcaaacgcccttctagtgccagacggcatcatctggggccaacacttaagcccacactcgcgactagaactgctcagccagaccatacccaggcacctactaagcaggaggccggtggaggattcgtccttcccccccctggtaccgacttggtgttcctcagagaaggagccagctcccctgtccaagttcctggacccgtggccgctagcaccgaggcgttgttgcaggaggcgcagtgttcggggctgtcttgggttgtggccctaccccaggtgaagcaggagaaagcagatactcaagacgagtggacccccggtaccgccgtgttaacttcgcccgttctagtgccaggctgccccagtaaggccgtcgaccctggactcccatctgtcaaacaggaaccccccgatcccgaggaggacaaagaggaaaacaaagatgacagcgcgagtaaattggctcccgaagaggaagccggaggcgccggcacccccgtgattaccgagatcttttcgctggggggcacacgctttcgggacaccgctgtttggctccctcgatccaaggatctaaaaaaacccggggcccggaaacagtag

SEQ ID NO: 124163 - DNA, 1818 bp, synthetic construct
  misc_feature 1..1818: note = Description of Artificial Sequence: Synthetic coding sequence
  source 1..1818: mol_type = other DNA
atggctgaagactggttggattgtccagccctcggtcccgggtggaaaaggagggaagtgttccgcaaaagcggggcgacgtgtggcagaagtgacacatattaccagtcgccaactggagacagaattcggagcaaggtggagctgacaaggtacctgggaccagcttgcgacctgacactttttgactttaaacaaggaattctatgctaccctgctcccaaagcccatcctgttgctgtcgccagtaaaaagagaaagaagccctcccggcctgccaaaacacggaaacgccaagtgggaccccagagtggagaggttaggaaagaagctcctcgggacgagaccaaggcggatacggacacggcaccggcctctttcccagccccaggttgctgtgaaaattgcggcatttccttttctggagatggaacccaacggcagaggctgaaaacattgtgtaaggactgtcgcgcacaaagaatcgccttcaatcgcgagcagagaatgttcaaaagggtggggtgtggggaatgcgcagcttgtcaggtgacagaggattgtggcgcctgcagcacttgcctcctgcagctcccccatgacgttgccagcggcctgttttgtaagtgcgagagacgtcggtgtctacgcatagtcgagaggagcagggggtgcggcgtttgtagagggtgtcaaacacaggaggactgtggacattgtcccatctgtctcaggccccccagaccaggcctcaggcggcagtggaagtgcgtgcagcgacggtgtctgcggggaaaacacgcgcggcgcaagggcggatgcgacagtaagatggccgcacgacgccgtccaggagctcagccgcttccccccccccccccgagtcaaagtccagagccgactgaacctcaccctcgggcactcgctccaagccctcccgctgagtttatttattactgcgtggacgaggacgagctgcagccatataccaaccgtcgccagaacaggaagtgtggagcttgtgccgcctgcctgcggaggatggactgcggccgctgcgacttttgttgcgataagcctaagttcggagggtctaatcagaaaagacaaaagtgccggtggcggcagtgtctacaattcgctatgaagcgcctcctgccatccgtctggtccgagtcagaagacggggctggatcccctcccccataccgaagaaggaaacgaccaagcagcgcaaggaggcaccacctgggccccactctgaaacccactctggctactcgaacagcacagcccgaccacacgcaggccccaaccaagcaagaggcagggggtgggttcgtgcttccacccccagggactgacttagtgttcctcagggagggtgcttctagtcctgtgcaagtaccggggcccgtggccgcctcaaccgaggccctactacaagaggcgcagtgctccgggttgagctgggttgtggctctcccccaggtgaagcaggagaaggcagacacccaagacgaatggacccccggcacagctgtcttgacatcgcctgtattggtgcccggctgccccagtaaagcagtagacccaggcttgccttctgtgaagcaggaaccccccgacccagaggaagataaagaggagaataaagacgacagcgcttccaagctggcccccgaagaggaagctggcggggcagggacacctgtcattactgaaattttttcactggggggtaccaggtttagggacacagccgtttggctgccccgttctaaagatcttaagaagcccggcgctcggaaacagtag

SEQ ID NO: 124164 - DNA, 1971 bp, synthetic construct
  misc_feature 1..1971: note = Description of Artificial Sequence: Synthetic coding sequence
  source 1..1971: mol_type = other DNA
atgggcgggttcaggctaagaactggcagaaatgccgcgttaaacagcgatcggctgctgctgctacctgtggcatcaatggctgaagattggctcgactgtcctgccctgggtccaggctggaagcgtcgtgaggtctttagaaagtccggcgccacttgcggaagatccgatacatactaccaatcacccacaggtgacaggatccgcagcaaggtggagttaacaagatatctcggccccgcgtgcgatctcactctgtttgactttaagcaaggcattctgtgctaccctgcgccaaaagcacaccccgtagccgttgcttcgaaaaagcgtaagaagccttctcgtccagccaagacaaggaaaagacaggtgggaccccagtctggcgaagttcgcaaggaggcaccccgggatgagactaaggctgataccgacactgctccagcctcattcccagcccccggatgttgcgagaattgtggtatttcttttagcggagatggcacgcaaaggcagcggctgaaaaccctgtgcaaagattgtcgcgcccagagaatcgcattcaacagagaacagcggatgtttaagagggtgggctgtggagagtgtgcagcctgccaagtcacggaagattgtggtgcttgctctacctgcctacttcaactgcctcatgacgtcgcgtccggtttgttctgtaaatgtgagagacgacggtgtctccgcatcgtggagaggtccagggggtgcggggtctgcaggggatgccaaacgcaggaagactgtggacactgccccatctgccttaggccgcccaggcccggacttcgtcgacagtggaaatgtgtgcaaagaaggtgcctgcgacacctggcccacaggttacggcgccggcaccagaggtgtcagcgcagaactcccctggcagttgctccgcccaccggcaagcacgccaggcgaaaaggaggttgtgatagcaagatggctgcccgtcgacggccgggagcacaaccactgccacctccccccccctcccaaagccccgaaccaactgagcctcatccccgtgcccttgcaccttcaccaccggctgaatttatatactattgcgtggatgaggacgagttacagccctacactaatcggagacagaatcgtaagtgcggcgcttgtgctgcatgtctgcgacgaatggattgtggtagatgcgacttctgttgtgacaaacctaaatttggcggaagcaaccagaagcgtcaaaagtgtaggtggcgtcagtgcttgcaatttgcaatgaagagactgctgcctagcgtttggtccgaaagcgaagacggggccggaagcccaccaccttaccggcgccgcaagcgcccttcctcagctcgtagacaccacttgggtccaacgctgaagccaacactggcaactagaactgcccagccagatcacactcaagctccgactaagcaggaggcaggtggaggcttcgtgctgccaccaccgggcacagacctggtgtttttacgggagggggcatcatccccagtccaagtcccggggcctgtagcagctagtactgaggccttgctccaggaggcccagtgttctggactgagctgggtcgtcgccctccctcaggtgaaacaggagaaggccgatacccaggatgaatggacccctggaaccgcagtgcttacgtcccccgtgctcgtgccaggatgcccctctaaggcggtggatccaggtcttccaagcgtaaagcaggaaccccccgatccggaggaggacaaagaggagaataaggatgactctgcttccaagctcgcacctgaagaggaagccgggggggccggaactcccgtcatcactgaaatcttttctctaggtggcacacgcttcagggacacagccgtctggcttccgagatcaaaggacctgaagaagccgggcgctagaaagcaatag

SEQ ID NO: 124165 - DNA, 1611 bp, synthetic construct
  misc_feature 1..1611: note = Description of Artificial Sequence: Synthetic coding sequence
  source 1..1611: mol_type = other DNA
atggccgaagactggctcgattgcccagctttagggcccgggtggaagcgacgcgaggtgttcagaaagtcaggggccacctgcggaagatccgatacgtactatcagtcacccacaggagacagaatacggtccaaggtcgagttgacccgttacctcggacctgcctgcgatctaaccctgttcgacttcaaacaaggaattttatgctacccagccccaaaggcccaccccgtggccgtggcctccaagaagcgcaagaagccatctcgccctgcaaagacacgtaaacggcaggtggggcctcagtcgggggaggttaggaaggaagcgcctagggatgaaacaaaagctgacaccgatactgccccagctagctttcccgctccaggctgttgcgaaaactgcggtatcagtttctctggcgatgggactcagcgccagagattaaagacgctgtgcaaggactgtcgcgcacagagaatcgcctttaaccgcgagcagcggatgttcaaaagggtcggttgtggggaatgcgccgcctgccaagttacggaagactgcggagcctgctctacttgcctgctccagctcccacacgatgtcgcctctgggctgttctgcaagtgcgagaggcggcgatgtttgcgaattgtcgagcgctctcggggttgcggtgtctgcagaggctgtcagacacaagaagactgtgggcactgcccaatctgcttgagaccccccagacccgggcttaggcggcaatggaaatgcgtccaacggcgatgtctgcggggtaagcacgcaagaaggaagggaggatgcgattccaaaatggctgcccggcggcggcccggggctcagccgttaccacctccgccccccagccagtcccctgaacctaccgagccacagccctacaccaatcgacggcagaaccgcaagtgcggcgcctgcgccgcatgtctccggaggatggactgtggtcgatgcgatttctgctgcgataaacccaagttcgggggcagcaaccagaagcggcagaagtgtagatggcggcagtgccttcagtttgcaatgaaaagacttctgccatcagtttggtcagagagcgaggacggggcaggtagtcctcctccataccgtagacggaaaaggccttctagcgcacgccgccaccatttggggccaaccctgaagccaactctggctaccagaactgcgcaacctgaccatacccaagctcccacaaaacaggaagccggtggggggtttgtgttaccgccacccggcacggatttagtgtttttgagagagggggctagtagtccggttcaggtgcctggaccagtcgcagcctccacggaagctctattgcaagccgtagaccctggtctcccttctgtgaaacaggagccaccagacccagaagaagataaagaggagaacaaggacgacagtgcctctaagttagcccctgaggaagaggccggcggcgcgggtactcctgtaattactgaaatcttttcactcggtggcacaaggtttcgcgataccgcggtgtggttacctaggtccaaagacctgaaaaagcccggcgctcgaaaacagtag

SEQ ID NO: 124166 - DNA, 1893 bp, synthetic construct
  misc_feature 1..1893: note = Description of Artificial Sequence: Synthetic coding sequence
  source 1..1893: mol_type = other DNA
atggccgaagattggctggactgcccagcccttgggcctggatggaagcgccgcgaagtgtttcggaagagcggagccacctgtgggaggagcgacacatattaccagtccccgactggggacaggatacgcagcaaagtcgagctgacccgctatctgggaccggcgtgtgatctgactctcttcgatttcaagcaggggattctgtgctaccctgcccccaaagcccaccctgtggcagtggccagcaagaagcgcaagaagcctagtcgccccgccaagacaagaaaacgacaggtgggcccgcagtccggggaggtccgaaaggaggcacccagagacgagaccaaagcagacacggacaccgccccagcttccttcccagcaccgggatgttgcgaaaattgtggaatctctttctccggtgacgggactcagaggcagcgcctcaaaacgctctgcaaggattgtagggcccagaggattgcattcaatcgcgagcagcgtatgttcaagcgggtagggtgcggagagtgcgccgcatgccaggtgaccgaggattgcggcgcgtgcagcacctgcttgctgcaactccctcacgacgtggcgtcaggactgttttgcaaatgtgagcggcgaaggtgcctgcggatcgtggagaggtccagaggctgtggcgtctgtcgtggttgtcagacccaggaggactgtggccactgccccatttgcttacgcccacctagaccaggcctgaggagacaatggaagtgtgttcaaaggagatgtctacgacacctggcgcatcgcctgcggagacggcaccagcgatgccagcgaagaactcctctggcggtcgcgcctccaaccggaaagcatgctcgacggaaaggaggttgcgactctaagatggccgcccggcggcgacctggtgcccagccactgccccctccgcctccatcacagtcccccgaacctactgagccacacccgagggcgcttgcaccgagtccgcccgccgagttcatctactattgcgtggatgaagatgaactccaaccatacaccaatagaaggcaaaatagaaaatgcggcgcctgtgcagcttgtttgcgtagaatggactgcggcaggtgtgacttctgttgcgacaaacccaagtttggagggtctaatcagaagcgacagaaatgcaggtggagacagtgcttgcaattcgccatgaaaagattgctgccctcagtatggtctgaaagcgaagatggcgcaggctccccacccccatatcgaagaaggaagcggcctagttcggcaaggcgacatcacttgggtcctaccctaaagcctactcttgcaactcggaccgctcagccagatcatacacaagcccccacaaaacaagaggctggggggggcttcgtcttgccacctcccgggaccgatttggtgttcctcagagagggcgccagttctcctgttcaggttccagggccagtggcggcctctaccgaggccctcttgcaagaggcccagtgttctggcttatcatgggttgtcgcactgccacaggtcaaacaggagaaggccgatacacaagacgagtggactcctggcaccgctgtactgacttctcctgtcctcgtgccgggttgtcctagcaaggcggttgaccctggtcttccatctgtgaagcaggaacctcctgatccggaggaggacaaggaagagaataaggacgattccgcctctaagcttgcccctgaagaggaagcagggggtgccgggacaccagtgatcacagagatcttcagtctagggggcactcggtttagagacacagcagtgtggctgcctcgctccaaagacctgaaaaagcccggagctcggaagcaatag

SEQ ID NO: 124167 - DNA, 1704 bp, synthetic construct
  misc_feature 1..1704: note = Description of Artificial Sequence: Synthetic coding sequence
  source 1..1704: mol_type = other DNA
atggctgaggattggctggattgccctgcattaggtccagggtggaagcgaagggaggttttccgcaagagcggcgctacgtgtggcaggagtgacacttattaccagtcacccactggagatagaatcagatcaaaggtggaactcacgaggtacctgggtccagcgtgtgacctgaccctcttcgactttaaacaaggcatactctgttatcctgcacccaaagcccatcccgtggctgtggctagtaaaaagaggaaaaagccctctagaccggccaagactagaaagaggcaagtgggtccccagtccggcgaggttaggaaggaagcgcctagagacgagactaaagctgacaccgataccgcccccgcctcctttcctgctccgggctgttgtgaaaactgtggtataagcttttccggcgatggaacgcagagacagcgcctaaagacactttgtaaagattgccgcgcgcaacgcatagcattcaatcgagagcagcggatgttcaagtcacgcggctgtggggtatgccgaggatgtcagacccaagaggattgcggccattgtcctatctgcctgcgacctcctcgccccggactgagacgacagtggaagtgtgtgcagcgccgatgtctccgtggcaagcatgcgcgccggaagggcggctgcgattctaaaatggccgcccgaagacgtccaggcgctcagccactgcccccaccaccaccgtcacagtcccctgagcccaccgagccgcatccgcgcgctctcgcccctagcccccccgccgagtttatttattattgtgttgatgaggacgaactaccttatacaaaccgccggcaaaatagaaaatgcggagcatgtgccgcttgcctcagaaggatggattgtggccggtgcgacttttgctgtgacaagcccaaattcggaggctcaaaccagaagcgacaaaaatgccggtggaggcagtgcctccaattcgctatgaagcggctgctgccctccgtctggagtgagtccgaagatggggccggttcaccacccccttataggagaagaaaacggccgagctctgccaggagacatcacctcggccctactctgaagcccactctggctactcgcaccgcccagcctgatcacacccaggctcctacaaagcaggaggcggggggtgggttcgttctgccaccacctggcacggatctagtcttcctcagagaaggtgccagcagccctgtgcaagtaccgggccccgtggccgcctccacggaggccctgctgcaggaggcgcagtgcagcggcctttcctgggtcgtggctctcccccaggtaaagcaagagaaggccgacacgcaagatgagtggacccctggaaccgccgtgctcaccagtcccgttttggtgcccggctgtccttcaaaggccgtagatccaggcctgccatccgtgaagcaagaacctcctgaccctgaggaggataaggaggaaaacaaggatgatagcgcttccaaattggcgccagaagaagaggccggtggggcgggtacacccgtcatcaccgagatcttctccttgggagggacacgcttcagggacacggccgtttggttacctcgctactaccacctggccctggattggaagtgcaactgcggctatcatctgtgctgcaggagcgtcctcgtgccatag

SEQ ID NO: 124168 - DNA, 1608 bp, synthetic construct
  misc_feature 1..1608: note = Description of Artificial Sequence: Synthetic coding sequence
  source 1..1608: mol_type = other DNA
atggccgaggattggttggactgccccgctcttggccccggctggaagagaagagaagtcttccggaaatctggggccacttgtggtcggtctgacacttactatcagtcacccacaggagatagaattcgctctaaagtcgagctaaccaggtatctgggacctgcgtgcgacttgaccctattcgactttaaacagggcatcctgtgctatcctgcccccaaagcccaccccgtcgcagttgcttctaagaagagaaaaaaaccgtctaggccagctaaaactagaaaaaggcaggtgggcccccagtctggcgaggtgaggaaggaagcaccgcgggacgagactaaagccgacactgacacagcccccgcaagcttccccgcccccggctgctgcgaaaattgcggcatcagcttcagtggcgacggaactcagaggcaaaggttaaagaccttgtgtaaggactgcagagcgcagagaatcgccttcaatcgggagcagagaatgttcaagcgggtgggatgtggagagtgtgccgcctgtcaggtcactgaggattgcggcgcttgcagcacatgtctccttcagttgccccatgatgttgcctcaggcctgttctgcaagtgtgagaggcggcgttgtctgagaatagtcgaacgatcgaggggctgtggggtgtgtagaggatgccagacccaggaagactgtgggcactgccccatctgtctgaggcctccccgtccaggcttacgaaggcagtggaagtgtgtgcagcggcgctgcctaagggggaagcacgctaggagaaaggggggctgcgatagtaaaatggctgctaggcggcggccaggcgcccagccactgccgcccccaccgccctctcagagccccgagccaacagagcctcatccccgtgcccttgcacctagcccaccggccgagttcatctactattgcgtggacgaggatgagctgaaaagactgctgccgtcagtgtggtccgagagcgaggacggcgctggttcccctcccccttacaggaggcgcaagcgcccctcaagcgcccgaaggcatcatctcggtcccaccctgaaacctacactcgcaacacgtacggcacaaccagaccatactcaggcacctaccaaacaggaagccggtggtggatttgttcttcccccgcctggaacagacctggtctttctaagagaaggagcatcgagcccagtccaagtgcctggtccagtggccgcatccacagaggccctcctgcaagccgtcgaccctggcctgcccagcgttaaacaagagccgccagatcccgaggaagataaggaggagaataaagatgatagcgcaagcaagctggcgccagaggaggaggctgggggagccggcactcccgtgattaccgagatcttcagtctaggcggcacacggttccgggataccgcggtgtggctccctcgggccggtaccagagaaggaaagatggatgtgaaatgcggtcggcctcgcacccaatggagcccgcgcgctcgtgccggcacacatgaggatggtctggagcccatgtcggtcagtcatcatttacagctaaggtag

SEQ ID NO: 124169 - DNA, 1968 bp, synthetic construct
  misc_feature 1..1968: note = Description of Artificial Sequence: Synthetic coding sequence
  source 1..1968: mol_type = other DNA
atggctgaagattggctggactgccctgctctgggaccagggtggaaaagaagagaagtttttcggaagagcggcgccacatgcggtaggagcgatacctactatcaaagccctacaggcgatcggatccgtagtaaagtcgaactcacacggtatctgggacccgcatgcgacctgacactctttgattttaagcaggggattctgtgttaccctgcgcccaaggcccaccccgtggcagtggcctcaaagaagaggaaaaagcccagccgccccgcgaaaactcgcaaacgacaagttggtccgcagtccggagaggtgcgtaaggaggctccccgggacgagacaaaagccgacactgataccgccccggcaagctttcctgcacctggatgttgcgagaactgtggaattagtttttccggcgacggaacgcagaggcagcggctgaaaaccctgtgcaaggattgcagagcccagcgcattgcctttaacagggagcagaggatgtttaagcgggttggttgcggagagtgcgccgcatgtcaagtaactgaggactgtggagcttgctccacctgtctgctccagctcccccatgacgtggcctccgggcttttctgtaaatgcgaaagaagacgatgcctcagaatagtagagcggagccgcgggtgcggggtgtgccggggctgtcagacgcaagaggactgcgggcattgtccaatatgcctccgccctccgagacctggactgaggcggcaatggaagtgcgttcagaggcgttgtttgagggggaagcacgctagaaggaaaggtggttgcgacagcaagatggccgctagacgcagaccaggtgcccaacccctgcctcctccaccacccagtcagtccccagagcccaccgagccccaccctcgagcgctggctccatcccctcccgcagagtttatctactattgcgtggatgaggatgagttgcagccatataccaaccggaggcagaaccggaagtgcggtgcttgtgcggcctgtttgcgtcgtatggactgtgggcggtgtgacttttgctgtgacaagccaaagttcgggggcagcaatcagaaacgccagaagtgcaggtggagacagtgtctgcagttcgcaatgaaaagactgttacctagtgtgtggagtgaaagcgaagatggagctggatcccctccaccgtatcgtcgcaggaaaagaccatcatctgctaggaggcatcatctggggcccacactcaaaccaacactggccacaagaactgcacagccggatcatacacaagcccccacaaaacaggaggccggaggcggtttcgtgttgccccctcctgggactgatctggtgtttcttagggaaggcgcaagtagtcctgtgcaggtgcccggaccagtcgccgcgagtaccgaagctctgctccaggaggctcagtgtagcggcctgagctgggtggttgcactgccccaggtcaagcaggagaaggcagatacccaggatgagtggaccccaggcaccgccgtcctgacgagccctgtcctggtgccaggctgtccatccaaagccgtggatcccggcctgccaagcgtcaaacaagagcctccggatcctgaagaagataaagaggagaataaggacgatagcgcctccaagctcgcccctgaggaagaagccggtggggccggcacccctgtcattaccgagatcttcagcctcggcggcacacggttccgagacactgcagtttggttgccgagcctacaggggaggcacagcggtcgtgaagatggctgtaaggtctgggagaccgaggacaccgttgagccaaccagcacatcttggaatccccgggggtggcccgggacgcacgtctctctgagcccgccccccgctagtatgatgtgggttagttgcaggcgctcatggtgtcccagcagtcagtcttag

SEQ ID NO: 124170 - DNA, 1236 bp, synthetic construct
  misc_feature 1..1236: note = Description of Artificial Sequence: Synthetic coding sequence
  source 1..1236: mol_type = other DNA
atgagggcccaccctggcggcggaagatgttgccctgagcaggaggagggtgaatctgcagcaggaggatcaggcgctgggggtgatagtgcaatcgagcaaggtggacaaggttccgccctcgcccctagcccggtttccggtgtgcggcgcgaaggtgcaagaggaggcggccgggggcgaggccgatggaagcaggccgggaggggaggtggcgtctgtggaaggggccgcggcaggggccgcgggcgcggcaggggtagaggccggggacgtggtcggggcaggccgccttcgggtggaagcgggctaggaggagatgggggtggctgtggcggaggtggcagcggtggcggaggggcaccccgccgggagcctgtcccttttccctccggctctgctggacccggaccgagaggacctagggcaacggaatctgggaaacgtatggattgtcctgctctaccgcctggatggaaaaaagaggaagtgattaggaagtcaggcttaagtgccggcaaatctgacgtgtattatttctcaccatccggcaagaagttcaggtccaagccgcagctcgcccggtacctaggaaacacagtcgatttgagtagcttcgatttccggaccgggaaaatgatgcccagtaaactccaaaagaacaagcagagattacgaaacgatccccttaaccagaataaggggaaacccgaccttaacactaccttgcctatcaggcagacagccagcatcttcaagcagccggtgaccaaggtgactaaccatcctagtaacaaagtgaagtcagacccacagagaatgaatgagcagccgaggcaactgttttgggagaagaggctccagggcctctcagcttccgacgttactgagcagattatcaaaaccatggaactgccaaagggcctgcaaggagtcggtccaggcagcaacgatgagacacttctatcagccgtggcctccgccctgcacacctcttcagcaccaataactgggcaggtgagcgcagctgttgaaaaaaatcctgctgtgtggctgaacacttctcaacctctctgcaaagcgttcatcgtcacagatgaggatattcgaaaacaggaagagcgggtgcaacaagtgaggaaaaagttggaggaggccctgatggcggacatcctttcaagagccgctgatacagaggagatggatatagagatggactccggcgatgaggcatag

SEQ ID NO: 124171 - DNA, 909 bp, synthetic construct
  misc_feature 1..909: note = Description of Artificial Sequence: Synthetic coding sequence
  source 1..909: mol_type = other DNA
atgagagcacatcccggaggagggcgttgctgtcccgagcaggaagagggcgaaagcgcggcaggtggatctggtgctgggggagattcagctatcgaacaagggggtcaaggatcggctctggcccctagccccgtgtctggggtcaggcgcgagggagcgagagggggaggaagggggcggggcaggtggaaacaagctggacgggggggcggagtatgcggtagaggacgcgggcgcggacggggccggggcagaggcagggggagagggcgtggaaggggtcgaccacccagcgggggctcgggtctcggtggcgatggaggaggttgtggaggcggcggctctggcggagggggagctccacgccgggagcccgtcccattcccctcaggcagcgccggacctggcccacgtggccccagagcaaccgagtccggaaaaagaatggactgcccggctcttcctcccgggtggaaaaaggaggaagttatacgcaagagtggactctctgccggcaagtctgatgtgtactacttcagcccgagcggcaaaaagttccggtcaaaaccacaactggcgcggtacctggggaacaccgtggatctgagctccttcgattttagaacaggtaagatgatgccctctaaactgcagaagaacaagcagcgactcaggaacgatcccctgaatcagaataaattgcgctggaatacacataggcccgcaccatggcatgcactgtcacgcttgtgtttattgatccggtgcctgctctgcttggaatgcgcctacccactgccgctccatctggttaattcatactcgagtaagacgcagctccactgtctgcacctctgggaggcctgccccgcatacagcaggcagaatcagagctttccaccctag

SEQ ID NO: 124172 - DNA, 909 bp, synthetic construct
  misc_feature 1..909: note = Description of Artificial Sequence: Synthetic coding sequence
  source 1..909: mol_type = other DNA
atgcgggcccaccccgggggtggcaggtgctgccccgaacaggaggagggtgaatctgccgccggtggaagcggagctggtggggactccgctatagagcaaggtgggcaggggtcagccctagccccctctcccgtcagtggcgttcgaagagaaggcgccagaggcggaggaagggggcgcggccgctggaaacaggctggaagagggggaggggtgtgtggtcggggtagaggccgcggccgaggccgcgggcgcgggaggggaaggggcagggggaggggccgacctccatccgggggcagcggtctgggtggtgatgggggtggctgcggaggcggcggaagtgggggcgggggggcccctcggagagagcccgtcccctttccgtccggctcagccggccccggaccgcggggaccacgggctacagagtccggcaaaaggatggactgccccgctctgccccccggttggaaaaaggaagaggttatccgcaagtctggcttaagtgccgggaaaagtgacgtgtactactttagtcctagtggcaagaaatttcgtagcaagccacagctggcaaggtatttggggaatacagtagacttatctagttttgactttcgcaccggaaaaatgatgccctctaagcttcaaaaaaacaagcagcggctcagaaacgaccctctaaaccagaacaaacttaggtggaatacccaccgccccgctccatggcatgctctctcacgactttgcctgctgatccggtgtctcctgtgtctggagtgcgcataccctcttccgctgcatttagtgaatagctattccagcaagacccaactgcactgcctgcatctgtgggaagcatgtccggcctacagccggcagaatcagtcattcccaccttag

SEQ ID NO: 124173 - DNA, 876 bp, synthetic construct
  misc_feature 1..876: note = Description of Artificial Sequence: Synthetic coding sequence
  source 1..876: mol_type = other DNA
atggagcgcaagcgttgggagtgtcccgcccttcctcagggttgggaaagggaggaggtccctcggcgcagcgggctgagcgctggccacagggacgtgttttattacagcccatctggcaaaaagtttagaagcaagccccagctcgcccgatacctcggaggctctatggacctctccacttttgactttcgcacaggcaagatgctgatgtcgaaaatgaacaagtctaggcagcgcgtgcggtacgactcttcgaaccaggttaagggaaaacccgacttaaacaccgctttacctgtgcgccagacagccagtatctttaagcaaccagtgacaaaaatcaccaaccatccatcaaataaggtgaagtcggacccacagaaggccgtggatcagcccaggcaactcttctgggagaaaaaactgtctggactgaatgcctttgatatagctgaagagctcgtcaaaactatggatttgccaaagggtttgcagggggtcggtccagggtgtaccgacgagacactgctctctgccatagcaagtgcactgcatacctcaaccatgcctatcaccggccagctgtccgcagcggtggagaagaaccctggagtgtggttgaatacgacacagccgctctgtaaggccttcatggttactgatgaggatatccggaaacaagaagagttggttcagcaggtaagaaagaggctagaggaggccctgatggctgacatgttggcacacgtcgaggagctcgccagggacggcgaggcacccctcgacaaggcttgtgctgaggacgacgacgaggaggacgaagaggaggaagaggaagaacccgaccctgatcccgagatggagcacgtgtag

SEQ ID NO: 124174 - DNA, 780 bp, synthetic construct
  misc_feature 1..780: note = Description of Artificial Sequence: Synthetic coding sequence
  source 1..780: mol_type = other DNA
atggaacgtaaatccccctcaggaaaaaaattcagaagcaaacctcaactggctaggtatttgggcggcagcatggacttgagcacttttgattttcgtaccggcaagatgctgatgtcgaaaatgaataaatcaagacagcgcgtccggtatgactcctccaatcaggtgaaggggaaacctgacctaaataccgccctgcctgttcgccagacagcgtcaatcttcaagcagccagttacaaagatcacaaaccatccttcaaacaaagtcaagtctgatccgcagaaagcggtggaccagcccaggcaactattctgggagaaaaaactgtctggtctgaatgcgtttgacatcgccgaagagttggttaagaccatggacctgcccaagggactgcagggtgtcggtcctggatgtacagatgaaactctgttgagtgcgatcgcttccgccttgcacacctccaccatgcctattactggccagctgagtgcagctgtggaaaagaaccccggcgtgtggctcaacaccacacagccgctctgcaaggcattcatggtaaccgacgaggacatccgaaaacaggaggaactggtgcagcaggtgagaaagagactggaggaagcactgatggctgatatgctggcgcacgtagaggagctggctcgtgatggcgaggcgccccttgacaaggcctgtgccgaagacgacgatgaagaagatgaggaggaggaggaggaagagcccgaccctgacccagagatggagcacgtatag

SEQ ID NO: 124175 - DNA, 4485 bp, synthetic construct
  misc_feature 1..4485: note = Description of Artificial Sequence: Synthetic coding sequence
  source 1..4485: mol_type = other DNA
atgaacggcggaaaggagtgtgacggtggggacaaggaaggcggactccctgccatccaggttccggtcggttggcagcggagagttgaccaaaacggggtgctctatgtctctccaagcgggtcacttttaagctgtctggagcaagttaagacatacctgctgaccgatggaacctgtaaatgtggtctcgagtgcccgctgattctcccaaaagtttttaactttgatcctggcgcagccgtaaagcagagaactgccgaagacgtgaaagcagacgaagatgtaacgaaattatgcatacacaagcggaaaattatcgcagtggccactctccataagtctatggaagccccacacccctccctcgtcctgacctcccctggcggcggaactaatgctacgcccgtcgttccgagcagggccgccacacctcgatcagtaaggaacaagagtcacgaggggataacaaatagcgttatgccagagtgtaagaatccctttaaacttatgattggaagcagtaatgccatggggcgactttatgtgcaggagctcccaggcagccagcagcaggagctccaccccgtgtacccaagacagaggctcggttctagtgaacacggccagaagtcacctttcaggggatcccatggtggcctcccctcccccgcctctagtggatcacagatatatggcgacggctcaatcagcccccggactgaccctttggggagtcccgacgtgtttacccggagcaaccccggcttccatggcgctccaaacagttcaccaatccacttgaacagaaccccccttagtcccccctccgtcatgcttcacgggagtcctgttcaaagctcctgcgctatggccggccggacaaacatccccctctccccgaccctcactaccaaatcccctgttatgaaaaagcccatgtgtaacttcagcacaaatatggagatccctagggccatgttccaccataagccaccccagggccctccaccgcctccccccccaagttgcgccctccagaagaaacccctgacaagtgagaaggacccgctgggtattttggatcccatcccctccaagcccgtgaatcagaatccagtgataattaacccgacctcattccacagcaacgttcatagccaggtgcccatgatgaacgttagtatgcctccagcagtagtccctctaccttctaaccttcccttaccgacagtgaagccagggcacatgaaccacggctctcacgtgcagagagttcagcacagtgcctccaccagtctcagcccctctcctgtaacctcccccgtccatatgatggggaccggcattgggcgaatcgaagccagccctcagcggagcaggtcttcgagtacatcttccgatcacggcaacttcatgatgccccccgtggggccccaagctacgtcaagcgggattaaggtgccgcctaggagtccccggtccacaatcggttcacctagacccagcatgcctagttccccctccacaaagtctgacggacatcatcagtacaaggacattcccaaccctctcattgccgggatttcgaacgttctgaataccccaagcagcgctgctttccctaccgcctcagcgggcagcagctcagtcaagagccaacctggcctgctcgggatgccactgaatcagatcttgaatcagcataacgccgccagcttcccggccagtagcttactgtccgctgctgccaaggctcagctggccaaccaaaacaagctagcaggcaacaactcatccagcagctccaattcgggggctgtagctggctccggaaacacagaggggcacagtaccctcaatacaatgttccccccgacagccaatatgttgcttcccaccggagaaggtcagtcgggccgcgccgccctgcgagacaagttgatgtcccagcaaaaggacgcccttcgcaaacgcaagcagccccccaccaccgtgctctcactgctcagacaaagtcagatggactcatccgctgtgcccaaacctgggcctgacctgctgagaaagcaaggccaagggtcgtttcccatctccagcatgagccagttgctgcaaagtatgtcctgtcagtcctctcacctctcttccaattccaccccgggctgtggggccagtaatactgctctgccatgctctgctaaccaactccactttaccgaccccagcatgaattcttccgtgcttcagaacattcccctgcggggagaggcagtgcactgccacaatgctaacacaaatttcgtgcattcaaactcacctgtgcctaatcaccatctggctgggctgattaaccagatacaggcttccggaaattgtggaatgctaagccaatctggtatggctctcggcaactcacttcacccaaaccctccccagagtcgaatctctacgtccagtaccccagtcatcccaaattccatcgtttcctcttacaatcagacttcaagtgaagcagggggcagtggtcctagtagctctattgcaatagctgggactaatcacccggctataactaagactactagcgtgctgcaagacggtgtaatagtcacaaccgcagctggaaatccgcttcagagccagctccctattggctccgactttccctttgtaggtcaggaacacgcattacatttcccctctaattccacctcaaacaatcatctaccccaccctttgaatccttctctgctctcgtcactgcctatttcgttaccagtgaatcagcagcacctcctgaatcagaacctcttgaatattctgcagccatctgctggggagggggatatgagctccattaataacactctgtctaaccaccaactcacccatctgcaatctctgttgaacaataaccaaatgtttcccccaaatcagcagcagcagcaactgctccagggctaccagaatttgcaggcatttcagggacaatccacaatcccgtgtccagccaacaataacccaatggcttgtcttttccagaattttcaggtgcggatgcaagaggacgcagccctgctcaacaaacgaatcagtacccaacccggtttgactgctctgcccgaaaatccgaatacaacactgccaccattccaggacactccatgtgagctgcagccccgaatagatcctagcttgggccagcaggtgaaagacggcctggtcgtcggaggcccaggcgacgcgagcgtggacgctatctacaaggctgttgtggacgctgccagtaaggggatgcaggttgtgatcaccactgcggtgaactccaccacccaaatcagtcctatcccggctctgagcgccatgtccgccttcaccgccagcatcggagacccactgaatctgagcagtgccgtgtcagcggtgatccatggcaggaatatgggtggagttgatcatgacggtagactcagaaactcccgcggcgcccggctccccaagaacctggatcatgggaagaatgtgaacgagggcgatggattcgagtattttaagtccgctagctgccacacatcgaagaagcagtgggacggtgagcagagtcctcgtggcgagcgcaatcgctggaagtatgaggagttcctcgaccatccgggacatattcattcttccccttgccacgagaggcccaacaacgtgtccacgctccccttcctgccaggcgaacaacacccgatcttgctccccccccgcaattgtcctggagataaaattttggaggaaaatttcagatacaataactacaaaagaactatgatgagctttaaggaaagactcgagaacacagttgagagatgtgcgcatataaatggcaatcgtccccgtcaatctagaggcttcggtgagcttctgtcaaccgccaagcaagacctggtcctggaggaacaatccccaagctcctctaactcccttgagaattcattagtgaaggattacatccattacaacggggatttcaatgctaagagcgtgaacggttgcgtaccaagcccttccgacgccaagtcgatcagttcggaggacgacctgaggaacccggatagcccctcaagcaatgaactgatccactacagaccacgcacatttaatgtgggagacctcgtttggggtcagatcaagggactcacctcctggcctggcaaactggtgcgggaggatgacgtgcataactcgtgtcagcaaagcccagaagaaggcaaagtagagccagagaagcttaaaactctaactgaggggctcgaggcatatagtagagtcaggaagagaaataggaagagcggaaagttaaataaccatctggaggccgccattcatgaagcgatgtcagagctggataagatgtcagggaccgtgcatcagattccacagggggacagacagatgaggccacctaagccaaagaggcggaaaatatcacgatag

SEQ ID NO: 124176 - DNA, 2178 bp, synthetic construct
  misc_feature 1..2178: note = Description of Artificial Sequence: Synthetic coding sequence
  source 1..2178: mol_type = other DNA
atggccgcggcctcagcagtgtctgtcctacttgtggctgctgaaaggaaccggtggcataggcttccaagtctgcttctacctccgaggacgtgggtatggcgccaaaggacgatgaaatacacgaccgccaccggcaggaacataacaaaggtgctgatagcaaaccgcggcgaaatcgcttgccgggtcatgcgcacagccaaaaagctcggggtgcagaccgtggctgtctattccgaggcagatcgcaattcaatgcatgttgacatggccgacgaggcgtattcgataggccctgctcccagccagcagagctacctatcaatggagaagatcatccaagtggctaagactagtgcagcccaggctatccaccccggctgtggctttctgtccgagaatatggaatttgcggagctgtgcaagcaggaaggcattatattcatcgggccgcctcctagtgctattcgggatatgggcattaagagcacctctaagagcattatggcagcagctggagttccggttgtcgagggatatcacggcgaggaccagtcggatcaatgtctgaaagaacacgcccggcgcatcgggtatcccgtcatgatcaaggcagtgagaggaggtggtgggaaaggcatgagaatcgtaaggtccgagcaggaatttcaggagcagctcgagagtgcccgaagggaggctaagaagagcttcaatgatgacgcaatgcttatcgagaaattcgtggacaccccgagacacgtggaggttcaggtgttcggcgatcaccacggaaacgccgtgtatttgttcgagcgcgattgctctgttcagaggaggcaccagaaaatcatcgaggaggcccccgctcccgggatcaaatctgaggtccgaaagaaactaggagaagctgcagtgcgcgctgctaaggccgtgaactacgttggtgcaggcactgtggagtttataatggacagcaaacacaatttctgcttcatggagatgaatactaggctccaggttgagcacccagtcaccgagatgattacagggacggaccttgtggaatggcaactgcgcatcgctgcgggcgagaagattcccctctctcaggaggagatcacgctccaaggtcacgctttcgaagcacgcatttacgccgaagacccatcaaataattttatgcccgtggccggcccacttgtgcacctgtccacgccacgtgctgacccatcgaccaggatagagactggggtgcgccagggagatgaagtcagcgttcactatgaccctatgattgctaagctcgtggtgtgggctgcagatagacaggcggccctgaccaagctgcggtacagcttgagacagtacaacattgtcggacttcacacgaatatcgattttttgttgaacctgtccggccatcccgagttcgaggctggcaacgtacacaccgacttcattcctcaacaccataaacagctgctgctgtcccgaaaagccgctgctaaagaatcgctttgccaggccgccctgggcctgatcttgaaggagaaagccatgaccgacaccttcacgctacaagctcatgatcagttcagtccattttcctcttcaagcggccgcagattgaacatctcatacacccgaaacatgactttaaaggacggaaagaacaatgtggctatcgctgtaacttacaatcacgatggctcatattccatgcaaatcgaggataagacctttcaggttctgggcaacctgtattccgagggtgattgtacctatttaaagtgtagtgtgaatggggtggcttctaaagccaagctcatcatcctcgagaacacaatctatttgttctccaaagagggctccatcgaaatcgacatacccgtgcctaagtatcttagctctgtgtcctcccaagagacacaaggtggtcctcttgcccctatgactggaaccatcgaaaaagtgttcgtaaaggctggcgataaggtaaaggctggcgattcactgatggtgatgattgctatgaaaatggagcacacaataaaaagtccaaaggacggcaccgtgaaaaaagtcttttaccgcgagggagcgcaggccaatcgtcataccccacttgtagagttcgaggaggaagagagcgacaagcgtgagagcgagtag

SEQ ID NO: 124177 - DNA, 1728 bp, synthetic construct
  misc_feature 1..1728: note = Description of Artificial Sequence: Synthetic coding sequence
  source 1..1728: mol_type = other DNA
atggagaagatcatacaagttgctaaaacttcggcagctcagcatattcagagtatcatggccgccgctggtgtccctgtagttgagggttatcatggggaggatcagagcgaccagtgccttaaggaacacgcacgtcggattgggtaccccgtgatgatcaaagcagtccgggggggagggggaaaaggcatgcggatcgtccgctctgagcaggaatttcaggagcagctggagtccgcccgccgggaggcaaaaaagtccttcaacgacgacgctatgctgattgaaaagttcgtcgacactcccagacatgtcgaagtccaggtgtttggtgaccaccatggaaacgcggtctacctgttcgaaagggattgctcagttcagcggagacatcagaagattatcgaggaggcacccgcacccggtatcaaatctgaggtgaggaaaaagcttggcgaggctgccgtacgcgcagcaaaagcagtgaactatgtaggcgctggcaccgttgagttcattatggacagtaagcataacttctgtttcatggaaatgaatactcggttgcaggttgagcacccagttacagaaatgattactggcacagacttggttgaatggcagcttaggatcgccgcgggggagaagatcccactgtcacaggaggaaatcacccttcaaggacacgcctttgaggcgaggatctacgcagaggaccccagcaacaactttatgcctgtcgcaggacccctggtgcacctttccactcccagggcggacccctctacccgcatcgaaactggagttagacagggtgacgaggtgtcagtccattacgatcctatgatcgctaaactcgtggtttgggctgcagacaggcaagctgcactcaccaaactgcggtatagcttgcggcagtacaatatcgtgggcctgcacactaacatcgactttctgctgaaccttagcggccatcctgaatttgaagctggtaacgtccacactgactttatcccacaacaccataagcagctgctcctgtctcgaaaggcagccgccaaggagagcctgtgccaggcggcccttggcctgatcttaaaggaaaaagcgatgacagacacttttaccttgcaggctcacgaccagtttagccccttctcttcctctagtggccgacggctcaacatctcatatacacgaaatatgactctgaaagatggcaagaataacgtggcaatagctgtcacatacaaccacgacggatcatactctatgcagatagaggataagactttccaagtactgggaaatctctattcggagggagactgcacctatcttaaatgctcggtcaatggtgtggcaagtaaggctaagctcataatccttgagaacaccatttacctgttttccaaggaaggcagtatcgagattgatatccctgtccctaaatacctctcctcagtgagttcacaggaaactcaggggggcccactggcgcctatgacgggaaccatcgaaaaggtattcgtgaaagcgggcgataaggtcaaagcaggtgattcactaatggtgatgattgccatgaaaatggaacataccatcaagtcacctaaagacggaacggtgaagaaagttttctaccgagagggcgcacaggctaacagacataccccacttgttgaatttgaggaggaagagtccgataagagggagagcgagtag

SEQ ID NO: 124178 - DNA, 1425 bp, synthetic construct
  misc_feature 1..1425: note = Description of Artificial Sequence: Synthetic coding sequence
  source 1..1425: mol_type = other DNA
atggccgcagcaagcgcagtgagtgtcttactggttgccgctgaacggaatcgctggcataggctgccaagtctgcttctgccacctcgtacctgggtgtggaggcaacggaccatgaagtataccacagcaaccgatgaagcctacagcatcggacctgccccttcccagcagtcatatctttctatggagaaaatcatacaggttgcgaagacttccgcagcccaggcaattcatcccgggtgtggcttcctgagcgaaaatatggaatttgccgagctgtgcaagcaagaaggaatcatattcattggaccacctccttccgcaatcagggacatgggcatcaagagtactagtaagagtattatggccgctgccggtgtgcctgtagtggagggctaccacggggaagatcagtctgatcagtgcttaaaggagcacgctaggcggatcggttaccctgtgatgattaaggcggtcagggggggtggtggaaagggcatgcgcatcgttcggagtgagcaggaattccaggagcagctggagtccgcgcgtcgagaagccaaaaaatctttcaatgatgacgcaatgcttatcgagaaatttgttgacaccccaaggcatgttgaagtgcaggtatttggagatcaccatggcaatgcggtctatctcttcgagagagactgctcggtgcagcgcaggcatcaaaagattatcgaagaggccccagctccagggattaagtctgaggtgcggaagaagctgggtgaagccgctgtccgggcagccaaagccgtgaactacgtcggagccggcactgtagaattcattatggattccaagcataacttctgctttatggaaatgaacacgagactgcaggtggagcatccagtgactgaaatgatcacaggtacagatctggtggagtggcagcttaggatcgctgctggggagaaaatccctttatcacaggaggagattacgctgcaggggcacgcttttgaagccagaatttacgccgaggatccttccaataattttatgccagtggctggaccacttgtgcacctttccacgcctagagctgatccttccaccagaatcgagactggcgtaaggcagggcgacgaggtcagcgttcactacgatccgatgatcgccaagctggtcgtgtgggccgcggacaggcaggcagctttaaccaagctaagatactcattgcgccagtacaatatcgtagggttacacacaaacctgactagctactcgacctgcttagccactcagagcctcaagctagggacgtgtaccctaatttcctccctcaacaccactaacagttgctgcagtgtggggcggctgcagccaaaatcactgtatgcccggcaaccttgggtatcctcatctagacgaaagccctag

SEQ ID NO: 124179 - DNA, 1281 bp, synthetic construct
  misc_feature 1..1281: note = Description of Artificial Sequence: Synthetic coding sequence
  source 1..1281: mol_type = other DNA
atggaatttgctgagctctgtaaacaggagggaatcatattcatcgggccccctcccagtgctattcgagatatgggtattaaatcaacatcaaagtctattatggccgcagctggggtcccagttgtggaagggtatcatggcgaggatcaaagcgaccagtgcctcaaggagcacgcccggcggatcggatatcccgtgatgatcaaggccgttcgaggagggggaggcaaaggtatgaggattgtgcgctccgaacaggagttccaggagcagctggaatccgccaggagagaggcaaaaaaaagcttcaatgatgacgccatgttgattgagaagtttgtagatacccctcgccacgtggaggttcaggttttcggagatcaccatggtaacgcagtctacctatttgaaagagactgctcggtccaacgtcgtcaccagaagatcatcgaggaagcaccagccccaggcataaagagcgaagtgcggaagaaactgggcgaagcggcggtgagagccgccaaagctgtgaactacgtgggggcaggcactgtcgaattcatcatggactccaaacataacttttgttttatggagatgaacacccgcctgcaggtagaacaccctgtaactgaaatgatcaccggcaccgatctcgtcgagtggcagctacggatcgctgccggagaaaaaatccccctgtctcaggaagaaataaccctgcagggtcacgctttcgaggcccgcatctatgccgaggacccgagtaataatttcatgcccgttgccgggccactggttcacctgtcgacaccaagggcggatccaagcactcgtatagagacgggggtgcgccagggggatgaggtttctgtgcattatgatccaatgattgctaagctggttgtctgggccgccgacaggcaggccgcgctgacgaaactgagatactccctgaggcagtataacatcgtggggctccatacaaacattgattttctcctaaatctctctggccaccccgagtttgaggccggaaacgtgcataccgattttattccacagcaccacaagcagctgctgctgtcacggaaggccgccgctaaggagtctctctgtcaggcagctctcggtctaatcctgaaggagaaggccatgactgacacgttcactctgcaggcacatgaccagtttagcccattcagttcctcttccggtcgccgcctaaacatttcgtacactaggaacatgactctcaaagatggaaagaacaactag

SEQ ID NO: 124180 - DNA, 603 bp, synthetic construct
  misc_feature 1..603: note = Description of Artificial Sequence: Synthetic coding sequence
  source 1..603: mol_type = other DNA
atggagaagatcatccaagtagccaagacttcagcagcgcaggccatacatccaggctgtggcttcctgtcagaaaacatggaatttgccgaactgtgtaaacaggaaggtattatttttattggtcctccaccaagcgccatacgtgatatggggatcaagtcaacatctaagtccattatggctgcggctggtgtacctgtggtggaagggtatcatggcgaggaccagtctgaccagtgcctgaaggaacacgcccggcgaataggatatccagtcatgatcaaagccgtccgagggggcgggggtaagggcatgaggatcgtccggagcgagcaggaatttcaggaacagctggagtccgctcgccgcgaggcaaagaagagcttcaacgatgacgcgatgttaatagagaagtttgtggataccccgaggcacgtggaagtccaggtgtttggcgaccaccacgggaatgctgtgtacttgtttgagcgggattgctccgttcaaagaagacaccagaagattatcgaggaagcccctgcacctggtattaaaagtgaagtgcggaagaagggacgcagttgtagtcagtcctgttag

SEQ ID NO: 124181 - DNA, 1578 bp, synthetic construct
  misc_feature 1..1578: note = Description of Artificial Sequence: Synthetic coding sequence
  source 1..1578: mol_type = other DNA
atgtgggccgtgttgcgtctggcattgcgcccatgcgcgcgtgcaagcccagccggtcctcgagcctaccatggcgattctgtcgcatctttgggaacgcaaccagatctgggctcagcgttgtaccaggaaaactacaagcagatgaaggctctggtcaaccaactgcacgagcgggtagaacatattaaattggggggaggggaaaaggcccgggcgctccacatcagtcggggaaaactgctccccagagaaaggatcgataatctgatagatcccggcagcccattcctcgagctgagtcagtttgcaggatatcagttatacgataacgaggaagtgcccggcggcggcattatcactggcatcggcagggtgagcggggtggagtgcatgatcattgccaacgacgctacagtgaagggtggggcctactatccagtaacagtaaaaaagcagttgcgcgctcaggagattgctatgcagaataggctaccttgtatttatctcgtagattcagggggggcctacttgcctcggcaagcagatgtatttccagacagagatcacttcgggcgaacattttacaatcaggctatcatgagcagtaaaaacatcgctcaggttaaagccgcgaccggggaggaggtgtccgcagaggacctgggtggggccgatctccattgccgaaagagcggggtgagcgaccactgggctcttgatgaccatcatgccctgcacctgacacggaaagtagtaagaaatttaaactatcagaagaaattagacgtgacaatcgagcctagcgaggaaccactctttccagccgacgagctgtatgggattgtgggggccaatctcaagcggagctttgacgtccgcgaagtgatcgcccgaatcgtggacggatcccgatttacagagttcaaggctttttacggcgacacactcgtgacagggttcgccagaattttcggctaccccgtgggtattgttggcaacaacggcgtcctgttcagtgagtctgccaaaaaggggactcacttcgtgcaactttgctgtcaaagaaatatccccctgctgtttctgcaaaacataacgggtttcatggtagggagagaatacgaggcagaaggcatcgccaaggatggagcaaaaatggtggcagccgtggcttgcgctcaagtgccgaaaatcacattgatcatcgggggttcctacggagctggaaattacggtatgtgcggccgggcgtattctccgcgttttctttacatctggcccaatgctagaatatcggtgatgggcggggagcaggcagcaaacgtactggcaaccatcaccaaagaccagagagctagggaggggaagcagttttcttctgctgatgaagcagcccttaaagaaccaattatcaaaaagttcgaggaagaaggcaacccttactatagctccgccagggtatgggatgacgggataatagaccccgcagatactcggctggtcctcggcttgtcgttttcagccgctcttaatgctcccattgaaaagaccgatttcggcatctttcgaatgtag

SEQ ID NO: 124182 - DNA, 1692 bp, synthetic construct
  misc_feature 1..1692: note = Description of Artificial Sequence: Synthetic coding sequence
  source 1..1692: mol_type = other DNA
atgtgggccgtgcttcgcttggccctgcgcccgtgcgccagggcttctccagcaggccctcgcgcgtaccatggcgacagcgtagccagtctcggtacccagccggatctgggcagcgctctgtatcaggaaaattacaaacagatgaaggctttggtaaaccagcttcacgagagggttgagcatataaagcttggcggcggggaaaaggcccgcgccctccatattagccgtgggaaattgctccctcgagagagaatcgacaatctgatagaccccggttctccctttttagagttgagtcaatttgcaggctatcagctgtacgacaatgaagaggttccaggggggggaatcattactggcatcggcagggtgagcggagtggaatgcatgatcattgccaatgatgcaaccgtcaaaggtggggcatattatccggtcacagttaagaagcagctcagggctcaggagatcgcaatgcagaaccgactgccctgcatctatttggtcgacagtggtggcgcgtacctaccaaggcaagctgatgtcttccccgaccgagaccatttcggaaggaccttttacaaccaggccatcatgagcagtaaaaatatagctcagatagccgtagtgatgggctcttgcactgctggcggagcatatgtgccagccatggccgacgaaaacattatcgtaagaaagcagggaacaatcttccttgccggcccaccactggttaaggccgctaccggggaagaggtctctgccgaagatctcggtggagccgatctgcactgtaggaagagtggcgttagcgatcactgggcccttgacgatcatcacgcactgcatctcaccagaaaggtggttcggaacctgaactaccagaaaaaactggacgtgactatcgaaccctcagaggagcccctatttcccgccgatgagctctacgggattgtcggggcaaatctcaaacgctcattcgatgtgcgggaggtgatcgccagaatcgtcgacggcagtcggtttacggaattcaaggctttttatggcgatactttggtgacggggttcgctcgcatctttggatatcctgtcggaatagtcgggaacaatggtgtgctgttctcagaaagcgctaaaaagggcactcatttcgtccagctgtgctgtcagagaaacattcctctgctctttctccagaacatcaccggctttatggtggggcgcgagtacgaggccgaaggcatcgctaaggatggcgctaagatggtcgcagcggttgcctgtgcccaagtgccaaaaattactctgatcatcgggggctcatacggagcggggaactacggcatgtgtggtcgagcctattctccccggtttctttacatatggcccaatgcacgcatttccgtcatgggtggcgaacaggcagctaatgtgctcgccacaatcactaaggatcaacgggcccgcgagggaaaacaattctcgtcagctgacgaggctgcgctcaaggagcccattattaagaaatttgaagaagaaggcaacccgtactacagctccgccagagtttgggacgatggcataattgatccggcagacacaagactcgtgttgggtctgagtttcagcgccgcgttgaacgctcctatagagaagactgactttgggatattccgcatgtag

SEQ ID NO: 124183 - DNA, 870 bp, synthetic construct
  misc_feature 1..870: note = Description of Artificial Sequence: Synthetic coding sequence
  source 1..870: mol_type = other DNA
atggctaagcacatccagaaggagatccagagaggcgtggagtcttgggtgtctctgggcaaccgcaggcctcaccttagcataatcctggtgggtgataatcctgcgtcgcatacctacgtcagaaataagatccgtgccgcaagcgccgtgggcatctgttctgagctcatccttaagcctaaagatgtgagtcaagaggagcttctagatgtgacagaccagctgaatatggacccacgtgtctcagggatcctcgttcagctccctctcccagatcacgtggacgagcggacaatctgtaacggtatcgcccctgagaaggatgtcgatgggttccatatcataaacataggaaggctctgcctcgatcaacactcgcttattccagctactgccagcgctgtatgggagatcatcaaacggacggggatacagacattcggcaaaaacgtcgtggttgccggtaggtctaagaacgtgggaatgccgatagcaatgctcttgcatacggacggtgaacacgaaaggccaggtggcgatgccaccgtcactatcgcccatcggtacacccccaaggagcaactgaaaatccatacacaactggcagacatcattattgttgcagcaggaatacctaaactaatcactagcgacatggtgaaggagggcgccgctgtgattgatgtgggaattaactacgtgcatgaccccgtgaccggcaaaaccaagttggtgggagacgtggattttgaagcagtcaagaagaaagcggggtttatcacccctgtgccggggggcgttggacctatgacggttgcaatgcttctcaaaaatacactgctggcggctaaaaaaatcatttattag

SEQ ID NO: 124184 - DNA, 672 bp, synthetic construct
  misc_feature 1..672: note = Description of Artificial Sequence: Synthetic coding sequence
  source 1..672: mol_type = other DNA
atggctaagcacattcagaaagaaattcagcggggcgtcgaaagctgggtgtcactagggaacagacgaccacatctgtccatcattttggtcggggataacccggcttctcatacctacgtgcgtaataagatcagagcggcgagcgccgtgggcatatgttcagagcttatcctgaagcccaaagacgtgtctcaagaggagcttttagacgtaaccgatcagctgaatatggaccccagggtatctggtattctggtgcagttgccactgcccgaccatgtggacgaacgcacaatttgcaacgggatagcccccgagaaagacgttgatgggttccatattataaatattggacggttatgtctagaccagcactcactgatccccgcaacagcctctgcagtgtgggagataatcaaacggaccggaattcaaacctttggcaagaatgttgtggtggcgggccgcagtaaaaacgtgggcatgcctatcgctatgctgctgcacaccgacggcgagcatgagcgccccggtggggatgccaccgttacgatcgcccataggtatactcctaaagagcagctgaaaatccacacgcaactcgcagacatcataattgtggcggcagagcgttttcaccactttgcgcaggatcttagcaactcttag

SEQ ID NO: 124185 - DNA, 762 bp, synthetic construct
  misc_feature 1..762: note = Description of Artificial Sequence: Synthetic coding sequence
  source 1..762: mol_type = other DNA
atggctaagcacatccagaaagaaatacaaagaggggtggaatcctgggtgtccctggggaatcggaggccacatctgagtattatactggtaggtgataatccagctagccacacatatgttaggaacaagatcagagccgcgtccgcggtcggcatttgcagtgaactcatcctgaagcctaaagacgtcagccaagaagaacttcttgacgtgactgaccaattgaatatggaccccagagtcagtggcatcctggtgcaattaccactgccagatcatgtggatgagagaaccatctgtaacggcattgcccctgagaaggacgttgatggctttcacatcatcaatattgggcgactttgtctggatcagcactccctaattcccgctacagcttcggctgtgtgggagattatcaaaagaactgggatccaaacattcggcaagaacgtggtggtggccgggcggtcaaagaacgtgggtatgccgatcgccatgctgttgcacaccgatggtgaacacgagaggccaggcggagacgcgacagttacgatcgcacatcggtatactccaaaggagcagctgaagatacacacacagctggctgacatcatcattgtggctgccggtatcccaaaacttatcaccagcgacatggtgaaagaaggagccgctgtgatcgacgtgggcataaactacgtacatgatccggtgaccgggaagaccaaattggttggcgatgtggatttcgaggcttag

SEQ ID NO: 124186 - DNA, 1044 bp, synthetic construct
  misc_feature 1..1044: note = Description of Artificial Sequence: Synthetic coding sequence
  source 1..1044: mol_type = other DNA
atgaccgtgccggttagaggtttttctctgctcagagggcgtctcggacgagcccccgcactgggaagatcaaccgcaccctcagtccgagcaccaggagagccaggtagtgcttttcggggattccggtcatctggggtccgccacgaggccataatcatatccggcacagaaatggccaagcacattcagaaagaaatccagcggggcgtggagagctgggtcagcttagggaatcgcaggcctcaccttagcatcattctagttggtgacaacccagccagccacacttacgtgcgtaacaagattcgcgccgcgagtgcggttggtatatgcagcgaactgatactcaagccaaaggatgtgagccaggaggagctattggacgtgactgaccaactgaacatggaccccagagttagcggaatcctggtacagctgcctctgccagaccatgtggatgagaggacaatttgcaacggcattgccccggaaaaggacgttgacggattccacattataaatataggacgtctatgcttggaccagcactcgcttatacctgcaactgcctcagcggtatgggagatcatcaagaggacagggattcagacttttggaaaaaacgtggtcgttgctggccgatctaagaatgtcggcatgcctatcgccatgctgctccacaccgatggggagcacgaaaggcccggaggggacgccaccgttacgatcgctcaccgttatacgcccaaggaacagctgaagatccacactcagctggcagacatcatcattgtggccgccgggatccctaagctgatcacttccgacatggtcaaagagggtgctgccgttatcgacgtgggaattaactacgtccacgacccagttacaggcaagacgaaacttgtgggggatgtcgattttgaggccgtaaagaaaaaagccggcttcattacccctgtgcccggaggcgtcgggcctatgacggttgcaatgctgctgaagaataccctactggccgcgaagaagatcatatactag

SEQ ID NO: 124187 - DNA, 441 bp, synthetic construct
  misc_feature 1..441: note = Description of Artificial Sequence: Synthetic coding sequence
  source 1..441: mol_type = other DNA
atggacccacgcgtatcagggatccttgtgcagctgcccctccctgatcatgtggacgaacgaactatatgcaacgggatcgcccccgagaaggatgttgatgggtttcacatcatcaacattggaaggctgtgtctcgatcagcacagtcttattccagcaacggctagcgccgtatgggagatcataaagcgcaccggaattcagactttcgggaaaaacgtcgtggtggccgggcgctctaagaatgtaggaatgcctattgctatgttgctgcacacagacggagagcatgaaagacccggaggcgatgccacagtgacgatcgctcacaggtatactcctaaggaacaattaaagatccatacacaactcgcagatatcattatcgtagccgccgagcgctttcaccattttgctcaagatctgagcaatagttag

SEQ ID NO: 124188 - DNA, 1257 bp, synthetic construct
  misc_feature 1..1257: note = Description of Artificial Sequence: Synthetic coding sequence
  source 1..1257: mol_type = other DNA
atgcccatgcttcttcctcatcctcaccaacattttctcaaaggtttgctccgtgcaccatttagatgttaccatttcatatttcactcctcaacacatctcggttccggtataccctgcgcacagccctttaactccctagggctccattgcaccaaatggatgctgcttagtgatggactgaagaggaaactatgtgtccagactaccctgaaggatcacacagagggcctgtctgacaaggaacagagattcgttgacaaactgtataccggcctcattcagggccagcgcgcgtgtctagcagaagccatcactttagttgagtccactcattctcgtaagaaggagctggctcaggtgctgctgcagaaggtactactgtaccaccgggagcaagaacagagtaataaaggcaagccactggcatttagagtagggctctctggcccaccaggcgccggcaagtcaacttttatagagtacttcggcaagatgctcaccgaaaggggccacaagctcagcgtcctggcggtcgacccaagttcatgtactagcggcgggagtctcctcggggacaagaccagaatgaccgagttgagccgagatatgaacgcatacatcagaccctcccctacaagaggcaccttaggcggagtgacccggactacaaatgaggccattttactttgtgaaggcgcaggctatgacatcatactgatagagactgttggagtgggccagagcgaatttgctgtggcagacatggtggacatgtttgtgctgctgcttccgcctgccggcggcgatgaactgcaggggatcaagcggggaataatagaaatggccgacctggtcgcggttacgaagtccgacggcgatctcattgtgcccgcccgacggatacaggccgaatatgtaagtgcacttaaactcctgcgaaaaaggtcacaagtgtggaagcctaaggtcatcaggatctccgccaggtccggagagggaattagcgaaatgtgggataagatgaaggatttccaggacctgatgctcgctagtggggaactgaccgctaaacgccgcaagcagcaaaaggtctggatgtggaatttgatccaagaatcagttctcgaacacttccggacacacccaaccgtaagggaacagattcccctgctggaacaaaaggtgttgataggagctctgtcacccgggctggccgcagatttcctactcaaagccttcaaaagccgtgattag

SEQ ID NO: 124189 - DNA, 1275 bp, synthetic construct
  misc_feature 1..1275: note = Description of Artificial Sequence: Synthetic coding sequence
  source 1..1275: mol_type = other DNA
atgcccatgctgttgcctcacccccaccagcactttcttaagggcctcctgcgggctccttttagatgctaccattttatcttccattctagcacgcatctgggatccggcatcccctgtgcacaacccttcaactctctcggacttcactgtactaaatggatgctactcagcgatggacttaagcggaagctgtgtgtgcagacgaccctgaaagatcacaccgaaggcctttctgataaagagcagcggtttgttgacaaactgtacactggccttatacagggtcagcgggcatgcctggctgaggcaatcacattggtggaaagcacacacagccggaagaaggaacttgcacaggtgctcttgcaaaaagtcctgttgtaccaccgcgagcaggaacagagtaataagggcaaacctttggcctttagggttggcctctccggcccccccggcgccggcaaatccaccttcatcgaatattttggcaaaatgctcacagaacggggtcacaagttgagcgttctggctgtggatccctcgagctgtaccagcggcggttccctgctaggcgataaaaccagaatgaccgagctgtccagggacatgaatgcttatattagaccatcccctactagagggacgctaggtggcgttacgagaacaacaaacgaggcaattcttctatgcgagggagcagggtacgacatcatcctgattgagacggtgggagtggggcagagcgaatttgcagtcgccgacatggttgacatgttcgtgttgctgttacctccagcagggggggacgagctgcaggggatcaagcgggggatcattgagatggctgatctcgttgcggtgacaaaatcggatggagacctaattgtcccagcacgccgcatccaagccgaatatgtttcggccctgaaactgctcagaaaaagaagtcaggtctggaaaccaaaagtcattaggatttccgcccgcagcggcgaggggatttccgaaatgtgggataagatgaaggacttccaagatctcatgttggccagcggagagctgactgcaaaacggcgtaagcagcagaaggtttggatgtggaacctcattcaggaaagtgttctcgagcattttcggacccaccccactgtacgcgagcagatcccacttctggaacagaaggtgctgatcggtgcactttcacctggattagctgccgattttttgctaaaggccctgaaggcagaaacaaataagatccacccagtgtag

SEQ ID NO: 124190 - DNA, 414 bp, synthetic construct
  misc_feature 1..414: note = Description of Artificial Sequence: Synthetic coding sequence
  source 1..414: mol_type = other DNA
atggccgatctcgttgctgtgactaagagtgacggagacctgatagttcccgccagacggattcaggccgaatacgtgtcagcactgaagctgctgcgtaaaaggagccaagtgtggaagccaaaagtaatacgaatatccgctaggagcggtgaggggatttcggagatgtgggataaaatgaaagatttccaagacctcatgcttgcctctggggaacttacagccaagcgacgaaagcagcagaaggtgtggatgtggaatctaattcaggaaagtgtcctggagcacttccggacccaccctaccgtccgcgaacagatccctctcttggagcagaaggtgctgattggtgccttgagcccgggactcgccgcagattttctcctgaaagcgtttaaatctagggattag

SEQ ID NO: 124191 - DNA, 480 bp, synthetic construct
  misc_feature 1..480: note = Description of Artificial Sequence: Synthetic coding sequence
  source 1..480: mol_type = other DNA
atggctggccttactagattcgccttggaacttgttacagaaaagggacacaccttcgctgaggagttgcagaaaatccaatgtaccctgcaagacgttggtagtgctctggcaacaccatgcagttccgccagagaagcgcatctgaagtataccactttcaaagccgggccaatactggaattagagcagtggattgataaatacacttcccagctgccccctcttaccgctttcatactgccttccggcggaaagattagtagcgccctgcatttctgccgagctgtctgtcgtcgcgctgaaaggagagtggttcccctggtgcagatgggcgaaacagatgccaatgtggccaaatttctgaatagattgagcgactacttgttcacactggctcgctatgccgcaatgaaggaagggaatcaagaaaaaatctatatgaagaatgatccctcagccgaatccgagggcctttag

SEQ ID NO: 124192 - DNA, 753 bp, synthetic construct
  misc_feature 1..753: note = Description of Artificial Sequence: Synthetic coding sequence
  source 1..753: mol_type = other DNA
atggccgtgtgtgggctgggcagtcgcctgggcttggggagtaggttgggtctccgtggatgtttcggagccgcgaggctgctttacccacggtttcaaagccgaggcccgcagggagtcgaagatggggaccggccccagccttccagcaaaacccctagaattcctaagatatacacgaagaccggtgataagggattttcctcgactttcacgggagagcgccgaccaaaagatgatcaagtgtttgaggccgtgggcacaactgatgaactcagctctgccatcggtttcgcgctggaattggtcactgaaaagggacacacattcgcagaggaactgcaaaaaattcagtgtaccctacaagacgtgggcagcgccctcgcaacaccctgttcatccgcgagggaggcacacttaaaatatactaccttcaaagcaggacctatcttagagctcgagcaatggattgataagtatacaagtcagttgcctccgctgaccgccttcatactgcccagcggcggcaaaatttccagcgctctgcacttctgcagagctgtatgccgcagggcggaacgcagggtggtgcctctggttcagatgggcgaaactgatgcaaatgtggctaagttccttaatcgcctgtcagattacttattcaccctcgctcggtatgccgcgatgaaggaggggaatcaggaaaagatctatatgaaaaacgacccctcagctgagagcgagggattatag

SEQ ID NO: 124193 - DNA, 849 bp, synthetic construct
  misc_feature 1..849: note = Description of Artificial Sequence: Synthetic coding sequence
  source 1..849: mol_type = other DNA
atggaacctaaagtggcagagctgaagcagaagatcgaagataccctgtgtccttttgggtttgaagtgtatcctttccaggtggcctggtacaatgagctcctgcccccggcatttcacctgccacttcctgggccgaccctggctttcttggtcctgtctactcctgcaatgttcgatcgggcacttaaacctttcctgcagtcttgtcatctgaggatgttgacagatcctgtggatcagtgtgtggcctaccatcttggccgggtgagggaatcactgcctgaactacagattgaaattatcgccgattacgaggtgcatcctaaccggcgaccaaagatccttgcccaaacagccgcccacgttgcaggggcagcgtactattaccagcggcaggacgtagaggcagacccttggggaaatcaaagaatctcaggggtctgcattcatcccaggttcgggggctggttcgccatccgtggtgtggtgctgttgcctggaattgaggtacctgatctccccccaaggaaaccccacgattgtgtgcccactcgcgctgataggatagccctactggaaggtttcaactttcattggcgcgactggacctaccgggatgccgtgacccctcaggaacggtactcggaggagcagaaagcctactttagcacaccacctgctcagagactcgccctcctgggccttgcccagcccagtgagaagccgagcagcccatctcccgacttgccattcaccactcccgcaccaaaaaagccgggaaacccatcaagagccaggagttggctttcacctagagtgtctcccccagcctccccgggaccttag

SEQ ID NO: 124194 - DNA, 891 bp, synthetic construct
  misc_feature 1..891: note = Description of Artificial Sequence: Synthetic coding sequence
  source 1..891: mol_type = other DNA
atggctaatgtgctgtgtaatagagcccgactggtgtcttatcttcccggattctgtagcttagtgaagcgcgtcgtgaatcctaaagctttctcgacagctggatccagcggcagcgacgaatcccacgtggctgctgcacctccggatatctgcagcaggacggtttggcccgacgagaccatgggacccttcggccctcaggaccagcgctttcagctgccaggaaatatcggctttgactgccacttgaacggcaccgcaagtcagaaaaaatccctcgtgcacaagaccctgcccgacgtgctcgccgagccattgtcttctgaaagacacgagtttgtgatggctcagtacgtcaacgagtttcaggggaatgacgccccagtggaacaggaaattaattctgcggagacatatttcgagagcgctagggtggagtgtgccattcagacttgcccggagctactgaggaaggacttcgagtcactttttcccgaagtcgcaaacggaaagctgatgattctaaccgtgacccaaaagaccaagaatgacatgacagtgtggtccgaagaggtcgagattgagagagaagtgctgttggagaagtttattaacggagcaaaagagatatgttatgcactgagagccgaaggttactgggccgatttcattgacccctcctccggcctcgctttcttcggcccttacacgaacaacacattgttcgaaaccgatgaaagatacagacacttaggattctctgtggatgacctgggatgctgcaaagtgatcaggcacagcctgtggggcacccacgttgtcgtgggctccatttttacaaacgccacccctgattcacacattatgaaaaagttgagcggcaactag

SEQ ID NO: 124195 - DNA, 891 bp, synthetic construct
  misc_feature 1..891: note = Description of Artificial Sequence: Synthetic coding sequence
  source 1..891: mol_type = other DNA
atggccaatgtactctgcaacagggccagacttgtttcatatctgccagggttctgtagtcttgtgaagcgtgttgtcaacccaaaggctttctccacggccggatcttcgggcagcgacgagagccatgtggctgccgccccgccagacatctgctcacggaccgtatggccggatgagactatgggtccatttggaccccaggaccagcgctttcagcttcccgggaatatcgggttcgactgccacctgaacggaaccgcatcccagaagaagtctctcgtccataagacacttccagacgtgctggcagagccgctctctagcgaaagacatgagtttgtaatggcccagtacgtcaacgagttccaaggaaatgatgcgccagtcgagcaggagatcaactccgctgagacctactttgaaagcgccagggtcgaatgtgctattcaaacatgtccagaattacttagaaaggacttcgagtcgctgtttccagaagtggcaaatggtaaactaatgattctgacagtcacgcagaagacgaagaacgacatgacagtttggagcgaggaggtggagatcgagcgtgaggtcctgttagagaagttcatcaacggagcgaaagagatctgctatgcgctccgggccgaggggtattgggccgacttcatcgacccaagtagcggccttgctttctttggcccctataccaataacaccctgtttgaaactgatgagcgctatagacatctcggctttagtgtcgacgacctgggctgttgcaaggttatcaggcattctctatgggggacacatgtcgtagttggaagtatctttactaatgccacccctgacagccatatcatgaaaaaactatccgggaactag

SEQ ID NO: 124196 - DNA, 531 bp, synthetic construct
  misc_feature 1..531: note = Description of Artificial Sequence: Synthetic coding sequence
  source 1..531: mol_type = other DNA
atggctcgagttctgaaggcagcggcagccaacgccgtgggactgtttagtaggctgcaggcccctatccccaccgtgcgcgccagttcaacgtcccaaccattagatcaagtcaccggatctgtgtggaacctgggccggctgaatcacgttgctatcgccgtgccggatctggaaaaagccgctgcgttttacaaaaacatactgggagctcaagtaagcgaggctgtccctctccctgagcacggagtcagcgttgtgtttgtgaatctgggtaataccaagatggagcttctgcaccccttaggccgtgacagccccatcgccggcttcctgcagaagaacaaggctggtggcatgcaccatatttgcatagaagtagataacatcaacgccgccgtcatggacctcaaaaagaagaaaatcagatctcttagcgaggaagtcaagataggcgcccacggcaagcccgtgatctttctgcaccccaaagactgcggaggggtgctcgttgaactggaacaggcatag

SEQ ID NO: 124197 - DNA, 2070 bp, synthetic construct
  misc_feature 1..2070: note = Description of Artificial Sequence: Synthetic coding sequence
  source 1..2070: mol_type = other DNA
atgatcgaaatggccgctgagaaggagccatttttggttccggcacctccccctcctttgaaagacgaaagtggcggcggcggcggacctacggtgcccccccaccaggaagccgcatcgggcgaattgcgcggcgggaccgaacgcggaccagggagatgtgcgccaagtgcgggctctcccgctgccgctgtagggagagagagcccaggcgcagcagccacctctagctctggccctcaggcacagcagcataggggaggaggccctcaggcacagtcgcacggtgaggccaggttgtccgatcctcctgggcgcgccgcccctccggacgtgggtgaggagcgcagagggggcgggggaaccgagttgggcccccccgctcctccacggcctagaaacggctaccagccgcataggccccctggaggcgggggaggaaagcggagaaattcctgcaatgtgggaggcggcgggggcgggttcaagcaccctgcatttaagcgccggaggcgcgtgaattctgactgcgattctgtgcttccaagtaactttctattgggaggcaacatcttcgaccctctgaaccttaacagcctgcttgatgaggaagtctctaggacgttaaatgctgagacacccaaaagctccccactgcccgccaaaggaagagatcccgtcgaaattttgattcctaaagatattaccgaccctctgagcctcaacacctgtacggacgaaggacacgtcgtgcttgcatcacccctgaaaacaggacgaaagagacacaggcatcggggccagcatcatcagcagcagcaggctgcgggaggttcagagagccaccccgtccctcccaccgccccactaacccccttgctgcacggtgagggggcctcccagcagccaagacatcgggggcagaaccgggatgcgcctcagccatacgagctgaacactgctatcaattgccgcgacgaggtggtcagtccactgcccagcgctctgcaggggccctccggcagtctaagtgctccccccgccgccagcgtgatctcagccccgccaagctcttcatcccgtcaccggaagcgcaggcgtacgagtagcaagagcgaagctggggcacggggcgggggccaggggagcaaggagaaagggcgcgggagttgggggggacgccaccatcatcaccacccgttgcctgccgcgggtttcaaaaagcaacagaggaagttccagtacggcaactactgcaagtactatggttaccggaatcccagctgcgaggatggccggctccgggtgctgaaacccgaatggtttcggggtagggatgtgctggatctaggttgcaatgtgggccatctgacgctctctattgcctgcaagtggggaccaagtcggatggtagggctcgatatcgactctaggttgatacactcagcgagacagaacattcgccactacttgtctgaggagcttcgcctgcccccacagacacttgaaggcgaccctggggcagaaggggaagaaggcactaccaccgtgaggaagcggagttgtttccccgcctccctcaccgcaagtcgtgggcccatcgctgccccacaggttccgttggacggcgcagatacctcagttttccctaacaatgtggtctttgtgaccggcaactacgtattggatcgcgacgatctcgtggaagctcagacccccgagtacgacgtggttctgtgtctgtccctgaccaaatgggtgcacttaaactggggcgacgagggactcaaacggatgttccgccggatatacagacatttgcggccggggggcatcttggtgttagagccccaaccttggtcctcatacgggaagcgcaagaccctgactgagaccatctacaaaaactattatcgcattcagctgaaacccgagcagttctcctcttatcttacttctccggatgtaggcttctcatcatatgaactggtagccaccccacacaacaccagtaaagggttccagcggcctgtttatctgttccacaaagcccgctcaccgagccactag

SEQ ID NO: 124198 - DNA, 663 bp, synthetic construct
  misc_feature 1..663: note = Description of Artificial Sequence: Synthetic coding sequence
  source 1..663: mol_type = other DNA
atggtaggactagacattgatagtaggttaatccactcggcccggcagaacattcgacactatctgagtgaggaactgcggctcccacctcagactctcgagggagatccgggagccgagggggaagaaggtacaactactgtgcgaaaacgatcctgttttccggcctctctcaccgcatcgcgtgggcccatcgccgcaccacaggttccactcgacggcgccgacacaagcgtatttccaaacaacgtggttttcgtgactggcaactatgttttggatcgagacgacctggtggaagcacagactcctgaatatgacgtggtgttatgcctctcactcaccaagtgggtccacctgaactggggggacgagggcctcaaacgaatgttccggcgaatataccgtcacctaaggccagggggaattttggtgctggaaccgcagccctggtctagctatggaaagcggaagaccttgaccgagacgatctataagaactactacagaattcagctaaagcctgaacagttttcttcatatttgaccagccccgatgtaggattctcctcatatgagctggtggcaaccccccacaatacctcaaaggggtttcaaaggccagtgtatctattccacaaggctcgatcacctagtcactag

SEQ ID NO: 124199 - DNA, 852 bp, synthetic construct
  misc_feature 1..852: note = Description of Artificial Sequence: Synthetic coding sequence
  source 1..852: mol_type = other DNA
atggctagcgggaccacgaccaccgcagtgaagattggtattattggcggcaccggactggacgacccagaaatcctggaaggcaggactgagaagtatgtggataccccctttggaaagccatcagacgctctcatcctagggaaaattaaaaatgtggactgtgtcctccttgcgaggcacggaaggcagcatacaatcatgccaagtaaagtgaattatcaagccaacatatgggcccttaaggaggaaggatgtacccatgtcattgtgaccaccgcatgtggctcactcagggaagaaattcagcctggcgacatagtcattatcgaccagttcattgaccggactaccatgcggccccagtcattctacgacgggtcccactcctgcgctagaggcgtctgtcacatcccgatggctgagccattctgtcccaaaaccagggaagttttaatagagacagcaaaaaagctcgggctccggtgccatagcaagggtactatggtgacaattgaaggcccccgcttctcatccagggccgaatcttttatgttccgaacatggggtgcagatgtaatcaacatgacaacagtgcctgaggtggtgctagcaaaggaggctggaatctgttacgcttctatagcaatggccacggattacgactgttggaaagagcacgaggaggccgtaagcgtggatagagttctgaagaccctgaaggaaaatgctaacaaagccaagtctctcctgcttaccactattccacagatagggagcactgagtggagtgagaccctgcacaacttgaaaaatatggcccagtttagtgtgttgctgcctcgccactag

SEQ ID NO: 124200 - DNA, 468 bp, synthetic construct
  misc_feature 1..468: note = Description of Artificial Sequence: Synthetic coding sequence
  source 1..468: mol_type = other DNA
atggcagccgaaacgagaaatgttgctggagctgaggcgccccccccccaaaaacggtactacagacagcgggcacatagcaatcctatggcagaccacacccttaggtatccagttaaacccgaggaaatggattggtcagagctctaccccgagttttttgctcctttgactcaaaatcaaagccacgatgaccccaaggacaaaaaggagaagagggcccaggcccaggtggagttcgcagacatcggctgcgggtatggcggactgctcgccgataaggatgtcttacccttacctcgacctacatttcaggccgacaaagcgcaggtggcaaatcaccagtcccaccctgcctctcgaatatgcctgagagccaaatcctggggcgctggggtgtaccacaatcggtgtgcgggggccacacgcctggacgtgcactctttcagacgagcacctactgtgtag

SEQ ID NO: 124201 - DNA, 831 bp, synthetic construct
  misc_feature 1..831: note = Description of Artificial Sequence: Synthetic coding sequence
  source 1..831: mol_type = other DNA
atggccgcagaaaccaggaacgtggcaggagccgaggctcctccacctcagaagcgatattatagacagagggctcattccaaccctatggcagatcacaccctgcggtaccccgtcaaaccagaggagatggattggagtgaactgtatccggagttcttcgcgcccctcacccaaaatcaaagccatgatgacccaaaggataaaaaggagaaacgcgcccaggcccaggtggagttcgcagacatcgggtgcgggtacggcgggctgctcgtggagttgtccccactgttccccgacaccctgattctgggcttggaaattcgggtgaaggtgagcgattatgtgcaagacaggatcagggcactgagagccgcccctgccgggggctttcagaacattgcatgcctgaggtctaacgcgatgaaacacttgcctaactttttctacaagggacagcttaccaaaatgtttttcctattccctgatccccacttcaagcgtacaaaacataaatggcggataatcagcccaaccctcctagccgaatacgcatacgtcttacgcgtgggcggcctggtgtacaccattacagacgtcctggagttacacgactggatgtgtacccattttgaagaacatcctctgttcgagagggtccccctggaggatttgtcggaggatcccgtggtcggccatctcggtacctccactgaggagggcaaaaaagtcctgaggaacggcggaaagaactttcccgccatctttaggagaatccaggatcccgtattgcaggccgtgaccagccagacatcactgccgggacactag

SEQ ID NO: 124202 - DNA, 2274 bp, synthetic construct
  misc_feature 1..2274: note = Description of Artificial Sequence: Synthetic coding sequence
  source 1..2274: mol_type = other DNA
atggccgaggtggggcggacgggaatcagctaccctggcgccctgctccctcagggtttctgggctgctgtggaagtgtggcttgaaagaccccaagtggctaacaagaggctctgcggagcgcggctggaggcccgctggtccgccgctctgccatgcgcggaggcccgaggacctggaacctctgccgggagtgagcagaaggaaagaggccccggccctggtcagggatctccaggcgggggacctgggccaagaagcctgtcaggccctgagcagggcacggcatgctgcgaactggaagaagctcaggggcagtgccaacaggaagaggcccagcgggaggctgcctccgtgccactccgggacagcggccaccccgggcacgccgagggacgtgaaggtgattttcctgctgccgatctggattccctttgggaagacttctcccagtcattggccagaggaaactctgagttacttgctttcctaactagttctggggctggttctcagccagaagcgcagcgcgagctggacgtggtgctgagaaccgtcatccccaaaacgtcccctcattgcccattaaccacccctagaagagagatcgttgtgcaagacgtgctgaatggtaccattacattcctcccccttgaagaagatgacgaaggcaaccttaaagttaagatgtccaatgtctaccagatccaactgtcccactccaaggaggagtggtttatcagcgtgctgatattttgcccagaacgctggcattccgacggaatcgtctaccccaaacccacatggttgggtgaggaactgctggcaaagttagcaaaatggtctgtagagaataaaaagagcgacttcaagtcaaccctctccctaattagcattatgaaatactcaaaagcctatcaggagttgaaggaaaaatacaaggagatggtgaaagtgtggccggaagtgaccgaccccgagaagtttgtgtacgaggatgtggccatcgccgcatacctccttatcctgtgggaagaagaaagggctgaacgtaggctcactgcacggcagagtttcgtcgacctagggtgtggtaacggcttgttagtgcacatcctgtcttccgagggccacccggggcgcggcatagacgtgaggaggcggaagatttgggacatgtacggcccacagacacaactggaggaggatgccatcacacccaacgataagacactcttccccgacgtggactggctaatcggcaatcactcagatgagctcacgccttggattcccgtcattgcggccagatcttcctataattgtcgattttttgttctaccatgttgtttcttcgacttcattggacgttacagcagaagacagagcaagaaaactcaatatagggaatacctggatttcatcaaagaggtcggctttacttgtgggttccatgtggatgaggactgcctcaggattccatctaccaagcgggtttgtctcgtcggcaagtcccgcacatacccatcctcccgggaggcctccgttgatgagaagagaacccaatacatcaagagcagaagagggtgcccagtttctcctcctggatgggagctgagcccgagcccgcgctgggtggccgccggctcagccgggcactgcgatggtcagcaggccctggacgctcgagtcggctgcgtgacacgcgcctgggccgccgaacatggcgcgggtccacaagctgaggggccgtggctcccgggatttcaccccagagagaaggctgaacgcgtaagaaactgtgccgctcttcccagagactttattgaccaagtggtccttcaagtagccaacttgctgctgggaggtaaacagcttaatacacgatctagtaggaacgggagtctgaagacatggaatggtggggagtccctgtccctggcggaagtagccaatgagctagataccgagactctgagacgcctcaaacgggaatgcggggggttgcagacattgctcagaaacagccatcaggtattccaggttgtaaacggaagagtccatatccgtgactggcgcgaggaaaccctgtggaagactaagcagcccgaggcaaagcagaggctcctgagtgaagcctgcaagacccggctatgctggtttttcatgcatcaccctgacggctgcgctctctctactgattgttgcccttttgcccatgggcctgcagagttacgcccaccgagaaccactcccaggaagaagatctcatag

SEQ ID NO: 124203 - DNA, 1236 bp, synthetic construct
  misc_feature 1..1236: note = Description of Artificial Sequence: Synthetic coding sequence
  source 1..1236: mol_type = other DNA
atgtgcatcaaattcagctcagttatcgcaaaaaaaaacgagcgctggcatagcgacggaattgtatacccgaagccaacttggctaggcgaagagctgctggcaaaactggctaaatggagcgtggaaaacaagaagtcagacttcaaatcaacactcagtttgatctcaatcatgaagtactccaaagcctaccaagagctgaaggagaaatataaggaaatggtgaaagtgtggcccgaagtgaccgatcccgaaaaattcgtatacgaggatgtggcaatcgccgcttacctgctgattctatgggaagaggagagggctgaaagaaggttaacagctcggcagtctttcgtcgatcttgggtgtggcaatggactgttagtccatattttgagctctgaggggcatcctggccgcggcatagatgtgcgtcggcggaagatttgggacatgtacggccctcaaactcagctcgaagaggacgctattacaccaaacgacaagactctgttccccgatgttgattggctcatagggaatcattctgatgaactcactccatggattcctgtcattgcggcccggagtagctacaactgcagattcttcgttctgccatgttgtttcttcgattttatcgggcgatactctcgtcggcaatccaaaaaaacccagtatcgagagtacttggattttataaaggaggtcgggtttacatgcggctttcacgtggacgaggattgtttacgcatcccgtccactaaacgcgtgtgcctcgtcggtaagtccagaacctacccgagctcgagagaagccagcgtggacgagaagcgtactcaatatatcaaaagccgtcgcggttgtcctgtgtctccaccaggctgggagctgtctccctccccccggtgggtagcagccggatccgccgggcattgcgatgggcagcaggctctggacgctagagtcggttgtgtgactcgcgcttgggccgccgaacacggagcgggcccccaggccgaaggcccctggctccctgggttccatccacgggagaaggccgagcgtgtgagaaattgcgccgctttgccacgagactttatcgatcaggttgtgctacaggtagcaaatctcctactgggcgggaaacagcttaatactcggagttcacggaatggctctctgaagacttggaatggaggcggcaagctgtctacaattttaggcaggggctag

SEQ ID NO: 124204 - DNA, 1743 bp, synthetic construct
  misc_feature 1..1743: note = Description of Artificial Sequence: Synthetic coding sequence
  source 1..1743: mol_type = other DNA
atgagcgatacatggagttctatccaagcccataaaaagcagctcgactccttaagagagcgcctgcaacgccggcgcaaacaggatagcggccatctggacctccggaatccggaggccgctctgtctcccacattcagatcggactcaccagtacctactgctcccacatcaggaggtcccaagccctctacagcaagcgcagtacccgaattagccacagaccctgaactggaaaagaagctgctgcaccatctgtccgacctcgcccttacacttcctacagatgccgtatctatttgtctcgcgatatcaacccctgatgccccagccacccaggacggcgtagagtctctgctccaaaagttcgcagctcaggagctcatcgaagttaagagaggacttctccaggatgacgcccaccctacactggtgacctacgcggatcactcaaagctgagcgctatgatgggcgcggtggccgagaagaaaggcccaggggaagtcgccggtacagtcactggacagaagcgccgggctgaacaggactccacgacagtcgcagcgtttgcttctagcctggtcagtggcctcaattcttccgccagcgaacctgctaaagagcccgccaaaaaaagccgcaaacatgccgcctctgacgtggatctggagatcgaatccctgctgaatcaacagagtacgaaagaacagcaatccaagaaggtgtctcaggaaatcctggagctcctgaataccaccaccgcaaaagagcagtcaatagtggaaaagttcaggtcaaggggacgagcccaggtccaggagttttgcgactacggtacgaaggaagagtgcatgaaagcttccgacgctgacaggccctgcaggaaacttcattttagacgaatcatcaataagcacaccgatgaatccttgggagactgctctttcctcaacacctgcttccatatggacacctgcaaatacgtccattacgaaattgacgcatgcatggactcagaagctccgggctccaaggatcacacaccttcgcaggaactcgcactgacacaaagcgtgggtggagattcatctgcagatcgtctgtttcccccccagtggatctgctgcgacataaggtaccttgatgtgtctattctgggtaaattcgccgtggtgatggccgacccgccatgggacatccacatggagctcccttacggaaccttgaccgatgacgaaatgagaaggctcaacatacccgtcttacaggatgacggattcctatttctctgggttactgggcgagccatggagcttggccgcgagtgcctcaacctgtgggggtatgagcgagtggatgaaattatatgggtgaagacaaaccagctgcagaggatcatcagaaccggcaggacggggcattggctgaaccatggcaaggagcactgtctcgttggcgtgaaagggaatccccagggcttcaatcagggcttggactgcgatgtgatcgttgccgaggtccgctcgacctcccataaacctgatgagatctacgggatgatcgagcggctcagccctggaacaaggaagattgagctcttcggacgtcctcacaacgttcagcccaattggatcaccttgggaaatcagctcgatgggatacacctgctggacccagacgttgtcgcacgttttaaacaacgttatcctgacgggatcatctctaaacccaagaacttgtag

SEQ ID NO: 124205 - DNA, 492 bp, synthetic construct
  misc_feature 1..492: note = Description of Artificial Sequence: Synthetic coding sequence
  source 1..492: mol_type = other DNA
atgagcgatacgtggtccagcatccaggcccacaaaaagcagcttgacagtctacgagagcggctgcagagacgccgcaagcaagatagtggccacctggacctgagaaacccagaggcggctttatctcctaccttccgctccgactccccagtgcccacggcccctacctcgggcggcccgaagcctagtactgcctctgctgtccccgagttggccacagaccccgaacttgaaaagaagctgctacatcacctctctgatctggcgctgaccctaccaacagacgccgtgtccatctgtttagccatttctacacctgatgcccccgccacgcaggacggggtcgaaagtctccttcagaagttcgccgcccaggaactgatagaggttaagcggggcctgctacaggacgatgcccatcccaccttagtcacttacgcagaccactccaagctctcagccatgatgggagcggtggccgaaaagtag

SEQ ID NO: 124206 - DNA, 462 bp, synthetic construct
  misc_feature 1..462: note = Description of Artificial Sequence: Synthetic coding sequence
  source 1..462: mol_type = other DNA
atgtccgatacatggtcctcaatccaggcacacaagaagcagctggattccctgagggagcggctgcaacggcgaaggaaacaggattctggacatttagatctgcgcaaccccgaggctgccctctccccaaccttccggagcgacagtcctgttcccacagcgcctacctccggaggaccaaagccttcaaccgccagcgccgtccccgagttagccaccgacccggagctcgagaagaagctcctgcatcacttgtctgatctcgcgctcaccctacccaccgacgccgtcagtatttgtcttgccatctccactcctgacgcacccgccacccaggatggagtggagtccttgttgcagaaatttgctgcacaagaactcattgaacaccggaaccagcaaagatctcagcctcgtaatcaggggaacatgctaccgcagatgttgatctggaggtag

SEQ ID NO: 124207 - DNA, 879 bp, synthetic construct
  misc_feature 1..879: note = Description of Artificial Sequence: Synthetic coding sequence
  source 1..879: mol_type = other DNA
atgctgggggcctgggcggtggaaggaaccgctgtagcactccttcgcctcttactgctcttactgcctccggccatacgtggcccgggcctgggcgtggcaggagtggccggcgccgcaggggcaggccttccggagagtgtgatttgggcagtgaatgccggcggcgaggcccacgtggacgtgcacggtattcactttcggaaggatccccttgagggtagggtgggcagagcctcagattacggcatgaaactgccaattctccgctccaatccggaagatcagatcctgtatcaaacagagaggtacaacgaggagacgttcggctacgaggtgccaattaaagaagaaggcgactatgtgctagtgttaaagtttgcagaagtgtacttcgcccaatcacagcaaaaggtgttcgacgtccggctgaacggccacgttgtcgtcaaggacctggatatcttcgacagagtggggcactctactgcgcatgatgagataatcccgatgagcattaggaagggcaagcttagcgtccagggagaggtgtccaccttcaccggcaagctgtacatagaatttgtgaaaggatattacgataatcctaaagtgtgcgccctttacatcatggctggaaccgtcgacgatgtgcctaagctccaaccccacccgggcctcgaaaaaaaggaggaggaggaggaagaggaggagtatgacgaagggtctaatctcaaaaagcagaccaataagaatagagtgcaatcaggccccaggacccccaacccttacgctagtgacaactcctctctgatgttcccaatactggtcgctttcggggtctttattcccaccttgttctgtttgtgtcggctctag

SEQ ID NO: 124208 - DNA, 1035 bp, synthetic construct
  misc_feature 1..1035: note = Description of Artificial Sequence: Synthetic coding sequence
  source 1..1035: mol_type = other DNA
atgctttctgaagtcctactggtttctgctccgggaaaagttatcctgcacggggaacacgccgtcgtccatggtaaagtggcgttggcagtgtctctgaatcttcgcaccttcctacgcctgcagccccatagcaatggcaaggtggatctgagtctgccaaatatcggtattaagagggcatgggacgtggcccgcctgcagtctctggacacaagttttttggagcagggggacgtgactacgccgacatcggaacaggttgagaaacttaaagaggtggccggcctgcccgatgattgcgcagttacggaaagattggctgtgttggctttcttatatctctacctgagcatctgtcgcaagcagagatggaccaaggaggacctggagttgatcaacaagtgggcatttcagggagaacgaatgatccatggtaacccttcaggtgtggataacgctgtctccacctggggtggggcactcaggtatcatcaggggaagattagtagtctgaagcgcagtcccgccctccaaatactcctcacaaacactaaagtacctcgaaatacccgcgccctggtcgccggcgtcaggaataggttgctgaagttccccgagatcgtggcccctttgctgacgagcattgacgctataagtctcgagtgtgagcgggtgctgggcgaaatgggtgaggcaccagctccagaacagtaccttgtgcttgaagaactgatcgacatgaatcagcatcacctcaacgcgctgggggttggacacgcgtccctggatcaactgtgccaagttactcgggcacgcgggcttcatagtaagctcactggggccgggggaggagggtgcgggattactttactgaagcccggattagaacagcccgaagtggaggcaactaagcaggccctgacgtcatgtggtttcgactgcctggagacctctatcggcgctccaggggtttcaatccactccgcaacctccctggattcccgggtccagcaggctctcgacgggctctag

SEQ ID NO: 124209 - DNA, 516 bp, synthetic construct
  misc_feature 1..516: note = Description of Artificial Sequence: Synthetic coding sequence
  source 1..516: mol_type = other DNA
atgctaagtgaggtacttctggtgtctgcacctgggaaggtgattttacacggtgagcatgctgtggtccatggcaaggttgctctggcagttagcttgaatttgcgtactttccttagactgcagccacacagtaatggcaaagtggatctgtccctccctaatattggcatcaaaagagcgtgggacgtcgctagactgcagtctctcgatacctcttttctggagcagggggacgtcacgacccccacaagtgagcaggtggaaaaactgaaggaagtagccggtcttcccgacgattgcgccgtgaccgagagattggccgttttggcctttctctatctgtatttatcaatttgtagaaaacagcgcgccttgccttccctagatatagttgtctggtctgaactgcccccaggggcggggttgggatcctcagcagcatattctgtgtgtctggctgctgctctcttgaccgtgtgtgaagaaatcccaaatcccctgaaggacgggtag

SEQ ID NO: 124210 - DNA, 1035 bp, synthetic construct
  misc_feature 1..1035: note = Description of Artificial Sequence: Synthetic coding sequence
  source 1..1035: mol_type = other DNA
atgctgagcgaggtgctcctcgtctcagcaccaggtaaagtgatcctgcatggagaacatgccgttgtacatggaaaagtggcactcgccgtgagcttgaatttgcgtacatttctgagacttcagccacacagtaacggcaaagtggatttaagtttacccaacatcggcattaaaagagcctgggacgttgccaggttgcagtcgctggatacatccttcttggaacagggcgacgtaacgacaccgacctccgaacaggtggaaaagcttaaagaggtggccggactgcctgatgactgtgctgttacagagagactggcagtgttagcttttctctacctatacctttcaatttgccgaaagcagagatggacgaaggaagacctcgagttgatcaataagtgggcttttcagggcgaacggatgatccatggtaatccgtccggcgtggataacgcggtgtctacctggggaggagccctgagataccaccagggcaagatcagctcactgaaacgttcccccgcccttcagatcctactcactaatacgaaggtccctcgcaacacgcgggccctcgtcgcgggagtgcgcaacaggttgctgaaattccctgagattgttgccccgttgctgacctcaattgacgccatctcccttgagtgcgaaagggttctaggagagatgggagaggctcccgctcccgaacagtatctagtactggaagagctgatcgatatgaatcagcatcacctgaatgctcttggggtgggacacgcatccctggatcaactgtgccaagtcaccagggctagaggtcttcattccaagctgaccggcgccggcgggggtggctgtgggatcacactgctgaaaccaggcttagagcaaccagaagtggaggctactaagcaggctttgactagctgtggatttgattgcttggagacgtcgataggtgccccgggagtgagcatccacagcgccacgagtctcgattcaagagtccagcaggctttagacggtctatag

SEQ ID NO: 124211 - DNA, 609 bp, synthetic construct
  misc_feature 1..609: note = Description of Artificial Sequence: Synthetic coding sequence
  source 1..609: mol_type = other DNA
atgatccatggcaatccgtcaggcgtcgacaacgcagtgagcacttggggaggcgccctccgatatcaccagggtaaaatcagtagcctgaagagaagccctgcactacagatcctgcttacaaataccaaggtccctcgtaacactagggctctggtggcaggagtgcgtaaccgactgctgaaattccctgaaatagtcgccccccttctcacttcaatcgacgccattagcttggaatgtgagcgtgtgctcggtgaaatgggagaagccccagcccccgaacagtacttggtactggaggagctgatagacatgaaccagcaccacttaaacgctttgggggtaggccatgcctctcttgatcagctgtgtcaggtcacaagggcacggggactgcattcgaagctcactggcgcaggcggagggggctgcgggataaccctcctgaaacctggactggagcagcccgaagtggaggccacaaagcaggccctcacttcatgcggctttgattgtcttgaaacatccatcggcgcccctggagtctcgatccacagcgctacatccttggattcccgagtgcagcaggctctggacggcctgtag

SEQ ID NO: 124212 - DNA, 606 bp, synthetic construct
  misc_feature 1..606: note = Description of Artificial Sequence: Synthetic coding sequence
  source 1..606: mol_type = other DNA
atgttgtctgaggtgctgctggtcagcgcacctgggaaggtgatcctccatggtgagcacgccgtggtgcacgggaaggtggctctggctgtttcattgaacctaaggacatttttgaggctccagccgcactcaaatggtaaggtggatctgtctctccctaacatcggcatcaaacgcgcttgggacgtagcccggctgcagtctctcgacacctctttcttggagcaaggggacgtcacgacaccaacatctgaacaggtggaaaaactcaaagaggtggcagggctcccagacgactgcgctgtaactgaacgcctggctgtgttggccttcctgtacctatatctttctatctgccgaaagcaacgtgccctcccctcactggacatcgtggtgtggtccgagcttccacccggcgccggtctcggatcatctgccgcctacagcgtctgtctggcagccgcgctcctcacagtgtgtgaggagatccccaacccactgaaagacggagactgtgtgaatagatggacaaaagaggatctcgagttgatcaacaaatgggcttttcagggagaacggatgatccacggcaatccaagctag

SEQ ID NO: 124213 - DNA, 1563 bp, synthetic construct
  misc_feature 1..1563: note = Description of Artificial Sequence: Synthetic coding sequence
  source 1..1563: mol_type = other DNA
atgccatcactcgtagtctcaggcataatggagcgcaacggggggtttggcgagcttgggtgcttcggcggctcagcaaaggacaggggcctgctcgaggacgaacgcgcgctgcaacttgcgctggaccagctgtgtctccttgggctgggagaacctccagcaccaaccgcaggagaagacggcggcggtggaggcggaggtgctcctgcccaacccgcagcccccccacagccagcccccccaccccccccggccgcgccaccagctgcgcctactgctgcccctgccgcccaaacaccccaacctccaactgcgcccaaaggagcgagcgacgcgaaactgtgcgctctgtacaaggaggcagaattgaggctgaagggctcctccaacactaccgagtgcgtgccggtgcctacctcagagcacgttgccgaaatcgtcggcaggcagggctgcaagatcaaggccttgcgagcaaaaaccaacacatatataaagactccggtccgtggagaggaacccgtcttcatggtcacaggacggagagaggatgtcgccaccgcccgtagggaaataattagtgctgcagaacactttagcatgatacgagcaagcaggaacaaaagcggggcagccttcggtgttgcacctgctctgcctggccaggtaactatccgtgtgcgcgtgccctacagggtcgtcgggctcgttgttgggcctaagggggcaaccatcaaaagaatccagcagcagaccaatacttatatcataacaccatctcgcgatagagaccccgtttttgaaatcacaggggcccccggcaatgtggaacgcgcaagagaggaaatcgagacacacattgcggtccgcaccgggaaaatacttgagtacaacaatgagaacgattttctcgctggttcccccgacgcagccatcgacagcaggtattctgacgcctggcgagtgcatcaaccagggtgcaagccgctcagcacgttcagacagaattccctcggatgcatcggtgaatgtggggttgattccggattcgaagccccccgtctgggcgagcagggcggagacttcgggtatggcggctatctttttccaggctacggggtagggaagcaagacgtgtattatggagtagcagagacctcaccgcctctgtgggcaggccaggagaacgcaacccctaccagcgtgctattttcatccgccagtagctcaagttcgtcctctgctaaggccagggcaggacctccgggcgcccatcggagtcccgctacttccgccggaccagaactggcagggctccctcgaaggcccccaggcgaaccactgcagggcttttcaaagctcggggggggcggactccgcagtccggggggcggaagagactgcatggtgtgctttgaaagcgaggttaccgccgctttggtgccatgtggacacaacctgttttgcatggagtgtgcggttcgaatctgtgagcgaacagaccctgaatgtccagtgtgtcacatcaccgcaactcaagctatccggattttttcctag

SEQ ID NO: 124214 - DNA, 1710 bp, synthetic construct
  misc_feature 1..1710: note = Description of Artificial Sequence: Synthetic coding sequence
  source 1..1710: mol_type = other DNA
atgccttcaagcctcttcgcagacctggaaagaaatgggtcaggaggaggcggcggcggaagcagcggaggtggggaaacactcgatgaccagagggccctgcagctggccctcgatcagctgtcactactgggtttggattcagacgaaggtgcatccctgtacgacagcgagcctcgcaagaagtccgttaacatgacagaatgtgtcccggtgcccagtagtgaacacgtcgctgagatcgtcgggagacagggttgcaaaatcaaagcactgcgcgccaagactaatacatatatcaaaacccccgtgaggggagaggagcccgtttttgtggttaccggtcgaaaagaggacgttgctatggccagacgtgagatcataagcgctgccgaacatttttctatgattcgagctagccgcaataaaaatacggcgcttaatggggcagtaccagggcctcccaatttaccgggccaaaccacgatacaggtccgggtaccctacagggtggtcggtctagtggtcggcccaaagggagccaccattaaaagaatccagcagcaaacgcacacttacatagtcacacccagccgagacaaggagccagtctttgaggtcactggtatgcccgagaatgtcgatagagctagggaggaaatagaggctcatatagctctgagaactggcgggataatagagcttacagacgaaaatgattttcacgccaacggcacagatgtgggatttgacttgcatcacggaagcggaggcagcggacccgggtccctgtggtctaaaccaacccccagcatcactcctactcccggacgcaaacccttctcgtcctatagaaatgactcatcttcctcccttggcagcgcttctaccgactcttatttcggcggaggtacgtcatcatctgccgccgctacccagcgccttgccgattacagcccaccgagtcctgccctgtcatttgcccacaatgggaacaataacaataatgggaacggatacacatacactgctgggggagaggccagcgttccatctcccgacggttgtccagagctgcagccaacattcgacccagcccctgcaccccccccgggtgcacctttgatctgggcacagttcgagcgttcccccggggggggccctgcagctccagtgtccagcagctgttccagcagcgctagctctagtgccagcagctctagtgtagtgtttccgggaggcggtgcatccgccccgtcgaacgccaacctgggactgctagtccatcgaaggctgcaccccggcacatcttgcccaaggctgtcacctccattgcatatggcccccggcgccggagaacaccatctggcccgaagagtcagatctgaccccggaggcggcgggttggcctacgccgcctatgccaatgggctgggagctcagctacctggcctgcagccatccgatacttccggatcctctagctctagcagtagctcttcatcctcttcatctagtagttctggactccggcgaaagggcagtagagattgcagtgtctgcttcgaatccgaggtcatcgcggccctagttccttgcgggcataatctgttctgcatggagtgcgccaacaggatctgtgagaagagtgagccggagtgtccagtttgccacacggccgtcacgcaggctattagaatcttcagctag

SEQ ID NO: 124215 - DNA, 1980 bp, synthetic construct
  misc_feature 1..1980: note = Description of Artificial Sequence: Synthetic coding sequence
  source 1..1980: mol_type = other DNA
atgccttcaggctcatccgcagctctcgctcttgctgccgcacccgcacctctcccgcagcccccacccccccctccgccccctcctcccccccttcccccgcccagcggcggacccgagctcgagggcgacggtttacttctccgggagagactggccgccctgggcttggacgaccccagcccagccgagcccggagctccagctctgagggcgcccgctgcagcagcacagggccaggcaagacgtgcggccgaactgagccctgaggagcgggcccctccagggagacccggcgctcccgaagctgcagagctggaacttgaagaggacgaagaagaaggggaagaggccgaactcgatggtgatttacttgaggaggaagaactcgaggaagccgaggaggaggatcggtcctccttgctgctccttagtccgccagctgccacggctagtcagacacagcagatccctggcggaagccttgggagcgttcttctccccgcagccagatttgacgcccgagaggccgccgcggccgcagctgctgcaggggttctttatgggggggatgacgcgcagggaatgatggccgcgatgctctcgcacgcgtacgggcccggcggctgcggcgccgcagccgccgccctgaacggcgaacaggcagcactacttaggcggaaaagtgtaaacaccacagagtgtgttcccgtgcccagcagcgagcatgtcgcagagatcgtgggaaggcagggttgtaagatcaaggcactgcgcgccaagacaaacacctatattaaaacacccgtacgaggtgaggagcctatcttcgttgtcacaggccggaaggaagatgtggctatggccaaacgagagatcctgagcgccgcggaacacttctcgatgattagggcatcacgaaataagaatgggccggccttggggggtctgtcatgctcacccaacctgccagggcagaccacagtgcaggtcagagtgccatatagagtagtgggcctcgtcgtgggacctaaaggtgccaccataaagagaattcaacagcagactcatacatatattgtgactccttctcgagataaagagcccgtgtttgaagtgacaggcatgcctgaaaatgttgacagggcacgggaagagatagaaatgcatattgccatgaggactggcaattacatcgagctgaatgaggaaaatgattttcattataacggcactgatgtgtcattcgagggaggaaccttaggtagcgcatggttgagctcaaatcctgtgcctccatccagggcccggatgatttcaaactatagaaacgattctagtagcagcttaggttctgggtctactgatagctactttggttccaacaggctcgctgatttcagcccaaccagccctttcagcactggaaacttctggttcggggatacgcttccctctgtaggcagtgaggacctggccgtggattcacccgcattcgactcattaccaacatcggctcagacgatctggacaccatttgaaccagtcaatcccctgtcaggttttgggagcgacccttccggaaacatgaaaacacaacggcgcgggagccaaccatctacccctcgactgtcacctaccttcccagaaagtatcgaacaccccctcgcaaggcgcgtacgaagcgaccccccgtccactggtaaccacgtcggcctgcctatttatatcccggccttctcaaatggcacaaactcctattcatccagcaacggaggcagcacctctagcagcccgccggaaagtaggcggaagcatgactgtgtcatttgtttcgagaacgaggtcatcgcagcccttgtgccatgtggacacaacttattctgtatggagtgcgcgaacaaaatatgtgagaagcggacaccctcttgtcccgtttgtcagacagccgtcacacaagccatccagattcactcttag

SEQ ID NO: 124216 - DNA, 498 bp, synthetic construct
  misc_feature 1..498: note = Description of Artificial Sequence: Synthetic coding sequence
  source 1..498: mol_type = other DNA
tggagatggacaagttgccgaagatccgggtggggcgccctcgcaacacgcacccgaagaggccgccctggcacacctcccccgccgcggccaagtccccctgacgtgttcgcagggttcgcgccccacccagctgcgctaggaccacctacattattagccgaccagatgtccgtcataggatcccgaaaaaagtcagtgaatatgactgagtgcgttccagtgccgagttcagaacacgtggccgagatcgtcggaagacagggctgcaaaattaaagccctgcgcgctaaaactaacacatacatcaagacacctgtgcggggagaagaacctgtgttcatcgtaacaggtcgtaaggaagatgttgagatggctaaacgcgagatcctgtctgctgctgagcacttctctattatccgcgctacacgatctaaagctggcgggctgccaggcgccgcacaaggacctcccaatcttcccggccagacaacatag

SEQ ID NO: 124217 - DNA, 2001 bp, synthetic construct
  misc_feature 1..2001: note = Description of Artificial Sequence: Synthetic coding sequence
  source 1..2001: mol_type = other DNA
atgccttcctcactgggccagcccgatggaggtggaggcgggggtggtggtggcggcggcgtcggtgccgccggagaagaccctggtcctgggcccgccccaccccctgagggagctcaggaagccgcacctgcccccagaccaccacccgaacctgacgacgccgctgctgccctgagactggctcttgaccagctatctgctctcggcttaggcggtgcaggagacaccgacgaggagggcgctgccggcgatggagcggccgctgccggaggcgctgatggcggcgccgcccccgagcccgttccacccgacggtccagaagcgggtgccccccctactctggcgcctgcagtggcgccggggtctttaccactcctagaccctaatgcatccccccctccacccccccccccccggccatcacctccagatgtgttcgcagggtttgcaccccatcccgctgctttgggaccaccgacgttactggccgatcagatgtcggtcatcggaagtcgtaagaagtccgtcaatatgactgagtgtgtacccgtgccttcttccgagcacgttgcagaaattgtgggtaggcagggctgtaaaattaaggcacttagggccaaaacaaatacctacatcaagaccccggtccgcggtgaggaaccagtctttatcgtgaccgggcgcaaggaggatgtggagatggctaagcgggagattctgtcagcagccgaacatttctctatcatccgcgccacacgcagtaaggccgggggcctgcccggggccgcccagggtccacctaatttacctggtcaaacaactatacaggtccgcgtgccttaccgcgtggtgggattggttgtgggacctaaaggcgccactattaagcgtatccagcagagaacccacacatacattgtgacccctggccgggacaaggaacccgtgttcgccgttacaggaatgcctgagaacgtggaccgcgccagggaggaaatcgaagcccacataacactgagaacaggcgcatttaccgacgctggcccagattcagactttcacgccaacggcacagatgtgtgcctggaccttctgggtgccgccgccagcctttgggctaaaacacccaatcagggaagacgcccccccacggcaacagccgggttgagaggggacacagcactgggagcgccatccgctcccgaggcattttacgctgggagccgaggcggcccttcggtgcctgaccccgggcccgccagcccctattccggctcaggaaacgggggcttcgcctttggggcagaaggtccaggggcccccgtgggaacagctgcccccgatgattgtgatttcgggttcgattttgatttcttagctcttgatcttacagtgcccgccgccgccaccatctgggcccctttcgagcgagctgccccactgcctgccttctcaggatgcagtaccgtgaatggcgctcctggtcccccggccgccggcgcccggcgatcaagcggagccggcacaccacgccattcacctaccctgccagagcccggagggcttcgtctagagttaccactgagccgccggggcgctcccgaccccgtgggcgcactgagctggcgacctccacagggacccgtctctttccccggcggtgcagccttcagcactgccacgtcactgccgagcagtccagcggccgcggcgtgcgccccactggatagtggcgcctcagagaactcgcgcaaacctccttctgcatccagtgcgcctgccctagcccgtgagtgtgtggtgtgtgccgagggcgaagtgatggctgccctggtaccctgcggccataatttgttttgcatggattgtgccgtgcggatctgtggcaagagtgaaccggaatgcccggcttgcaggacccctgcaacacaggcaatccgtgtcgaaacggaaacaccgcagcctggaggtgcctccgcattgcaaagacagtattag

SEQ ID NO: 124218 - DNA, 1956 bp, synthetic construct
  misc_feature 1..1956: note = Description of Artificial Sequence: Synthetic coding sequence
  source 1..1956: mol_type = other DNA
atgccgtcatcccttgggcagccggacggcggaggcggtggtggcggtggcggcggaggcgtgggagctgccggagaggaccctggacctgggcctgcccccccacccgaaggcgcccaggaagctgcacccgcacctcggcctcccccagaacccgatgacgctgcagccgcgctgcggctggcattggatcagcttagtgcacttggcttagggggcgccggcgatacggacgaagagggcgccgctggtgacggcgccgcagccgctggaggagcggatggcggggctgccccagagccagtaccgcctgatgggcctgaggcgggtgctcctcctactttagctcccgccgttgcacccggctccctccctcttctcgaccccaacgccagcccaccgcccccgccacccccacggccctctcccccggatgtatttgctggctttgcccctcatcctgccgcactcggacctcccaccctgcttgcggaccagatgtccgtgattggctctcggaaaaaatctgtaaatatgaccgagtgtgtccctgtcccatcaagcgaacatgtggccgagattgtcggcagacagggatgcaagattaaagcactcagggcaaagaccaatacctacatcaagaccccagtgagaggcgaggagccagtgttcatcgtaactggcagaaaagaagacgtggagatggctaaacgggagatactgagcgcagccgaacacttctccattatccgcgctacaagatccaaggcggggggcttgccaggggctgctcaaggacccccgaacctgcccgggcagaccaccatacaagtcagagtaccctatcgggtggtcggtctcgtggtggggcctaaaggtgcaacaatcaagaggattcaacagcgcacccacacctacatagtcaccccaggccgcgataaagagccagtgtttgcagtgacaggtatgccggaaaacgttgatagggcgagggaggagatcgaggctcacattacgctgagaaccggcgcgtttacagatgccgggccggacagcgattttcacgctaatgggactgatgtgtgcctagatctgttaggtgccgccgcttctctttgggcaaaaaccccaaaccagggccgaagaccacctacagcaaccgccggcctgcgaggagatacagccttgggagccccttctgcacctgaagcattttatgccggctctagaggaggaccaagtgtcccagaccccggcccggcatctccttattccgggtccggcaacggcggttttgcgttcggggcagagggcccaggcgccccggtcgggacagccgcgcctgatgactgcgacttcggcttcgatttcgactttctggcactagacctaacagtgcccgccgccgctaccatttgggcccccttcgaacgagccgcccccctcccggccttttcaggatgctctactgtcaacggtgcacccggcccccctgcggccggagcaagaaggtcgagcggggccggaacacccagacatagtccaaccctgccagaacctggcgggttgaggctcgaactgccactgtcgcggcggggcgcccccgaccctgttggagccttgagctggcgccccccacagggccctgttagcttcccaggaggagctgcctttagcaccgcaaccagtctcccttcgtcacccgcagctgccgcatgtgctcccctggactccggcgcatccgaaaattcacgaaaacctccttctgccagctcagctccagccctggcgagagaatgcgtggtctgcgctgaaggtgaggtgatggccgccctcgttccttgcggtcacaacctcttttgtatggactgtgccgtgcggatttgtggaaaatctgagcccgaatgtcctgcctgccggactccagcaacccaggctattcacattttctcctag

SEQ ID NO: 124219 - DNA, 966 bp, synthetic construct
  misc_feature 1..966: note = Description of Artificial Sequence: Synthetic coding sequence
  source 1..966: mol_type = other DNA
atgcagtgccgattgccgcggggcctcgcgggcgctttactgacactgctatgcatgggtctgctatgcttgaggtaccatctgaatttaagcccacaacgggtccagggaacgcccgaactgtcccagcctaaccctggccctcctaaacttcagctgcacgatgtgttcatcgccgtgaaaactactagggccttccatcggcttcgcttggagctgctgcttgacacctgggtgtcccgcacacgggaacagacctttgtattcaccgactctcccgacaaagggctccaggagcggctgggcagccatcttgtcgtcactaactgctctgctgagcactcccatcctgcattgtcctgcaaaatggccgcagagttcgacacctttctggcatcagggctacgatggttctgccacgtagacgatgacaactatgtcaatcctcgggccctgcttcagctgctgcgggctttccctctggctcgggacgtgtatgtcggacggccgagtttgaaccgacccattcatgcatctgagccccaaccacacaacaggacccggctcgtccagttctggtttgctaccggcggcgcaggtttttgcattaatcggaaattggcactgaagatggccccctgggcctcaggttctaggtttatggacacttcagcacttattcggctgccagatgactgtacgatgggatatatcatagagtgcaaactcggcggccgccttcagccctctcccctttttcattctcacctcgagacattgcaactactacgtactgctcagcttcccgaacaggtcactttgtcatatggcgtctttgaggggaagttaaatgttatcaagctgcaaggacctttttcccccgaagaagatccaagcaggttcagaagcttacactgtctcttgtatcctgataccccctggtgtccgcagttgggcgcccgctag

SEQ ID NO: 124220 - DNA, 924 bp, synthetic construct
  misc_feature 1..924: note = Description of Artificial Sequence: Synthetic coding sequence
  source 1..924: mol_type = other DNA
atgcagtgtcgccttccaaggggcctcgcaggtgccctcttgactctgctgtgtatggggctgttgtgcttgaggtatcatcttaatcttagcccacagcgagtccagggaactcccgagctgtcacagcctaaccctgggccccccaaactgcagctccacgacgtgtttattgcagtgaaaaccaccagggccttccaccgtctcaggctggagctcctcctggatacttgggtgtcgcggacaagagagcaggttactcggtcacatcttgtagtgaccaactgttctgctgagcactcacaccccgcacttagctgtaaaatggcagccgagttcgatacctttcttgcttccgggctcaggtggttttgccatgtcgacgacgataattacgtgaatccgcgcgctctgttgcaactgctccgagcattcccactggccagagatgtgtatgtcggtcgaccttccctgaacagacccattcacgcttctgagccacagccccataacaggacaagactggtgcaattttggttcgctaccggaggcgctggattctgtatcaacagaaaacttgcacttaaaatggcgccatgggcttcgggaagtaggtttatggacacttctgctcttatcagattgccagacgattgcaccatgggatacattatagaatgtaagctcgggggacgtcttcagccttcccctttattccacagccatctggaaacattacagttacttcggaccgcccagttaccagaacaggtgacgctgtcatacggggttttcgaaggaaagcttaacgtaatcaagctgcagggaccctttagccccgaagaagatccatcgcggttcaggtccctccactgcctgctgtacccagacacaccttggtgtcctcaactcggggctcggtag

SEQ ID NO: 124221 - DNA, 357 bp, synthetic construct
  misc_feature 1..357: note = Description of Artificial Sequence: Synthetic coding sequence
  source 1..357: mol_type = other DNA
atgcagtgtcgtttacccagggggctagcaggggcactcctgacattgctttgtatgggattactttgccttcgttatcacctgaacctgtccccccagcgcgttcaaggcaccccggagctgtcccaacctaaccctggtccacctaagttgcagctccacgacgtcttcatcgctgtaaaaactacccgtgcatttcaccggctgagactcgagctgctgctagacacctgggtttctcgaaccagagaacaaacgtttgtctttacagattcccctgacaaggggctccaggagcgcctcggttccccagatagcagctctctacttcaagggccaaccttatggtcaccctag

SEQ ID NO: 124222 - DNA, 399 bp, synthetic construct
  misc_feature 1..399: note = Description of Artificial Sequence: Synthetic coding sequence
  source 1..399: mol_type = other DNA
atggcagcggagtttgacacattcctggccagcggactgaggtggttctgccatgtggacgatgacaattacgtgaatccgagggcactgctgcagttattgagggccttccctctggcacgcgacgtttacgtaggacgcccctctctcaataggcctatacatgccagcgagcctcaacctcataacaggacgaggctcgttcagttttggtttgcaacggggggggctggcttttgtatcaataggaaactggcactcaagatggctccctgggctagtggctcacgcttcatggatacctcggcactgattcgcctgcctgatgattgcacgatggggtatattattgagtgcaagcttggcgggcgattacaaccgtcacccctctttcactag

SEQ ID NO: 124223 - DNA, 132 bp, synthetic construct
  misc_feature 1..132: note = Description of Artificial Sequence: Synthetic coding sequence
  source 1..132: mol_type = other DNA
atggcagctgaatttgacacgttcctggcaagcggcctacgatggttttgccacgtcgatgacgacaactatgtgaatccccgcgccctgctgcagttgctcagggcattcccactggcccgcgatgtctag

SEQ ID NO: 124224 - DNA, 264 bp, synthetic construct
  misc_feature 1..264: note = Description of Artificial Sequence: Synthetic coding sequence
  source 1..264: mol_type = other DNA
taaagccatctggagaccttgcaactgctccggacagctcagctccctgagcaaatctccctaccacctctgtccgctctgtcacgctacacattagtgtccccggctgggtgcccgatgaatcccgaactgctgggaaaggggtgggctgaaacgagtgggtgcgcgctcgccccaaaggtcgccttgtgggtgcctggtaagtgtctagtgattggcagtccctggcagggattgcgggtggtggggaagcctcgtatttag

SEQ ID NO: 124225 - DNA, 999 bp, synthetic construct
  misc_feature 1..999: note = Description of Artificial Sequence: Synthetic coding sequence
  source 1..999: mol_type = other DNA
atgggactaggaccggtattcctgctcctggcgggcattttcccatttgcgcccccaggcgccgcggccgagcctcactctcttaggtacaatttgacagttctctcttgggacggatccgttcagagcggattccttgcagaagtgcatctcgacggacaacctttcctgcgctatgaccgtcagaaatgcagggctaaaccacaaggccagtgggccgaggacgttttggggaacaaaacttgggacagggaaaccagagacctgactgggaacgggaaggatcttcggatgactctggcacacattaaagatcagaaggaaggcctgcattccttacaggaaattcgcgtttgtgagatccatgaagacaattcaaccagaagcagtcagcatttctattacgatggggaactctttctgtcacagaaccttgagactgaagaatggaccgtgccgcaatcatcccgagcccaaaccttggccatgaacgttcgcaactttttgaaggaagatgccatgaaaacgaagacccactaccacgctatgcacgcagattgccttcaggaattgcggaggtaccttgaatcaggtgtcgtattaagacggaccgttccgccaatggtgaacgtgaccagaagtgaggcttccgaggggaacattacagtcacctgcagagcgtcaagcttctatcctagaaatataatcctgacctggcggcaggacggtgttagcctttctcatgatacacagcagtggggagacgtactacctgatggcaacggtacctaccagacctgggtagccacccgcatctgcaggggagaggaacaacgctttacgtgttatatggagcattcaggcaatcattctacgcacccagtgcccagcggcaaagtcctagtgctccaaagtcactggcagaccttccacgtgagcgcggtagctgccggatgctgttacttctgttattattatttcctttgcccgcttctctag

SEQ ID NO: 124226 - DNA, 585 bp, synthetic construct
  misc_feature 1..585: note = Description of Artificial Sequence: Synthetic coding sequence
  source 1..585: mol_type = other DNA
atgggccagagggaccaaggactggatagagagagaaagggcccccaggacgatcctggatcttaccagggacccgagcgccggaacttcctgaaggaagacgccatgaaaaccaaaacacactaccacgcaatgcatgccgattgtcttcaggaattgaggcgatatttggaatccggagtcgtgctgcgcagaacggtgccacctatggtgaatgtcacccggagcgaagcctctgaaggtaatatcacggtaacatgccgagccagctccttttatccccgaaacatcatcctaacatggaggcaggacggcgtaagtttaagccacgatacacagcagtggggggacgtcctgccagacggcaacggtacctaccagacctgggtggccacaagaatctgcagaggcgaggagcaacgctttacgtgttacatggaacatagcggaaaccacagcactcaccctgtgccatccggcaaggtgcttgtcttgcagtctcattggcagacctttcatgtctccgcggtcgccgccggatgctgctacttttgttactactacttcttatgccctctgttatag

SEQ ID NO: 124227 - DNA, 870 bp, synthetic construct
  misc_feature 1..870: note = Description of Artificial Sequence: Synthetic coding sequence
  source 1..870: mol_type = other DNA
atgggcctcggaccagtattccttttattagctgggattttccctttcgcccctccaggcgcagctgctgaacctcattcgctgcggtacaatctaaccgtgctgagctgggatggatccgttcagagcgggtttctggccgaggtgcacctggatggccagccgtttttaaggtacgaccgacaaaaatgccgggcgaagcctcaggggcaatgggctgaggacgtcttgggaaataagacatgggaccgagagacccgcgatctgacaggcaacggaaaggatctccgcatgaccctcgcccacatcaaggaccagaaagaagtgccccagtcatctcgggcacagaccctggccatgaatgtacggaactttttgaaggaagatgcaatgaaaacaaagactcactaccacgcgatgcacgccgattgtctgcaagagctgaggcgctacctggaatccggggtggtgctgcgtcgaaccgtgccaccgatggtgaatgtgaccagatcagaggcttcagaaggtaacatcaccgtcacttgtcgggcttccagtttttatccccgtaatattatcttaacctggagacaggacggcgtgagcctgagccacgacacccaacagtggggagatgtgctgccagatgggaatgggacttaccaaacatgggtagcaacacggatctgccggggagaagaacaacggtttacctgctatatggaacattctggcaaccacagcactcatccggttccatccggtaaggtcctcgtgcttcagtctcattggcagactttccacgtgtccgccgtcgcagcaggttgttgctatttctgttactactacttcctttgccctctcctctag

SEQ ID NO: 124228 - DNA, 738 bp, synthetic construct
  misc_feature 1..738: note = Description of Artificial Sequence: Synthetic coding sequence
  source 1..738: mol_type = other DNA
atgggtcagcgtgatcagagactcgatcgggaacggaagggcccacaggacgatcccggcagctatcagggccctgagaggcgaaatttccttaaagaagatgccatgaagacgaagacacactaccatgcaatgcacgccgattgcctgcaggaattgaggcggtatcttaaaagtggagtggttttgcgccgcacagttccccccatggtgaatgtaacacggtccgaggcatccgaggggaatataacagtcacgtgtcgcgcatctggtttctatccatggaatatcaccctctcgtggcggcaagatggggtatctctctcccacgacactcagcagtggggcgacgtcctgccagacggaaacggaacttaccaaacgtgggtggctactcgaatatgccagggtgaggagcagcggttcacatgctatatggagcacagcggcaatcatagtacacaccccgtgccatctgggaaggtactggtgctgcaatcccattggcagacattccacgtgtcagctgttgccgccgccgccatcttcgtgattatcatcttctacgtgcggtgttgcaaaaaaaagacctcagctgcagagggtcctgagcttgtgtccctccaggtgttagatcagcatcccgttggtactagtgaccacagagacgctacccagcttggcttccaacctcttatgtcggatttaggcagtaccggaagcaccgagggagcctag

SEQ ID NO: 124229 - DNA, 1152 bp, synthetic construct
  misc_feature 1..1152: note = Description of Artificial Sequence: Synthetic coding sequence
  source 1..1152: mol_type = other DNA
atgggcctgggccccgtgtttctattactagccggcatctttccttttgcacctcctggagctgccgccgaaccccattccctgcggtacaacctgaccgtgctaagctgggacggcagcgtgcaatctgggttcctgaccgaggtgcaccttgatggtcagcccttcctgcggtgcgatcggcaaaagtgcagggcgaagccccagggacaatgggccgaggatgtgctgggaaataaaacttgggaccgtgagacaagggacctgacaggcaacggtaaggacctgcgcatgacccttgcacacatcaaggatcaaaaagaggggcttcactctctgcaggaaataagagtatgcgagatacacgaagacaattctaccaggtcctcccaacacttttattacgatggcgagttgttcctgagccagaatttggagacaaaggaatggaccatgccccagagctcacgcgctcaaacccttgcgatgaacgtgcgtaactttctgaaggaggatgccatgaagactaagacacactaccacgcgatgcacgccgactgcctccaggaactcaggcgataccttaaaagcggagtggtcctgcggcggacagttcctccaatggtcaatgttactagatctgaagcttcagagggcaacataacagtcacttgcagggccagcggtttttatccctggaacatcaccttgagctggaggcaagatggagtcagcctgtctcatgatactcagcagtggggggacgtgctccccgatggcaacgggacctatcaaacttgggtggccactcggatttgccaaggagaggaacagagattcacctgctatatggagcatagcggaaaccactccacccatccagtgccgtctggaaaggttctggtgttacagtcacactggcaaaccttccatgtgagcgccgtggcagccgcggccatcttcgtgatcatcatcttctatgtccggtgttgcaagaagaaaacgagcgcagcagagggccccgaacttgtctctctgcaggtgctggaccagcacccagtcggaacaagtgatcaccgcgatgcaactcagcttgggttccagcccttaatgagcgacctgggatccacaggcagcacggaaggagcttag

SEQ ID NO: 124230 - DNA, 870 bp, synthetic construct
  misc_feature 1..870: note = Description of Artificial Sequence: Synthetic coding sequence
  source 1..870: mol_type = other DNA
atggggctcgggcccgtattcctcctgctagccggtatttttccctttgcacctcctggagcagccgcggagccccatagtctgaggtacaatctgaccgtgctgagttgggacgggtcagtccagtcaggcttcctggccgaagtccacctggacggccagccctttttgcgctacgatcgccaaaagtgcagggccaagcctcaaggacagtgggcagaggacgtattgggtaacaagacctgggacagggaaactcgggacctcacaggcaacggaaaagacttacggatgaccctagcgcacattaaagatcagaaggaagtgccccagagttctcgtgctcagactcttgctatgaatgtgcggaacttcctgaaggaggatgcaatgaaaaccaagacacactaccacgcgatgcatgctgactgtcttcaagagttacgcaggtatcttgaatcaggcgtcgttctgcggcggactgtgccgccaatggtcaacgtcactcggagtgaagcgagtgagggcaacataaccgtgacctgccgcgcctcttccttctaccccaggaatatcatcctaacttggagacaagacggcgtgagcctcagccacgacacccagcagtggggtgatgtcctccccgatggaaacgggacttaccagacctgggtagccactcggatatgccgaggagaggaacagcgcttcacctgttatatggagcattctggcaaccacagtactcaccccgtcccctctggtaaggtcctggtcctgcaatcgcattggcaaacatttcatgtgtctgcggttgctgctgggtgctgctatttctgttattattatttcctctgccccctcctgtag

SEQ ID NO: 124231 - DNA, 999 bp, synthetic construct
  misc_feature 1..999: note = Description of Artificial Sequence: Synthetic coding sequence
  source 1..999: mol_type = other DNA
atggggctgggacctgtatttctcctgctcgcagggatctttccatttgcaccacctggagcagctgctgagccacatagccttagatacaacctgacagtcctgtcctgggacggtagcgtgcagtccggtttcctggccgaggtgcacctcgacggtcaacccttccttcgctacgacaggcagaagtgcagagccaaaccccagggccagtgggccgaggatgtgctaggtaataagacatgggatagggagaccagagatcttaccggcaatggcaaagatctccggatgacactggcacacattaaagatcagaaagaagggctgcacagtctgcaggagatccgcgtctgcgagattcacgaagataactcaaccaggagctcacagcacttctactacgatggcgagctgtttctgagtcagaatctggagactgaggagtggaccgtcccccagtcatccagggcccagacactggccatgaacgtacggaactttctaaaggaggatgccatgaaaacaaaaactcattaccatgccatgcacgctgattgcctgcaggaacttcgcagatacttggagtcgggggtggtgcttaggagaactgtgccaccaatggtcaacgtaacccgaagcgaggcctccgaaggtaatataaccgtgacatgccgcgcatcctcgttctacccccgcaacattattttaacctggcggcaggacggggtctccttatcacatgacacacagcaatggggcgatgtgctccccgacggcaacggaacctaccagacatgggtagcgacacgaatatgccgcggtgaggagcagcgctttacttgctacatggagcactcaggaaaccacagcacacatcctgttccttctggtaaagttctcgttctgcagtctcattggcagactttccacgtgagtgcagttgcagctggttgctgttatttttgctactattacttcctgtgtcccttgctgtag

SEQ ID NO: 124232 - DNA, 585 bp, synthetic construct
  misc_feature 1..585: note = Description of Artificial Sequence: Synthetic coding sequence
  source 1..585: mol_type = other DNA
atgggacagagggatcagggtctggacagagaacggaagggtccccaagacgaccccggaagttaccaggggcccgaacgcaggaacttcctgaaggaggatgccatgaagacaaagacccactaccacgccatgcatgccgattgcctccaggagctgcggcgatatttggagtccggcgtagtgttaagacgcactgtgcctcccatggtaaatgtgactcgtagtgaagccagcgaagggaatattaccgtcacatgccgggcatctagcttttatccccgaaacattatcctcacctggcggcaggatggagtgagtctgtcacacgacacccagcagtggggggacgtgttgccagacggtaatgggacataccagacatgggtcgcaacaaggatttgccgaggagaggaacagcgcttcacatgttatatggagcatagtgggaatcacagtacccatccagtaccttcgggaaaggtgctggttttgcaaagtcattggcagacctttcatgtatctgctgttgccgcaggctgctgttacttctgctattactattttctctgtcccttactgtag

SEQ ID NO: 124233 - DNA, 831 bp, synthetic construct
  misc_feature 1..831: note = Description of Artificial Sequence: Synthetic coding sequence
  source 1..831: mol_type = other DNA
ttcccttttgctccacccggagccgctgcggagccccactccctgaggtataatctgaccgtcctgagttgggacggctctgtccagtcagggtttcttgcagaggtccacttggacggtcaaccgtttttgagatatgacaggcagaaatgtagagctaaaccccaagggcagtgggccgaggatgtgctcggcaacaaaacatgggatcgcgaaacacgcgatctaaccggaaatgggaaggatctccgaatgaccctcgctcatatcaaggatcaaaaggaagtacctcctatggttaacgtgactcggtctgaggcctccgagggcaacatcacggtcacatgcagggctagtagcttctacccacgcaacattactttgacatggcgacaggatggggtgagtcttagccacgacacacaacagtggggagatgtccttcccgatggtaacggcacatatcagacatgggtagccacacgcatctgtcagggagaggaacagcggttcacctgctacatggagcactctgggaaccatagcactcaccctgtgccgtcgggcaaggttctggtgttgcaatctcactggcagacttttcacgtgtcagcagtggccgccgccgctgccgcaatcttcgtcattattattttctacgtgaggtgttgtaagaaaaagacctctgcagccgaaggacccgagttggtttctttacaggtgcttgatcagcaccccgttggcacttctgatcacagagacgcaacccagttgggattccagccactgatgtctgcactaggatcaacgggcagtaccgagggtgcatag

SEQ ID NO: 124234 - DNA, 1158 bp, synthetic construct
  misc_feature 1..1158: note = Description of Artificial Sequence: Synthetic coding sequence
  source 1..1158: mol_type = other DNA
atggggctcggtccagtgtttttgttactcgcagggatcttcccttttgctccgccaggcgccgcagccgaaccacactctctgcgttataatttaacagtgctgtcctgggacggctccgtgcagagtgggttcctggccgaggtgcacctggacggacaaccttttctacgctacgatcgccagaaatgtcgtgcaaaaccccaaggtcagtgggcggaagacgtgctggggaacaaaacctgggacagggagacacgtgatctgaccggcaatggaaaggatctgcggatgactctggcacacatcaaggatcagaaagaggggctgcactctctgcaagaaataagagtctgtgaaattcacgaggataacagcactcgcagctctcagcacttctactacgacggcgagctgtttctatcacaaaacgtggagacggaggagtggacagttcctcaatctagcagagcacagactttagcaatgaacgtgagaaattttctgaaggaagatgcaatgaaaacaaagacccattaccacgccatgcatgccgattgtctgcaggagttgcggcgctaccttgagtccagtgttgtcctcaggaggcgagtaccacccatggtgaacgtgacgaggagtgaagcttcagagggcaatataaccgtgacatgtagggctagctcgttctacccaaggaacatcacattaacatggcggcaggacggcgtctccctaagtcacgacacccagcagtggggagacgttttgcccgacggcaacggcacctaccagacatgggtcgccactagaatctgtcagggggaagagcaaagatttacgtgttacatggagcactctggcaaccatagtacccacccggtgccttcagggaaggtgcttgtcctgcagagtcactggcagactttccatgtcagcgccgtggcagctgccgccgccgccatctttgttatcatcatcttctacgtgaggtgctgtaaaaaaaaaacttctgccgcagagggacccgagttggtgtcactacaggtactggaccagcaccctgtgggaacttccgaccacagggatgcaacgcagctgggctttcaacccctcatgtcagctttggggagcaccgggtcaaccgaaggcgcgtag

SEQ ID NO: 124235 - DNA, 744 bp, synthetic construct
  misc_feature 1..744: note = Description of Artificial Sequence: Synthetic coding sequence
  source 1..744: mol_type = other DNA
atgggacagcgcgatcagggcctagaccgggagagaaagggaccacaggatgatccaggcagttatcagggcccagagagaaggaatttcttgaaggaggatgcaatgaagacaaagactcactaccacgctatgcacgcggactgcctgcaggagctcagaagatatctggagagcagcgttgtcttgcggaggagagttcctccgatggtcaatgtcacccgctccgaggccagcgagggcaacattaccgtgacttgccgagcaagctcattttatccacgcaatatcacccttacttggagacaggacggcgtgtctctatcccacgatactcagcagtggggggacgtcctgcctgacggcaatggcacataccagacgtgggtcgcaacccggatctgccagggcgaggagcaacgcttcacctgctacatggagcattccggaaaccactcaactcatcctgtccccagtggcaaggtgttagttctccagagccactggcaaacgttccatgtgtccgctgtcgccgcagctgcggccgctatattcgtgattataatcttttatgttcgctgttgtaagaagaaaacttcagccgccgaaggtccggaacttgtcagtctgcaggttttggatcagcacccagtcggcacctctgatcaccgcgatgccactcagttggggttccaacccctgatgtctgcccttggcagtacaggatctaccgagggggcctag

SEQ ID NO: 124236 - DNA, 672 bp, synthetic construct
  misc_feature 1..672: note = Description of Artificial Sequence: Synthetic coding sequence
  source 1..672: mol_type = other DNA
ttccctttcgccccgccaggggcagccgcagaaccccactccctccgctacaacctaacagtcctgtcctgggatggctccgtgcaatctggctttttagccgaagtccacctagatggacagccttttctgcgctacgataggcagaaatgtcgagctaagccacaaggccagtgggccgaggacgtactaggaaacaagacatgggatagggaaacacgtgatctgaccggaaacggaaaggatctcaggatgactctagctcacatcaaggaccagaaggaagtgccgcccatggttaacgtcacccggtctgaggcgtccgagggtaatatcactgtgacctgccgcgcgagctccttttatccccggaacatcatcctgacctggcgccaggacggtgtgagcttgtctcatgatacacaacagtggggagacgtgctacccgatggtaatggcacataccagacatgggtggctacacgcatttgcaggggagaagagcagaggtttacttgttacatggaacactccggcaaccactccactcaccccgtgccatcggggaaggtgcttgtacttcagtcacattggcagactttccacgtctccgcggttgcagctgggtgctgctatttctgttactattacttcctttgcccccttctgtag

SEQ ID NO: 124237 - DNA, 672 bp, synthetic construct
  misc_feature 1..672: note = Description of Artificial Sequence: Synthetic coding sequence
  source 1..672: mol_type = other DNA
ttcccatttgctccacccggtgccgctgcagaaccccattccttacgatacaacttgaccgtcctgtcatgggacggatcagtgcaatccggctttctcgcagaggtgcacctagacgggcaaccattcctgcgctatgaccgtcagaagtgcagagctaagccacaggggcaatgggcagaagatgtactcgggaacaagacatgggaccgagaaactcgggacctgacagggaacggcaaagacttgaggatgacgctcgctcatattaaagatcaaaaggaggtccctcccatggttaacgtgacacggtctgaagcttccgagggaaacatcaccgtcacttgtagggcgtccagcttttatccccgcaatattattttgacctggagacaagatggtgtgtccctttcacatgacacacagcagtggggggatgttcttccagacggcaacggaacatatcaaacgtgggtagctacccggatatgccgaggcgaggagcagcggtttacatgctatatggaacatagcggaaatcacagcactcatcccgtgccaagcggcaaagtgttagtgctccaaagccattggcagacctttcatgtatcagccgtggccgctggatgctgttacttctgctactactactttctttgcccccttctgtag

SEQ ID NO: 124238 - DNA, 672 bp, synthetic construct
  misc_feature 1..672: note = Description of Artificial Sequence: Synthetic coding sequence
  source 1..672: mol_type = other DNA
tttccattcgcacctcctggcgctgccgccgaaccccattccttgcgatacaatctcacggtgctctcctgggacgggagcgtgcagagcggttttttagccgaagtccacttggatggtcaaccctttcttagatacgatcgccagaagtgtcgcgctaaacctcaaggccaatgggctgaagatgtactcggcaacaaaacttgggacagggagactcgggacctaacgggaaacgggaaggacctacggatgaccctcgcccatatcaaggaccaaaaagaggttcctcctatggtgaatgttacccggtccgaggcatccgaaggcaatatcacagttacatgtagggcctcatcattctacccacgcaatatcattctgacctggcggcaggacggagtgtccctatcacacgacacacagcagtggggagacgtgctcccagacgggaatgggacctaccagacatgggtggctacccgcatctgcaggggggaggagcaacggttcacctgttatatggaacacagtggaaatcattctactcatcccgtgcctagcggaaaggtcctggttcttcagagtcactggcagacgtttcacgttagcgctgtcgcagctggttgttgctatttctgttattattatttcctctgtccactgctctag

SEQ ID NO: 124239 - DNA, 999 bp, synthetic construct
  misc_feature 1..999: note = Description of Artificial Sequence: Synthetic coding sequence
  source 1..999: mol_type = other DNA
atgggtcttgggccggtgttcttgctgctggcgggaatcttcccattcgctccccccggagcagccgccgagccccatagcctccgctataacctaacagtgctgtcgtgggacggttctgtgcaaagcgggttcctcgccgaggtgcacctggacgggcaacccttcctgcggtacgatagacagaagtgccgcgccaagccccagggacagtgggctgaggacgttttaggaaacaagacatgggatagagagaccagggatctgaccggaaacggcaaggatcttcgtatgacactcgcgcacatcaaggaccaaaaggaaggattgcattccctgcaggagatcagggtttgcgaaatacacgaggacaactctactagaagcagtcagcatttttactacgacggagaactgttcttgtcccagaatctcgaaactgaggagtggactgtgcctcagtcctctcgtgctcagacgctggctatgaatgtcagaaacttcctcaaggaagacgccatgaagacaaagacgcactatcacgctatgcatgccgactgtctgcaggagttgcggaggtatctggagtccggtgtagtcttacggagaacagttccccctatggtgaatgtgactcgatcagaggccagcgaagggaatattacagttacctgccgcgccagcagcttctatcctaggaacatcatactgacatggcggcaggacggagttagtctgtctcatgatacccagcagtggggcgacgtgcttccggacggcaacgggacctatcaaacgtgggttgctacaagaatttgccgcggagaggaacagagatttacgtgctacatggaacactctgggaaccacagtacccatcccgtgccatctggcaaagtgctggtgttgcagtcccactggcagacatttcacgtctcggcagttgccgcgggctgctgttatttctgctactactattttctctgccctctgctgtag

SEQ ID NO: 124240 - DNA, 1029 bp, synthetic construct
  misc_feature 1..1029: note = Description of Artificial Sequence: Synthetic coding sequence
  source 1..1029: mol_type = other DNA
atgggactcggccccgtctttctactgctcgccggcatttttccatttgccccaccaggagcagctgcggagccacatagcctaagatataacctgacggtgctgtcttgggacggatctgtgcagtcaggttttctcgctgaagttcacctagacggacagccctttctgaggtatgaccggcagaagtgccgggccaagcctcaaggccaatgggctgaggacgtcttgggcaacaaaacttgggaccgggaaacgagggatcttaccggcaacgggaaagatcttaggatgaccttggcccatattaaggaccagaaagaggttccccaatctagcagagcacaaaccctcgcgatgaacgtgagaaattttcttaaggaagacgcgatgaaaactaagactcattaccacgctatgcacgcggattgtctgcaagaactgcgacgctaccttgaatcttcagtcgtactgaggaggcgcgtgccccccatggtgaatgtgactaggtccgaggcaagcgaaggcaatatcaccgtgacttgtagagccagctcgttctaccctcgcaatattacacttacctggaggcaggatggggttagcctctctcacgacacacaacagtggggggatgtcctgcctgacggtaatggaacatatcagacttgggtggcaactagaatctgtcagggtgaggaacagcggtttacttgctatatggagcacagcggaaaccatagcactcatccagtgccctccggaaaagtgctggtgctgcaaagtcactggcagacgttccatgtctccgctgtggctgccgctgccgctgccattttcgtgatcatcattttctacgtgcgctgctgcaaaaaaaaaaccagcgccgcggagggaccagaactagtgtcactgcaggtcctggaccagcatcccgtggggaccagtgatcaccgcgatgctacgcagctcggatttcaacctctgatgagtgccctcgggagcactggctctacagagggcgcatag

SEQ ID NO: 124241 - DNA, 825 bp, synthetic construct
  misc_feature 1..825: note = Description of Artificial Sequence: Synthetic coding sequence
  source 1..825: mol_type = other DNA
ttcccttttgccccgcctggggccgcggccgagccacatagccttagatacaacctcactgtactgagttgggatggcagcgttcagtctggatttttaactgaggtacatttggacgggcagccgttcttgaggtgcgatcggcaaaagtgcagggcgaagcctcagggccaatgggccgaagacgttctcggcaacaagacttgggaccgggaaactagagatctcactggcaatgggaaggacctgaggatgacgttggctcatattaaagatcagaaggaagtccctcctatggtcaacgtaactcggtctgaggcctctgagggaaacattacagttacatgcagggcatctggcttttacccgtggaatatcaccttgagctggaggcaggacggcgtttccctgagccacgatacacagcaatggggggacgtccttcccgacgggaacggcacctaccagacttgggtggcaactagaatttgccaaggggaagaacagcgattcacgtgttatatggagcatagtgggaaccactctacacatcccgttccctctggcaaagtgctggtcttgcagagtcactggcagacttttcacgtatcagccgtggccgccgcggccatcttcgtgattatcattttttacgtcaggtgttgcaaaaagaagacatctgcggccgaggggcccgagctagtcagcctgcaagtgctggaccagcatccggtcggaacaagcgaccatcgggacgcaacacagctgggcttccagcccctgatgagcgacctggggagcaccggctctaccgaaggagcatag

SEQ ID NO: 124242 - DNA, 585 bp, synthetic construct
  misc_feature 1..585: note = Description of Artificial Sequence: Synthetic coding sequence
  source 1..585: mol_type = other DNA
atgggacaaagggatcaagggttagaccgggaacggaagggaccccaggatgaccccggcagctaccaaggccccgagcggcggaactttctgaaagaagacgctatgaaaaccaagacccactaccacgcaatgcacgctgattgcctgcaggaactgcggcgttacctagagtcaggggtcgttctgcggagaactgtgcctcctatggttaacgtgacccgatccgaggcgagcgaggggaatataacagtgacgtgtcgcgcttccagcttttatccaaggaatataatactgacatggaggcaggatggagtgagcctctcccatgatactcaacagtggggcgacgtgctgcccgatggtaatgggacctatcagacatgggtcgccacaaggatctgtaggggtgaggagcaaaggttcacctgttatatggagcacagcggcaatcacagcacacaccccgttcccagcggaaaggtgctagtgttgcagtctcactggcagacttttcacgtgagcgctgttgcagccgggtgttgttacttttgttactactattttctctgtccactgttgtag

SEQ ID NO: 124243 - DNA, 870 bp, synthetic construct
  misc_feature 1..870: note = Description of Artificial Sequence: Synthetic coding sequence
  source 1..870: mol_type = other DNA
atggggctcggtccggtgttcctgctactggccggtatctttccgttcgctccaccgggtgccgccgctgagcctcattccctgcggtataaccttaccgtgctttcatgggacggctctgtgcagagcggctttctggctgaggtccacctcgatgggcagccattcttgaggtatgatcggcaaaaatgccgagcaaagcctcagggtcagtgggctgaggatgtgctgggcaataaaacttgggatagagagacacgagacctgactggtaacggcaaagatttgcgcatgacgctggcgcatattaaggatcagaaggaagtgccccaaagcagccgagctcagacattagcaatgaatgtccggaatttcctgaaagaggacgctatgaaaaccaagacacattaccacgctatgcatgctgattgtttacaggagctccgacggtatctggaatctggggtcgtcttgcggaggactgtgccacccatggttaacgtgacccgcagtgaagcatcagaaggaaatattaccgttacttgtcgagcgtccagcttctatcctcgcaacatcatactgacatggcgccaggacggggtgtcactgtcccatgacacccagcagtggggcgacgtactgccggatggaaatgggacataccaaacttgggttgcgacccgtatctgccggggggaggagcaacgatttacatgttacatggagcactctggcaaccatagcactcatcctgtcccctctgggaaagtgctggtgctccagtcccactggcaaaccttccacgtgagcgcggtagctgcaggctgctgctacttttgttactattactttctgtgtccattactgtag

SEQ ID NO: 124244 - DNA, 999 bp, synthetic construct
  misc_feature 1..999: note = Description of Artificial Sequence: Synthetic coding sequence
  source 1..999: mol_type = other DNA
atgggcctcgggcccgtgttcctgctcctcgccggtatcttcccctttgcaccgcctggcgccgctgccgagccgcatagcctgcgctacaatctgactgtcctgagctgggacggttcagtacaaagcggctttctggccgaagtgcacctggacggacaacccttcttaaggtacgacaggcagaaatgtcgagcaaagcctcaggggcagtgggccgaggacgtgttaggcaacaagacttgggatcgggagacaagggacctcactgggaatggaaaggatctgaggatgaccctcgcccatattaaagaccagaaagaaggcctccactccctgcaggaaatacgagtgtgtgaaatccacgaagacaactctacgcggtccagtcagcacttctattatgacggcgagctgttcctgagtcagaatctggagactgaagaatggactgtgccacagagcagcagagcacagaccttagccatgaatgtaaggaatttcctgaaggaggatgcgatgaagacaaaaacacattaccacgcaatgcacgcagactgcctgcaggagctccgccgatacctcgagtccggcgtcgtgctgagaaggacggtgccccccatggtaaacgtgactcgatctgaggcctccgagggaaacattaccgtaacctgccgagcaagttctttttatcccagaaatattatcctgacctggaggcaagatggagtgtccctttcccacgatacacaacagtggggtgacgtcctgcctgatggtaatggtacgtaccagacctgggtcgctaccagaatatgtcgcggagaagaacagaggttcacctgctacatggagcacagtgggaatcatagcactcatcctgttccgtctggaaaggtgcttgtcctgcagagccattggcagaccttccacgtgtcagccgtcgccgccggctgctgttatttctgttattactacttcctctgccccttactctag

SEQ ID NO: 124245 - DNA, 999 bp, synthetic construct
  misc_feature 1..999: note = Description of Artificial Sequence: Synthetic coding sequence
  source 1..999: mol_type = other DNA
atgggcctagggcctgttttccttttactcgctggcatttttccgtttgctccgcccggggcagctgcggagccccatagcctgcggtataatctgacggtgctgtcttgggatggatctgttcagagcggatttctggctgaggtccacctggacggtcagcctttcttaagatatgaccgccagaagtgtcgcgcaaagccccagggacagtgggctgaggacgtgctcggcaataagacctgggatagagaaacccgggacctcacaggaaacgggaaagatttgagaatgactttggcacacatcaaggaccagaaggagggcctgcactccctgcaggaaatcagggtttgcgaaatccatgaggacaattccactcggagctcccagcatttctattacgacggagagctgttcctctctcagaatctagagacagaggaatggacagtaccacagtcctcacgggcgcaaacactcgctatgaatgtgcgcaacttcctgaaagaggatgccatgaagaccaagacccactaccacgcaatgcacgctgactgtcttcaggagctgcgccgctatctggagtcaggggtggtgctgagacggactgttcccccaatggtaaatgttaccaggtcagaagcctccgaaggcaatatcactgtcacttgtagagcatcctctttctacccaagaaatattattcttacctggcgccaagatggcgtttccctttcacacgacactcagcaatggggggatgtcttgcctgatgggaacggaacatatcaaacatgggtagccacaagaatttgccgaggcgaagaacagaggttcacctgttacatggaacattccggcaatcattccacccatccagtcccctccggaaaagttctggtcctccagtctcactggcaaaccttccatgtatcggccgtcgccgccggatgttgctacttctgctactattacttcctatgccctctgctctag

SEQ ID NO: 124246 - DNA, 1152 bp, synthetic construct
  misc_feature 1..1152: note = Description of Artificial Sequence: Synthetic coding sequence
  source 1..1152: mol_type = other DNA
atgggtttggggccagtgttcctcctgctggccggcatcttcccattcgcaccgcccggggccgctgccgagccacattcccttcggtataacttgacggtgctgtcttgggatggatccgtccagtccgggttcctgacagaagttcacttagacggacagcccttcttacgctgcgaccgccagaagtgcagagccaaacctcagggacagtgggctgaagatgtactagggaacaaaacctgggaccgagagacccgcgatctgaccggcaacgggaaggacctccgcatgacgctggcacacatcaaggatcagaaagagggtctgcacagtctccaggaaattagagtgtgtgagattcacgaagacaactctactagatctagtcagcatttttattacgatggagaactgttcctgtctcagaacctagagacgaaagaatggacaatgccgcagtcctcaagagcgcagaccttagccatgaacgtgcgaaactttttgaaggaggatgcaatgaagacgaagacccactatcacgccatgcacgccgactgtctgcaggagcttcggcgatacctgaaatccggagtagtgctcagaagaactgtgccgcctatggtaaacgtgaccaggagcgaggcttctgaaggaaacatcacggtcacttgtcgcgccagtggcttttacccatggaacattaccctgtcctggcgacaggatggggtgtccctttcacatgacacacaacagtggggggacgtcttgccggacgggaatggaacgtatcagacctgggtcgcaaccaggatttgccagggggaggagcaacgattcacctgttacatggagcattctggtaatcattcaactcaccccgtgccgtccggtaaggtcctggtcctgcagagtcactggcagacgttccacgtctccgccgtggctgcagctgccattttcgtgattatcatattctacgtgcgctgctgtaagaagaagacaagcgctgcggaagggccagaactcgtatcactccaagtgctggatcagcaccccgtcggcacatctgaccatcgtgatgcaacacagctaggtttccagccgctgatgtctgacctcgggagcactgggagcacggagggagcttag

SEQ ID NO: 124247 - DNA, 999 bp, synthetic construct
  misc_feature 1..999: note = Description of Artificial Sequence: Synthetic coding sequence
  source 1..999: mol_type = other DNA
atgggattaggccctgtcttcctccttctcgccggcattttccccttcgcacccccaggtgcagccgcagagccgcacagcttgagatataacttgaccgtcctgtcttgggacggctctgtgcaatccggcttcttggccgaggtccatctggacggacagcccttcctccgctatgatcgccagaaatgccgggccaagccacaggggcaatgggctgaggatgtgctgggaaacaagacctgggatagggaaacaagggacttgactggcaacggtaaggaccttaggatgaccctggctcatatcaaggaccaaaaggaggggctgcactccctgcaggagattcgcgtgtgtgaaattcacgaggacaatagcacccgttcaagccagcacttctactacgacggggagctcttcctgtcccaaaacctggagacagaggagtggaccgtgccccagtcttcccgtgctcagaccctcgctatgaatgttcggaattttctgaaggaagatgcaatgaaaaccaagacacactaccatgctatgcacgcagattgtttgcaggaactgagaagatacctcgaatcaggcgtggtgttgagaagaaccgtaccccccatggtgaatgtcacaaggtccgaggcgtcggaagggaacatcaccgtgacctgccgcgcatcatccttttaccctaggaatattatccttacttggcgacaggatggagtctctctgtcccacgatactcaacagtggggcgatgttctgcccgacggcaacggaacctaccaaacctgggtggccacgagaatttgccggggggaggagcagagatttacttgctacatggaacacagcgggaaccacagcactcaccccgtgccatcaggcaaagtgttggtcttacagagccactggcagaccttccacgtgtccgctgtcgcggccggatgttgctatttctgctactattattttctttgccccctgctgtag

SEQ ID NO: 124248 - DNA, 999 bp, synthetic construct
  misc_feature 1..999: note = Description of Artificial Sequence: Synthetic coding sequence
  source 1..999: mol_type = other DNA
atgggtttggggcccgtatttcttctgttagcgggcattttcccattcgccccccctggcgctgccgcagaaccccactccctccgatataacctgaccgtcctgagttgggatggaagcgttcagagcggtttccttgctgaagtccacttggacgggcagcccttcctgagatatgatcggcaaaaatgccgtgccaagcctcagggtcagtgggctgaggatgtactgggcaataaaacttgggacagagaaaccagagacctcacaggcaatgggaaggatctgagaatgacgctcgcccatataaaggaccagaaagaggggcttcactcactccaggaaatccgagtatgcgaaattcatgaggataactccacccggagtagtcagcacttttactacgacggtgaactgtttctaagtcagaatgtggaaacggaagagtggaccgtgccccagtcgtccagagctcagactctggcaatgaacgtgaggaacttcttgaaggaagacgccatgaaaaccaaaacacactatcacgcgatgcacgcagactgcctgcaggagctcagaagatatctggaaagtagtgtggtactaagacggcgtgtgcccccaatggtgaacgtgacaaggtctgaggctagtgaaggcaacatcacagtgacgtgtcgggcatcttccttctatccccgcaacattaccctcacctggcgccaggatggagtttcactctcccatgatacccagcaatggggcgatgtgctgcctgatggtaatggaacctatcagacctgggtggctacacgcatttgtcaaggagaagaacagcgctttacatgctacatggaacattctggcaatcactccacccacccggttccatctgggaaagtactggtactgcagtcacactggcagacattccacgtttcagcggtcgcggcatgttgctgttatttttgctactactatttcttatgtcctctcttgtag

SEQ ID NO: 124249 - DNA, 1152 bp, synthetic construct
  misc_feature 1..1152: note = Description of Artificial Sequence: Synthetic coding sequence
  source 1..1152: mol_type = other DNA
atggggcttggcagagttttgctttttcttgccgtcgctttcccctttgcacccccagccgcagctgcagaacctcatagcttgaggtacaacctgatggttttgtcccaggatgggtccgtacaatcaggctttcttgctgaaggccacctggatggccagcctttcctgagatatgacaggcaaaagaggagagctaagcctcagggccagtgggctgagaacgtcctgggtgcaaagacttgggatacagaaaccgaagatctgaccgagaacggtcaggatctacgccgaacactgactcacatcaaagaccagaagggcggactgcattccctccaggagatcagagtctgtgaaatccatgaggacagcagcacccgcgggagtcgtcacttctactacgacggcgagcttttcctgagccaaaatctagaaacccaggagtctacagttccacagagttccagagctcagacactggcaatgaacgtcactaacttctggaaggaggacgccatgaaaaccaagacacactatcgggcaatgcaggctgattgcctccaaaagctgcagcggtacttaaaatcgggagtggccattaggcgcacggtgcctccaatggtcaacgtcacctgtagtgaggtgtctgagggaaacatcaccgtcacatgtcgggcttcatccttttatccccggaacatcaccttgacgtggcggcaggacggagtgtcccttagccacaacacccagcagtggggggacgttctgcccgatgggaatggtacataccaaacctgggtcgctacacgcattcgccagggcgaagagcagaggttcacctgttacatggaacacagcggaaaccacggcacacaccccgtaccatcagggaaagcattggtactccagtcacaacgtaccgattttccatatgtgtccgcagctatgccgtgcttcgtcatcattattattttgtgcgtgccctgttgcaaaaaaaagactagcgcagctgagggacctgagctagtgtcactccaggtcctggatcagcatccggtgggaacaggagaccacagagacgccgcccagctgggctttcagccactcatgtccgctacaggctccaccggcagcactgaagggacttag

SEQ ID NO: 124250 - DNA, 1152 bp, synthetic construct
  misc_feature 1..1152: note = Description of Artificial Sequence: Synthetic coding sequence
  source 1..1152: mol_type = other DNA
atgggcctcggacgtgtcctgctcttcctggcagtggcattcccatttgcccctcccgctgcggccgccgagcctcacagtcttcgttacaatttgatggtactgtctcaggatgggagtgtacagtcaggtttcctggccgaaggccatcttgacggtcagccatttctgaggtatgacaggcagaaacgtcgagctaaacctcagggtcagtgggctgaagacgtgttgggcgcgaagacttgggacactgaaactgaggatctaactgaaaatggtcaggaccttaggagaaccctgacacacattaaagatcagaagggggggctccacagtctgcaggagattcgagtttgcgagatacatgaggactcatctactcgagggagccgccacttctactacgatggcgagctgttcctgagtcaaaacctcgaaacccaagagagtaccgttccccagagtagcagagcacagactttggcgatgaatgtcacaaatttctggaaagaggacgccatgaaaacgaagacacactaccgggctatgcaagctgattgcctgcagaagctccaacgctaccttaaatccggcgtagccatcaggcgaaccgtgccccccatggttaatgtgatttgctcagaagtgagtgaggggaatattaccgtcacgtgtagggccagctctttctaccctcgcaacatcaccttgacctggcgccaggacggtgtgagcttgtcccacaatacccagcagtggggagatgtcctgcccgacggtaacgggacatatcaaacgtgggtggcaacaaggattcggcagggggaagagcaacggttcacttgttacatggaacattcgggaaatcacggaacccatcctgtgccctctggcaaggccctggttttgcaatcccagaggacagacttcccttacgtgagcgccgctatgccttgtttcgtaataataatcattctgtgcgtcccgtgttgtaaaaagaaaactagcgccgccgagggtccagagctagtgtcattgcaggtgttagaccaacatcctgtgggtactggcgatcatcgtgacgctgcacagctgggatttcaacccttgatgagcgctactggctccacaggttctactgaagggacttag

SEQ ID NO: 124251 - DNA, 1023 bp, synthetic construct
  misc_feature 1..1023: note = Description of Artificial Sequence: Synthetic coding sequence
  source 1..1023: mol_type = other DNA
atgggtctcggaagagtgctcttattccttgctgttgctttccctttcgctcccccggcagcggctgccgagcctcatagtctgcgttacaatttaatggtgctctctcaggacggttctgtccagagtggctttctcgccgagggccatctagatggccagccgtttctgcgttatgatcggcagaagaggagggccaagccgcagggacagtgggccgagaacgtgctgggtgccaagacttgggacaccgaaaccgaggacctcacagagaacggccaggatctccgccggaccttgacacacatcaaggatcagaaaggagttcctcagtctagtcgggctcagaccctagcaatgaatgtgacaaacttctggaaggaagacgccatgaagacaaagactcattaccgggccatgcaggcggattgcttgcagaagctgcaacggtacttaaaatccggtgtagccatccgccggactgtgcctcccatggtgaatgtaacctgctccgaggtgtcagagggaaatatcacagtgacttgtagggcatcaagcttctaccccagaaacatcacactgacctggaggcaggacggagtcagtctttcacacaacactcagcaatggggggatgtcctcccagatggtaacggtacttaccagacatgggtggcaacaagaattagacaaggggaagaacagcggttcacctgctacatggaacacagtggcaaccacggaacgcaccccgtgccctctgggaaagcattggtgttacagagccagagaacagactttccatacgtatcagctgcgatgccgtgtttcgttattatcatcatcttatgtgtcccatgttgtaagaagaaaactagcgcagccgaaggtccagaactcgttagcctccaagtcctcgaccagcacccagtgggcaccggagatcacagggatgctgcacagctgggatttcagcctctgatgtcagccactggatccacggggtccacggaagggacctag

SEQ ID NO: 124252 - DNA, 1023 bp, synthetic construct
  misc_feature 1..1023: note = Description of Artificial Sequence: Synthetic coding sequence
  source 1..1023: mol_type = other DNA
atgggactgggccgggttctgctcttcctagccgtcgccttcccgtttgcacctccagctgctgccgcagagcctcactctctcagatacaatctgatggttctgtcccaggatgggtcagtccagtctggattcctggcggaggggcacctggatggtcagccttttctgagatacgacaggcagaagcgaagggccaagccccagggccagtgggctgaggatgttctcggagctaagacttgggatacagagacagaggatttgactgaaaacggtcaagacctgagacgtacgctgacccacattaaagaccagaagggagtccctcagtcgtctagagctcagaccctcgcaatgaacgtaacaaatttctggaaagaggatgcaatgaaaacaaagactcactaccgggccatgcaggccgactgtctgcagaaactccagcgatacttgaagagcggagtcgcaattcgccgtactgtaccccctatggtgaatgtaacctgttccgaagtctcggaagggaatattaccgtgacatgccgggcttcttctttttaccctcgaaacattacattaacatggcgccaggatggggtgagtctgtcgcataatacccagcagtggggggacgtcctgcctgacggcaacggaacctaccagacctgggtagcaactaggatcagacagggggaggagcagcgcttcacctgttacatggaacactccggaaaccatggtacacaccctgtgccttctggcaaagcacttgtcttgcaaagtcaaaggaccgattttccctacgtttcagctgctatgccatgtttcgtgatcattatcatcctgtgtgtgccctgttgtaagaagaagaccagcgccgccgagggtcctgagctggtgagcctacaggtcctggatcagcatcccgttgggaccggagatcatagggacgcagcacagctgggttttcagcctcttatgtcagctaccggttctaccgggtccacagagggtgcctag

SEQ ID NO: 124253 - DNA, 126 bp, synthetic construct
  misc_feature 1..126: note = Description of Artificial Sequence: Synthetic coding sequence
  source 1..126: mol_type = other DNA
atgggtctgggacgcgtcctgctctttttggcagtggccttcccctttgcccccccggccgcagcagctgtcgagatgggcttccacagagtgagccaggacggtctggacttgctgaccagctag

SEQ ID NO: 124254 - DNA, 1083 bp, synthetic construct
  misc_feature 1..1083: note = Description of Artificial Sequence: Synthetic coding sequence
  source 1..1083: mol_type = other DNA
tgaccacattctctccgatacaatctcatggtcttgtcgcaggatggctccgtgcagagcggctttctggctgaaggacacctcgatggccagccctttctcagatacgataggcagaagcgccgggctaaaccgcaggggcagtgggcggaagatgttctcggggcaaaaacttgggacactgagacggaggacctgacggaaaatggccaggacctcagacggacactaacacatatcaaggaccaaaagggggggcttcacagtttgcaggaaatccgcgtctgcgagatacacgaggattcaagcactcgggggtctcgccatttttactacgacggagaactatttctcagccaaaatctggagacgcaagagtcaaccgtgccgcaatcaagcagggctcaaactcttgccatgaatgtgaccaacttttggaaggaagatgctatgaaaacaaagacccactatagggccatgcaggctgattgcctgcagaaacttcagcgttacctaaaaagcggcgtggctattcgccggactgtgccccccatggtgaatgttacttgcagcgaggtgagcgaaggtaacattaccgtgacatgccgggcgagctctttttaccctagaaacatcacattgacctggaggcaagacggcgtgtccctctcccacaacacccaacagtggggcgacgtcttgccagacggtaatgggacttaccagacttgggtggccaccagaatcagacagggcgaagaacagaggttcacttgttacatggaacactccggcaaccatggcacccatccagtcccatccggcaaggctttggtgctgcagagccaacgaactgacttcccttatgtgagcgccgcaatgccctgtttcgtgattattatcatcttatgtgtcccttgctgtaagaagaaaactagcgcagcagaaggcccagaactggtatctctgcaggtgttagaccaacaccctgtagggaccggcgaccaccgcgacgctgcccaactgggttttcaaccgctgatgagtgctactgggtccaccggttcaaccgagggagcctag

SEQ ID NO: 124255 - DNA, 1152 bp, synthetic construct
  misc_feature 1..1152: note = Description of Artificial Sequence: Synthetic coding sequence
  source 1..1152: mol_type = other DNA
atgggactgggacgcgtgttgcttttcctggctgtggcctttccttttgccccgcccgcagccgctgcagaaccccactccctacgttataatctgatggtcttatcccaggacggctctgtacagagtggatttctcgcggagggacatctcgacggccagccattcctgaggtatgacagacagaaacgcagagccaagccccaggggcagtgggcagaggacgtcctaggcgcaaagacatgggataccgagactgaggatttgacagaaaacggtcaggacctgcgccggacacttacccatataaaggatcagaaaggagggttacatagtctgcaagaaattcgtgtctgtgagattcatgaggattcaagcacacgcggttctcgacacttctattatgatggggaattgttcctctcccagaacctggagacacaggagagtacagtgcctcagagcagtcgagcgcaaactcttgccatgaatgtgaccaacttctggaaggaggatgccatgaaaaccaaaacacactaccgtgctatgcaagctgattgccttcagaagctccaacggtaccttaagagcggggtcgctatccggcgcacagtcccccctatggtgaacgtgacctgtagtgaagtctcggagggcaacatcacagtgacatgccgagctagctccttttacccccgaaacatcaccttgacatggaggcaggatggagtgtccctctctcacaacactcagcagtggggagacgtcctcccagatggtaacggaacctatcagacgtgggtcgctacacggatcagacagggtgaggagcagcggtttacatgctatatggaacactccggtaaccatggcacccatcctgtgccatctggcaaggcgctagtcctgcaatcacagagaactgattttccttatgtcagcgccgctatgccctgctttgtgatcattatcattctgtgcgtgccctgttgcaagaaaaagacgagcgcagctgaaggtcctgagctggtaagcctgcaagtgctagaccagcaccccgtgggaaccggtgatcacagagacgctgcccagttgggctttcagcctcttatgagtgcaacaggttcaacagggtctacggagggtgcatag

SEQ ID NO: 124256 - DNA, 1023 bp, synthetic construct
  misc_feature 1..1023: note = Description of Artificial Sequence: Synthetic coding sequence
  source 1..1023: mol_type = other DNA
atggggcttgggagggtgcttctctttcttgctgtcgctttcccctttgctccgccggccgcagcggcagaaccacactctctgcgctacaatctgatggtgctctcacaagacggttccgtacagtcagggttcctggctgaaggacacctggacggtcaaccttttcttcggtatgatagacagaaacggcgcgctaagccacagggccagtgggctgaggatgtgttgggcgcagagacctgggatactgagacagaggacttaacagagaacggtcaggatctgcgaaggactttgactcacatcaaggaccaaaaaggcgtaccacagtccagccgtgctcagacattagctatgaacgtaacgaacttttggaaagaagacgcaatgaagactaagacccactaccgagcaatgcaggctgattgcctccagaaacttcagcgctacttgaaaagtggagtggcaatcagacgcacagtgcccccaatggtcaatgtgacatgctcagaggtgagcgagggaaacattaccgtgacttgcagagcgagttcgttctacccaagaaacataactctcacctggaggcaggatggggtatctctctcacacaacacccagcagtggggcgacgtcctccccgacggcaacggaacctaccaaacatgggttgctacccggataaggcagggcgaggagcagagattcacatgctacatggaacacagcgggaatcacggtacacatcctgtaccctctggcaaagctctcgtgctgcagagccagaggaccgattttccgtatgtttcggccgcgatgccttgttttgtcataatcataatcctgtgcgtcccctgttgcaaaaagaaaacctcggcggccgagggacctgagttggtgtcactccaggtgctcgaccagcacccagtcggaacaggggatcacagggatgccgcccagctaggctttcagccgctgatgagtgcaacaggcagtaccggtagcaccgaaggcgcttag

SEQ ID NO: 124257 - DNA, 1152 bp, synthetic construct
  misc_feature 1..1152: note = Description of Artificial Sequence: Synthetic coding sequence
  source 1..1152: mol_type = other DNA
atgggactcggaagggtgctcctgtttctggccgtggcattcccattcgccccacccgccgcagccgccgagcctcactccctgcgctacaacctgatggtgttgagccaggacggctcagtgcagtcagggtttctggctgaaggacatctcgacggacaaccctttttgaggtatgacaggcagaagcgtcgcgcaaaacctcagggccagtgggctgaagatgtgttaggtgcagagacatgggacacagagaccgaggatttgaccgagaatgggcaggacctgcgaagaaccctgacgcacattaaagatcagaaaggcgggctgcactcattacaagagatacgagtttgcgagattcacgaggactcctccacacggggcagcaggcacttttattataacggggagttgtttctttcacaaaacctggaaacgcaggagtcgactgttcctcagtcttcaagggcacagactctagccatgaatgttacgaacttttggaaggaagacgcgatgaaaacaaagacacactaccgagcgatgcaggctgactgtctccaaaagctccaaagatatcttaagtcaggtgttgctattagaaggacggtcccaccaatggtaaacgtgacatgcagtgaggtgtcagagggcaacatcactgtgacctgtcgggcatcctctttctacccaaggaacattaccctcacttggcggcaggatggagtaagtctttctcacaacacgcagcagtggggggatgtgcttcccgatggcaatggtacctatcagacgtgggtggccactcgtattaggcaaggcgaagagcagaggttcacctgctatatggagcatagtggtaatcacggaacccatcccgtcccctcaggcaaggccctggtgctgcagagtcagcggacggactttccttacgtttccgcggccatgccatgcttcgtgataattatcatcctgtgcgtgccttgttgcaaaaaaaaaacctccgcagcggaaggcccagagttagtgagcctacaagttctggaccagcaccccgttgggacaggggatcaccgggatgctgcccagctgggctttcagcccctgatgtccgctacgggcagtacaggaagtactgagggcgcatag

SEQ ID NO: 124258 - DNA, 1023 bp, synthetic construct
  misc_feature 1..1023: note = Description of Artificial Sequence: Synthetic coding sequence
  source 1..1023: mol_type = other DNA
atgggactgggtagagtgctgctattcctggctgtcgcctttcccttcgcccctcctgcggccgccgcagaacctcattcactaagatacaatttaatggttctctcacaggacggtagcgtgcagagcggatttctagccgaaggccacctagatggtcagccttttctcagatacgataggcaaaaacgccgtgctaaaccccagggccaatgggctgaggatgttttaggagcaaaaacctgggacacagagacagaagatttgacagagaacggacaggatctaagaaggactctgacacacattaaagaccagaaaggcgtgccccagtctagtagagctcagaccctcgcgatgaacgtgaccaatttctggaaggaagacgctatgaaaaccaagacacactatcgggctatgcaggccgactgcctgcagaagctacaacgatacctgaaatctggtgttgcaattaggagaacagtaccacctatggtgaatgtcatctgctccgaggtgagcgagggaaatattactgtcacctgccgcgcctcttccttttacccgcgcaacatcacactaacgtggaggcaagacggggtgtcactttcacacaacacccagcagtggggtgatgtactcccagacgggaacggcacataccagacatgggtggctacacgtattcggcagggggaggagcagaggtttacatgctatatggagcactctggcaaccacggtacccaccctgtaccctctggtaaagctttggtgctccaatcgcagcgcacagatttcccttacgtctcagctgccatgccttgtttcgtgattataatcatcttatgtgtcccctgttgcaagaagaagacttctgcggctgaggggcccgagctggtgtccctgcaggtcctagatcagcaccccgtgggaacaggtgaccaccgggatgccgcacagttgggattccaacccctcatgagtgctaccggcagcacgggcagtaccgagggcacatag

SEQ ID NO: 124259 - DNA, 1023 bp, synthetic construct
  misc_feature 1..1023: note = Description of Artificial Sequence: Synthetic coding sequence
  source 1..1023: mol_type = other DNA
atgggtctgggccgcgtgctcctttttctggcggtggcctttcccttcgcacccccggctgccgccgccgagccacactccttacgatataacctcatggtgctgtcgcaagacgggagcgtgcagagcgggtttctggctgaggggcacctggacggccagccatttctgcgttacgatcgacagaagcggagggccaagccccagggccaatgggccgaagatgtgctgggcgccgaaacgtgggataccgagactgaagacctaaccgaaaacggccaggatctcagacgcactctcacccacattaaagaccagaaaggcgtgcctcagtcaagtagggcccagacattagccatgaatgttactaacttttggaaagaggatgcaatgaaaacgaagacccattatagagctatgcaggccgattgtttgcagaaactgcaaaggtacctgaaatctggagtggccatacgtcgcaccgtgccacccatggtaaatgtcacctgttcagaggtctccgaaggcaatatcaccgtgacctgtcgcgctagtagcttctatccgcgaaatattaccctcacttggagacaggatggagtgtctttgtcccacaatacgcaacagtggggtgatgttttaccggatggaaacggcacataccagacctgggtggcaacgcggatccgacagggtgaggaacaaagatttacctgctatatggagcactctgggaaccacggcacccaccctgtccccagtggtaaggccctggttctgcagtcccagcgcaccgatttcccctacgtgagtgcagccatgccctgtttcgtcataatcataattttgtgtgtgccttgttgcaagaagaaaactagcgccgccgagggaccggagctggtgagtctgcaggtgcttgatcaacacccagttggcacgggcgaccaccgcgacgcagcccaacttgggttccagcctctgatgagtgcaaccggcagcactggcagcacagagggcgcctag

SEQ ID NO: 124260 - DNA, 1023 bp, synthetic construct
  misc_feature 1..1023: note = Description of Artificial Sequence: Synthetic coding sequence
  source 1..1023: mol_type = other DNA
atggggctcggccgtgtcctactttttctggccgtggcattccctttcgcccccccggccgctgccgccgaaccacactcactccgctacaatttaatggtgttgagccaggatggctctgttcagagcggttttttagccgaaggacacctcgatgggcagcccttcctgcgttacgaccgacagaaacgccgcgcgaagccccagggtcagtgggccgaaaacgtcttgggtgccaagacttgggacacagagactgaagacctgactgagaatggccaggacttgcggcggaccctgacacatattaaagatcagaaaggcgtccctcaatctagtagagctcaaaccttggccatgaacgtcaccaacttttggaaagaggatgcaatgaagactaagactcactatagagcgatgcaggccgattgtctgcagaaactccagagataccttaagtccggcgttgctatccggcggacggtgcccccaatggttaatgttacctgtagcgaggtctccgaaggaaacatcacagtgacgtgccgtgcctccagtttctacccaagaaatataactctgacatggcgccaagatggtgtaagcttgagtcataacactcaacaatggggcgacgtccttcctgatggtaatggaacctatcagacatgggtagccacccggatccggcagggcgaagagcagaggtttacatgctacatggaacatagtggtaaccacggtacacatcctgtgccaagcggtaaagcactcgttttgcagagccagcggactgattttccttacgtgagcgcagccatgccttgttttgtcatcattatcattctctgcgttccttgctgcaaaaaaaagacatcagcggccgaaggtcccgaattggttagcttgcaggtgctggaccagcatcctgttggaaccggagaccaccgcgatgccgcccagctcggctttcagccactgatgtcagcgacagggagtaccggaagcaccgaaggaacgtag

SEQ ID NO: 124261 - DNA, 1152 bp, synthetic construct
  misc_feature 1..1152: note = Description of Artificial Sequence: Synthetic coding sequence
  source 1..1152: mol_type = other DNA
atgggtctcggcagagttcttctgttcctggcagtggccttcccatttgcaccccccgcagctgccgcagagccacattcattgcgttacaacctgatggtcctgagccaggatggatccgtacagagcggctttcttgctgagggtcacttggacgggcagcctttccttagatatgaccgacagaaacggagggccaaaccacaggggcagtgggcagaggacgtgcttggggcaaagacttgggatacagaaaccgaggatttaacagagaacgggcaagacctgcgaaggactctcacccatatcaaggaccagaaggggggcttgcactccctgcaggagatcagggtttgcgaaatccacgaggatagcagcactaggggctcaaggcacttctactacgacggtgaactgtttctttcacaaaacctggaaacacaggagtctacagttcctcagtcaagccgcgcccagacattggctatgaacgtgactaacttttggaaagaggatgccatgaaaacgaagactcattacagagccatgcaggccgactgtttacagaagcttcagcgttacctaaaatcaggagtcgcgatccgcagaaccgtcccacccatggtcaacgtgacatgcagcgaggtatcagaaggtaatataacagtcacttgtcgagcctcctccttctaccccaggaatatcactcttacttggagacaggatggagtcagcctgagtcacaatacccagcagtggggcgacgtgttgccagacggaaatggaacataccagacatgggtggccacccggatccgccagggcgaagaacagagatttacctgctacatggaacactcagggaaccatggcactcatccggttccgtccggaaaggccttggtgttgcaatctcagcggactgacttcccttatgtctcggccgccatgccctgctttgtcattatcattatactgtgtgtgccatgttgtaagaagaaaacctctgccgcagagggcccagagcttgtgtcactgcaagtcctcgaccagcatcctgtcgggactggggatcaccgggatgcggctcagctgggtttccagccccttatgagcgctacaggtagcaccggatctaccgagggcgcttag

SEQ ID NO: 124262 - DNA, 1152 bp, synthetic construct
  misc_feature 1..1152: note = Description of Artificial Sequence: Synthetic coding sequence
  source 1..1152: mol_type = other DNA
atgggactgggccgtgtactgctgttcctggccgtggcgttccctttcgcgccccctgccgcagcagccgagccccactctctgcgttacaatctcatggtcttgtcacaagatgggtctgtacaatccggatttctggctgaaggacatctggacggacagcctttcctccgctatgatagacagaagcgccgcgctaagccgcaaggacaatgggccgagaatgttttgggggcgaaaacatgggacacagagacggaagacctgacagagaacgggcaggatcttcgacgcaccctgacccacatcaaagatcagaaaggaggcctacattctctccaagagataagggtctgcgagatacacgaagactcaagtacccggggctctaggcacttctactatgatggcgaactcttcttgtcacagaacttggagacacaggaaagcacagtcccacagtctagcagggctcaaactctggccatgaacgtgactaacttctggaaagaggacgcaatgaaaaccaagacccattatcgcgccatgcaagccgactgtttgcagaagctgcagcggtatctgaaaagtggtgtggctataaggcggactgttccgcctatggtgaacgtgacatgtagcgaggtgagtgagggtaatatcaccgttacatgccgggccagcagcttttacccaagaaacatcaccttaacttggcggcaggatggcgtaagcctaagccataacacgcagcaatggggcgatgtactgcccgatggcaatggaacataccagacgtgggtggccaccagaatacgccagggcgaggagcagcgctttacgtgctacatggagcacagtggaaatcatggcactcacccagtcccctcgggaaaggcccttgtcctgcagagccaacggacagatttcccatacgtttccgccgcgatgccctgtttcgtgataataatcatactctgtgttccgtgttgcaagaaaaaaacctccgctgccgaaggccctgaactggtttcccttcaggtgttggaccagcaccccgtggggaccggcgaccatcgtgatgcggcgcaactgggcttccagcccctgatgagcgccactggttcaacgggctctacagagggtacttag

SEQ ID NO: 124263 - DNA, 1023 bp, synthetic construct
  misc_feature 1..1023: note = Description of Artificial Sequence: Synthetic coding sequence
  source 1..1023: mol_type = other DNA
atgggcctggggcgagtgctcctctttcttgctgtcgcatttcctttcgctcctccggctgcagctgcggaaccacatagcctgcggtataatctaatggtgttatcccaagatggctcagtgcagtctggatttttggcagagggccatctggacggccaaccatttctgaggtacgacaggcagaaacgaagggctaagccccagggccaatgggctgaggacgtcctgggtgcgaaaacatgggataccgaaactgaggatctgacagaaaacggacaagacctacgacgcactcttacgcatatcaaagaccagaaaggggttccccaaagtagtagggcacagacgctggccatgaatgtcaccaatttctggaaggaggatgctatgaagacaaaaacccattaccgagctatgcaagcggactgcctacagaaactccagcgttatctgaagagtggcgtggcgatccggcgcactgttccccccatggtgaacgtcacgtgttcggaggtctcggaggggaatatcacagttacttgccgtgccagcagtttctatcctaggaatatcaccctaacttggagacaggatggagtgtctttatctcacaatacacagcagtggggagatgtattacccgatggtaatggtacctaccagacctgggtggctacccggatccgccagggcgaagagcaacgtttcacctgttatatggagcatagtggcaatcacggtactcatcctgtgccttctggaaaggctctggttctccaatctcaacgcaccgattttccctacgtttctgctgccatgccctgctttgtcataattatcattctctgcgtgccatgttgcaagaagaagacgtccgccgctgagggccctgagctggtgagtctccaggtgcttgatcaacacccggtaggtaccggggatcaccgggacgcagctcagctaggctttcagcccctgatgagtgcaacaggttcaactggatctactgaaggggcatag

SEQ ID NO: 124264 - DNA, 954 bp, synthetic construct
  misc_feature 1..954: note = Description of Artificial Sequence: Synthetic coding sequence
  source 1..954: mol_type = other DNA
taaccacactcacttcggtacaacctcatggtgctgtcgcaggacgggtccgtgcagagcgggtttctcgccgaaggacacctggatgggcagccctttctgcggtacgatcgacaaaagagacgggccaaaccccaaggacagtgggcagaggacgtcctgggagctaagacttgggacaccgaaacggaagaccttacagagaatgggcaggacctcaggagaacgctaacccacataaaagaccaaaaaggggtgccacagtccagcagggcacagacgctcgccatgaacgtcacgaatttttggaaagaggacgcgatgaaaacgaaaacacattaccgagcaatgcaggctgactgcctgcaaaagttgcagcggtacctcaagtctggcgttgcaatcagacgtacggttcctcccatggtaaacgtgacctgttctgaagtctccgagggtaatatcacagtcacttgcagggccagctcattttatccgaggaatataaccttgacctggcgtcaagacggagtgtccctgtctcataacacacagcagtggggggacgtgctgccggacggcaatggaacatatcagacttgggtagctacaagaattagacaaggggaggaacagagatttacctgttatatggagcactctggtaatcatggaactcacccagtcccatcaggcaaggccctagttctgcagtcgcaaagaaccgatttcccttatgtgtctgcagccatgccctgtttcgtgatcattattattctgtgcgttccttgctgcaaaaagaaaacatccgccgctgaaggccctgaactggtctcgctccaggtcctggatcagcaccccgtgggaacaggagatcatcgagatgcagcgcagctggggttccagccactgatgtcagcaacagggtctaccgggagcaccgagggagcttag

SEQ ID NO: 124265 - DNA, 1152 bp, synthetic construct
  misc_feature 1..1152: note = Description of Artificial Sequence: Synthetic coding sequence
  source 1..1152: mol_type = other DNA
atggggttgggacgggttttgctgttcctggccgtcgcctttccgtttgctccccccgctgctgctgcagaacctcattctttgaggtataatctgatggtgctgagccaagatggctctgtgcagtcaggttttttagctgagggccatttggatggacaacctttcttgcggtacgacaggcaaaaacgaagagcaaagccgcaggggcagtgggccgaagatgttctgggcgccgagacctgggacaccgaaaccgaagacctaaccgaaaacggacaggacctccgacgtactctgacccacattaaagatcagaagggcggcctccatagcctgcaggaaattagagtttgcgagatgcacgaggattcttcaacccgggggtccaggcacttttattataacggcgagctttttctgagtcagaacctcgagacccaggagtccaccgtgcctcagtcttccagggcgcaaacgcttgctatgaatgtcacaaacttctggaaggaggacgcaatgaaaacaaaaacgcactatcgcgctatgcaagcagactgcctgcagaaactacagaggtacctgaagtcaggcgtggctattagaagaacagtgcctccgatggtcaacgttacctgttcagaggtgagcgaaggcaacatcaccgtgacatgccgcgcctctagcttttatccaagaaacatcacattaacctggcgacaagacggggtgagcctttctcataacacacaacagtggggcgatgtgctgccagatgggaacggaacctaccagacatgggttgctacacgcatccgccaaggcgaggagcagaggtttacttgctatatggaacacagtggtaaccacggaacccaccctgtgccatcaggtaaagcactggtcctgcagagccagcggaccgacttcccctatgtgtctgctgcgatgccttgcttcgtgattattattattctgtgcgtgccatgttgcaagaagaaaactagtgccgctgaaggaccagaactcgtaagcctgcaggtgctcgaccaacaccccgttggcaccggagaccaccgagatgccgcccagttaggattccagccgttgatgtcagcaaccgggtcgactggaagtacagagggtgcttag

SEQ ID NO: 124266 - DNA, 1056 bp, synthetic construct
  misc_feature 1..1056: note = Description of Artificial Sequence: Synthetic coding sequence
  source 1..1056: mol_type = other DNA
atggttctgtcacaggacgggagcgtgcagagtggatttctggcagaggggcatctggacggccagcccttcctgagatatgaccggcagaagcgccgggctaaaccccaggggcagtgggccgagaatgttctgggcgctaagacatgggacaccgagaccgaggacctgactgaaaacggtcaggatctgcgacgcaccctgactcacatcaaggaccagaaggggggactacattccctgcaggaaatcagagtgtgtgagatccatgaggatagcagcactcggggtagcagacacttctattacgatggagaactctttttaagccaaaatcttgagacgcaggaatccacagtgccacagtcctcccgggcccaaactcttgctatgaatgtgaccaatttttggaaagaagatgccatgaaaacaaaaactcattatagggctatgcaagccgattgcttacagaaactccagcgatacttgaagtccggtgtggctataagaaggacggtccctccaatggtgaacgttacttgttccgaggtcagcgaaggtaatatcacagtgacgtgtagggcaagctccttctatccccgcaatatcacgctgacgtggaggcaggacggcgttagcctctcccacaatacccaacaatggggcgacgttctccccgacggaaacggcacctaccagacttgggtagcgacaaggattcggcagggtgaggaacagaggtttacatgttatatggaacactcagggaaccatggcactcaccccgtgcctagcggcaaagccctggtcctgcaatctcagaggactgactttccctatgtgtccgctgccatgccctgtttcgtcatcatcatcatcttatgcgtgccatgctgcaaaaagaaaactagcgcagctgaaggtccggagctggtgagcctccaggtgctggatcaacaccctgtcggtacaggggatcaccgagatgcggctcagctgggatttcagcccctgatgagcgccaccggtagtaccggatccaccgagggtacatag

SEQ ID NO: 124267 - DNA, 126 bp, synthetic construct
  misc_feature 1..126: note = Description of Artificial Sequence: Synthetic coding sequence
  source 1..126: mol_type = other DNA
atgggcctagggcgggtgctgctgttcctcgccgtggcttttcctttcgccccgccggcggcggccgcagtggagatgggcttccaccgggtaagccaggatggtttggacttgcttactagttag

SEQ ID NO: 124268 - DNA, 126 bp, synthetic construct
  misc_feature 1..126: note = Description of Artificial Sequence: Synthetic coding sequence
  source 1..126: mol_type = other DNA
atgggacttgggagggttcttcttttccttgcagtcgcatttccctttgctccaccagcagcagcggccgttgagatggggtttcacagagtttctcaagacggcctcgatctgttaacctcctag

SEQ ID NO: 124269 - DNA, 1056 bp, synthetic construct
  misc_feature 1..1056: note = Description of Artificial Sequence: Synthetic coding sequence
  source 1..1056: mol_type = other DNA
atggtgttatcccaggacggaagcgtgcaatcagggttcttggccgagggccacctggacggtcaaccatttctccgctatgaccggcagaagcgacgggccaagccccagggtcaatgggccgaagacgtgttgggtgcagagacctgggatactgaaacagaggacctcacggagaatggacaggacctgcgacgcaccctgacccacatcaaagatcaaaaaggcgggctacactctctccaagagatccgggtttgtgagatgcacgaagatagctcaacgagagggtcaagacacttctactataacggcgaattgtttctctcccagaacctcgagactcaggaatctacagtgcctcagtctagcagggcccaaacgttggctatgaacgttaccaacttttggaaggaagatgcaatgaagactaagactcattaccgggccatgcaagccgattgcctgcaaaagctccagcgatatttgaaatcaggggtggccattcgccggacggtgccgcccatggtcaatgtcacatgttccgaagtaagtgaaggaaacattacagtcacctgccgtgccagctctttctacccaaggaatattaccctaacctggcgccaggacggcgtgtccttgtctcacaacactcagcaatggggtgacgtgttaccggacggcaacggcacctaccagacctgggtagctacaagaatcagacagggagaggaacagcggtttacttgctacatggagcactccgggaatcacggaactcatcccgttccttccgggaaggcgctggtcctacagagccagcgtaccgactttccgtacgtatccgccgcaatgccctgttttgtgatcataataatcctgtgtgtgccctgttgtaaaaaaaaaaccagcgctgctgagggacccgagctggtgtccctgcaagtgttggaccagcacccagtcgggacaggggaccacagggatgctgcccagctcgggtttcagcctctgatgagcgccaccggatctactggaagcaccgagggagcctag

SEQ ID NO: 124270 - DNA, 1056 bp, synthetic construct
  misc_feature 1..1056: note = Description of Artificial Sequence: Synthetic coding sequence
  source 1..1056: mol_type = other DNA
atggtgctcagccaggatggcagcgtgcaatccgggttcctggccgaaggccatttggatggccaacctttcctgcgttatgatcgccagaaacgccgggccaagccccagggccaatgggccgaggacgtactcggggccaaaacatgggacacagagacagaagatctgacagagaacggccaggacctccgtcgaacactaacccacattaaggatcagaagggaggcctgcactccctgcaggaaattcgtgtctgtgagatccatgaggattcatccacccggggctccagacatttctattacgatggtgaactcttcctgtcccagaacctagagacccaagaaagtaccgtcccgcaatccagtagggcacagactttggccatgaatgtgactaacttctggaaggaagacgcgatgaagaccaaaactcattaccgcgcaatgcaggccgattgcctccagaaactgcagagatacctgaaatcgggcgtcgccatcaggagaactgtgccgccgatggttaacgtcatatgctctgaagtgtctgagggcaatattactgtcacatgcagggcttcttccttctaccctagaaatattacactgacatggcggcaggatggcgtgagtctttcacacaatacccagcagtggggtgacgtccttcccgatggcaacggcacctaccagacgtgggtcgccaccagaatcaggcaaggagaggagcagagattcacctgctacatggagcatagtggaaaccacggcacgcatccggtaccctcagggaaggccctcgttcttcagagccagaggacagactttccgtacgtgtccgccgccatgccctgtttcgtcataattattattctgtgtgtgccttgttgtaaaaagaaaactagcgcggccgaggggccagaactggtgtctctccaggtcttagatcagcaccccgtcggcacaggagaccacagagacgctgcacaactcggattccagcctctgatgtctgcaacgggctccacaggctctacagagggcacctag

SEQ ID NO: 124271 - DNA, 126 bp, synthetic construct
  misc_feature 1..126: note = Description of Artificial Sequence: Synthetic coding sequence
  source 1..126: mol_type = other DNA
atgggtctgggacgtgtgctgctgttcctagcagtggcttttccattcgccccccccgcggccgccgcagtggagatgggattccaccgggtgtcacaggacggactcgacctgctgactagctag

SEQ ID NO: 124272 - DNA, 126 bp, synthetic construct
  misc_feature 1..126: note = Description of Artificial Sequence: Synthetic coding sequence
  source 1..126: mol_type = other DNA
atgggcttgggtcgcgtgttgttgttcctagcggtggccttccctttcgcccctccagctgcggccgctgtggagatggggttccacagagtgtctcaggatggcttggacctgctgacaagctag

SEQ ID NO: 124273 - DNA, 1056 bp, synthetic construct
  misc_feature 1..1056: note = Description of Artificial Sequence: Synthetic coding sequence
  source 1..1056: mol_type = other DNA
atggtcttgtctcaggacggaagcgtgcagtccggttttctcgccgaaggtcacctggacggccagccgttcctgcgctacgataggcagaagcgccgagccaaaccgcagggacagtgggcagagaatgtccttggcgcgaaaacatgggatacagagacagaggatctcacagaaaacggccaagacctgcgtagaacactaacacacatcaaagaccagaagggtggactgcattcattgcaggaaattcgagtgtgcgaaattcacgaggactcgtctaccagaggctcccggcacttctattacgacggcgagttatttttatcccagaatcttgagacacaggaatccaccgttccccagtcttccagggcccagacactggccatgaacgtgactaacttctggaaggaggacgccatgaaaacaaaaacacactacagagctatgcaagccgattgtttgcagaaattgcagagatatttgaagagtggtgtggccatacgccgtacggttccccccatggtcaacgtaacctgttctgaggtgagcgaaggtaatatcactgttacctgtagggcttcctctttttaccctagaaatattactttaacatggcgacaggatggagtttctctgtctcacaatacacaacaatggggggacgtgctccccgacggtaatggaacataccagacctgggtggctaccagaattcggcagggagaggaacagcgttttacctgctacatggagcactccggcaaccacggaacccatcccgtcccaagtggtaaagctcttgtgttgcagtctcagcggacagattttccttatgtgagcgccgcgatgccatgcttcgtgatcatcattattctctgtgttccttgttgtaagaaaaagactagcgctgccgagggtcccgaactggttagcctgcaggtactggatcaacatcctgtggggaccggagaccacagggatgctgcccaactaggcttccagcccctgatgtctgctacagggtctactgggtcaacagaggggacctag

SEQ ID NO: 124274 - DNA, 126 bp, synthetic construct
  misc_feature 1..126: note = Description of Artificial Sequence: Synthetic coding sequence
  source 1..126: mol_type = other DNA
atgggcctgggacgagtgctcctattcctggccgtagcttttccttttgcccctcctgcagccgcggccgttgaaatggggttccatcgcgttagtcaagatggcctcgacctgctgacatcgtag

SEQ ID NO: 124275 - DNA, 126 bp, synthetic construct
  misc_feature 1..126: note = Description of Artificial Sequence: Synthetic coding sequence
  source 1..126: mol_type = other DNA
atgggcctagggcgagtgctgcttttcctggctgtagctttcccctttgccccgcctgcagcagccgctgtggagatgggctttcacagggtgtcacaggatgggctggatctgttgacgtcctag

SEQ ID NO: 124276 - DNA, 1056 bp, synthetic construct
  misc_feature 1..1056: note = Description of Artificial Sequence: Synthetic coding sequence
  source 1..1056: mol_type = other DNA
atggtgctcagccaggacggtagcgtgcagtcagggttcctggccgaaggacacctagatggacagcccttcctcagatatgaccgacagaagcgacgcgcaaagccacaaggccagtgggcggaggacgtgctgggagcggagacatgggataccgaaacagaagatctaaccgagaatgggcaggatctgcggcgtaccttaacacacataaaggaccagaagggaggcctgcattcgctgcaggaaatccgtgtctgtgagatacatgaagacagctctactcgaggaagtcgacatttctactacaacggggagctgtttctctctcagaatcttgagacacaagaatccaccgtgcctcagagtagtcgggcccagactctggcaatgaatgtgactaatttttggaaggaggacgcaatgaaaaccaagacgcactacagggctatgcaggccgactgcctccagaagctccagcggtatctcaaatccggagtggcaatacgacggaccgtgccacctatggtcaacgttacatgcagcgaagtctccgagggcaatatcactgtgacgtgccgggcctcttcattctaccctcggaacattaccctgacttggcggcaggacggcgtgagcctaagtcataatacacagcagtggggggacgtgctcccagatgggaacggcacttatcagacttgggtggcgacgagaattcgccaaggagaagagcagcgcttcacctgctacatggaacatagtggaaatcacggcacacatccagtgccgtctgggaaggcactggtgctgcagtcacaacggaccgattttccttatgtgtccgcggcaatgccatgcttcgtgattatcattatcctgtgcgttccatgttgcaagaaaaagacgtctgctgcagagggacctgaactggtctcgttgcaagtgttggatcaacatcctgtggggacgggggatcacagagatgcagcacaactggggttccagccactcatgtcagccaccggcagcacaggcagcactgagggcgcttag

SEQ ID NO: 124277 - DNA, 2088 bp, synthetic construct
  misc_feature 1..2088: note = Description of Artificial Sequence: Synthetic coding sequence
  source 1..2088: mol_type = other DNA
atgagcccaccgaaggaccccagcccctcacttcctctcccaagctctagctctcattccagcagtccccccagcagctcgagcactagcgtaagcggcaacgcgcctgatggttcatctccaccacaaatgaccgcttccgaaccgctgagccaggtgtcaagaggccacccctctcctcccacacccaacttccgccgtagagctgttgcccagggcgcaccccgagagattccactctacttaccacatcatcctaaacccgaatgggccgagtactgcctagtgtccccaggggaggacggattgtcagacccagccgagatgactagtgatgagtgccagcccgcagaggcacccctcggggacatcggctctaaccatagggatccgcatcccatctggggcaaggataggtcgtggaccggtcaggagctgtcccccctcgcaggcgaggaccgcgaaaaaggtagcaccggcgccaggaaagaggaggaaggcggtcccgtactggtcaaggagaaactgggtctgaaaaaactggtgctaacacaggagcaaaaaacgatgcttctcgactggaacgactctattcctgagagtgtgcacctaaaagccggtgagaggattagtcagaagtccgcagagaacgggcgagggggccgcgtcctgaagcctgtcaggccactcctgctgccgcgcgccgctggggaaccactcccaactcagaggggtgcccaagaaaagatgggcacccctgcagaacaagctcagggggaaagaaatgttcccccccctaagagccccctgcgtctcatcgccaatgccattcgccgctcactcgagccactactttctaatagtgagggtgggaaaaaggcgtgggccaagcaggagtccaagactctccctgctcaggcttgcacccgttcttttagcttgaggaaaacaaatagcaacaaggacggggaccaacactccccaggtcgcaaccagtcttctgcttttagtccccccgatccagctctcaggacccactctctgccaaatcggccttctaaagtgtttcctgccttacggtcccctccttgttctaagattgaagacgtgccaaccctcctagagaaagtcagcctgcaagagaatttccctgatgcatccaagccccccaagaagagaatttctctattctcgtcgctgagactgaaagacaagtcttttgagtcctttctacaggaatcccgccagcggaaggacatcagggaccttttcggttcccccaaaaggaaagtgctgccagaagattccgcacaggctctcgaaaagctgcttcagccattcaaaagtacttccttgaggcaggccgcgcctcccccgcccccaccgccccctccccctccccccccccccacagccggcggagcagatagcaagaattttccactccgggcgcaagtcacagaggcaagctctagcgctagctccactagtagctcctcggcagacgaggaatttgaccctcaactttccctacagttgaaagagaaaaagacgctccgtcgacgcaagaagctggagaaagccatgaaacagctcgtgaaacaagaggagcttaagaggttgtacaaggcccaggctattcagagacaactcgaagaagtagaggagagacagcgcgcctcagaaattcagggcgtacgcctggagaaagccttaagaggcgaagcagactctggaacccaggatgaggcgcaacttctgcaagagtggtttaagctggtgctggagaaaaacaagcttatgaggtatgagagtgaactgctgatcatggcccaagaactcgagctggaagaccatcagtccagattagagcagaaactacgagagaagatgctgaaggaagaatcacagaaggatgaaaaggatcttaacgaggaacaggaagtctttaccgagcttatgcaagtcatcgagcagcgggacaaattggtcgactctcttgaagaacagcgcataagggagaaagctgaggaccagcatttcgaatcattcgttttttcacgcggctgtcaactctcgcgcacttag

SEQ ID NO: 124278 - DNA, 90 bp, synthetic construct
  misc_feature 1..90: note = Description of Artificial Sequence: Synthetic coding sequence
  source 1..90: mol_type = other DNA
atgagccctcctaaggatccctctccgtccctgccgctccccagttcctcatctcactctagctcccccccatcaagcagctcgacttag

SEQ ID NO: 124279 - DNA, 522 bp, synthetic construct
  misc_feature 1..522: note = Description of Artificial Sequence: Synthetic coding sequence
  source 1..522: mol_type = other DNA
atgagcctgttggggcctaaggtgctgctgttcttggccgcgttcattattacaagcgactggatccccctgggtgtgaacagtcagcggggcgatgacgtcacgcaagccactcctgaaactttcaccgaagaccccaacctcgttaatgatcccgccactgacgaaacagtgttggccgtacttgccgatatcgccccatcaacagacgacctggcaagcttgtctgaaaagaataccacggcagaatgttgggatgagaagttcacttgcacgcggttatacagcgttcaccgaccagttaagcagtgcatccaccagctgtgcttcacgtcactacgtcggatgtacatcgttaacaaggagatttgctctaggttggtgtgtaaagagcatgaggcaatgaaagacgaactctgcaggcagatggccgggctcccccctagaaggctacgacgctcaaactactttcgactccctccttgcgaaaatgttgatctgcaacgaccgaacggtctgtag

SEQ ID NO: 124280 - DNA, 492 bp, synthetic construct
  misc_feature 1..492: note = Description of Artificial Sequence: Synthetic coding sequence
  source 1..492: mol_type = other DNA
atgtctctgcttggccccaaagtgctgctgttcctggcagcctttatcataacctccgattggatcccgctcggggtcaactcccagagaggcgacgacgtaacccaagcgaccccagaaacattcaccgaagatcccaacttggtgaatgaccccgcaacagatgaaaccgtgctggccgtgctcgcagatattgcaccatctactgatgacttagaatgctgggatgagaagtttacttgtacccgattatacagcgtgcaccgcccagttaaacaatgcatccaccagctgtgtttcaccagcctaaggaggatgtatatcgtgaataaggaaatctgtagccgtttggtgtgcaaggaacacgaggccatgaaggatgagctatgtcgccaaatggccggcctaccccccagaagactgcgccggagtaattactttagactgcctccctgcgaaaacgtggaccttcagcgacctaatggactgtag

SEQ ID NO: 124281 - DNA, 447 bp, synthetic construct
  misc_feature 1..447: note = Description of Artificial Sequence: Synthetic coding sequence
  source 1..447: mol_type = other DNA
atgagtcttctgggccccaaggtgctcttgtttctcgcagcttttattattacctccgactggatcccattgggggtgaatagccagaggggggacgacgtaacacaggcaacacccgaaacattcactgaagatccaaatctggtgaatgaccctgccacagacgagacagaatgctgggacgaaaagttcacctgtaccaggctttactctgtccacagacctgtgaaacagtgcatccatcagctgtgttttacgagcctgcgacgtatgtacatcgtcaacaaggagatctgctcaagactggtgtgcaaagagcatgaggccatgaaggacgagctgtgcaggcagatggcgggccttcctcctagaagactgagacgatccaactatttcagattgcccccatgcgagaatgtcgatttgcaacgtccaaacggactgtag

SEQ ID NO: 124282 - DNA, 492 bp, synthetic construct
  misc_feature 1..492: note = Description of Artificial Sequence: Synthetic coding sequence
  source 1..492: mol_type = other DNA
atgagcctgctaggaccaaaagtgctgctgttcctcgccgcctttatcataacatcggactggatcccactgggagtgaactcccagaggggcgacgacgtcactcaggcgactcccgagactttcactgaagatcctaatcttgtcaacgaccctgccactgatgagaccgtattggctgtccttgcagacatcgctccaagtaccgacgatttggagtgttgggacgagaaattcacatgcactcgactttactctgttcatagacccgtcaagcagtgtattcatcaactgtgctttacctctcttagacgcatgtacatcgtcaacaaggagatctgttcaagactggtctgcaaggagcacgaggccatgaaagatgaactttgccgccaaatggccggtctgccacccagacgcttacgcagatctaattacttcaggctacctccttgtgagaatgtggatcttcaaaggccaaatggactgtag

SEQ ID NO: 124283 - DNA, 276 bp, synthetic construct
  misc_feature 1..276: note = Description of Artificial Sequence: Synthetic coding sequence
  source 1..276: mol_type = other DNA
atgtctctgctgggaccgaaggtcttactcttcctcgccgcctttatcatcacatccgattggatacctctcggtgtgaactcccagcggggcgacgatgtaacccaggcaacacctgagacattcactgaagaccccaatctggtgaacgatccggcaacggatgaaacagttctcgcagtcttggctgatattgcccccagcaccgatgatttggcctcactttcagaaaagaacacgaccgcggagtgttgggatgagaagttcacatgctag

SEQ ID NO: 124284 - DNA, 1320 bp, synthetic construct
  misc_feature 1..1320: note = Description of Artificial Sequence: Synthetic coding sequence
  source 1..1320: mol_type = other DNA
atgtctgtaccgtccgctctcatgaagcaacctcctattcagagcacagcaggtgccgttccggttagaaatgagaagggagagatttctatggagaaggtgaaagttaagcgctacgtgagtgggaaaaggcccgactacgcccccatggagagcagcgatgaagaagacgaggagtttcagttcatcaagaaggctaaagagcaggaggccgaacccgaggaacaagaagaggattcttcatccgatccgcggctgcgtaggctccagaatcgtatttctgaggacgtggaggaaaggctggcccggcatcgcaagatcgtcgaaccagaagtggtgggcgaatccgacagcgaggtcgaaggggacgcgtggcggatggagcgtgaagattcgtctgaggaagaggaagaagaaattgatgatgaggagatagagcgtcgcaggggtatgatgcgccagagagctcaggaacgcaagaatgaggagatggaagtgatggaggtggaagatgaagggagatccggcgaagagtctgaatctgagagcgagtacgaggagtataccgacagcgaggacgagatggaacctaggctcaaacccgtgtttatccggaagaaggatcgggtcacggtgcaagaacgggaggctgaggcactgaaacaaaaagagcttgagcaagaagctaaaaggatggccgaagaacgcagaaaatacaccctcaagatcgtggaagaagagaccaaaaaagagctggaagagaataaacgttctcttgctgcactggatgcccttaacacagatgatgaaaatgacgaggaggagtatgaggcctggaaggtgagggagttgaagaggatcaaaagggaccgggaggaccgggaagctctagaaaaggagaaggcagaaattgagagaatgagaaacctcacagaggaagagcggagggcagagcttcgggcgaatggcaaagtaatcactaataaggccgtcaagggcaaatacaagtttcttcagaaatactaccaccgtggcgcctttttcatggacgaagatgaggaggtatacaagcgggacttcagcgcacccacactggaggaccacttcaacaagaccatactgcccaaagtaatgcaggtgaagaactttggaagaagcgggagaaccaaatacacccacttggtggatcaggacacgacctcttttgactccgcgtggggccaggaaagtgcacagaacacaaagttcttcaagcaaaaggcagccggggttagagatgtgtttgaaaggcctagtgcgaagaagcgaaagaccacttag

SEQ ID NO: 124285 - DNA, 549 bp, synthetic construct
  misc_feature 1..549: note = Description of Artificial Sequence: Synthetic coding sequence
  source 1..549: mol_type = other DNA
atgagggcggcgtatctgttcttgctttttctgccaggcttactggcccagggccagtacgatctggaccccctccccccatttcctgatcatgttcaatatacccattacagcgaccagattgacaatcctgattactacgactaccaagaggtgacccctaggcctagtgaggaacaattccagttccagtctcaacagcaggtgcagcaggaggtgattccggctccgacacccgagcccggcaatgctgagctagaaccaacggagcccgggcctctcgattgccgagaggagcagtacccatgcactcgcctttacagcattcaccgtccatgcaaacagtgtctgaatgaggtgtgtttttattccctgcgtagggtgtacgttataaataaagaaatctgcgtcaggactgtctgtgcccacgaggagctccttcgggcagatctctgtagggacaagtttagcaaatgtggggtcatggcctccagcggcttatgtcagagcgtcgcagcttcctgcgcacggtcttgcggctcttgctag

SEQ ID NO: 124286 - DNA, 552 bp, synthetic construct
  misc_feature 1..552: note = Description of Artificial Sequence: Synthetic coding sequence
  source 1..552: mol_type = other DNA
atgcgcgccgcctatctatttctattattcttacccgcgggacttctggctcagggacaatacgatttagacccactcccaccgttcccagaccacgtccagtatacacattattccgaccaaatcgacaatcccgactactatgactaccaggaagtgacaccccggccatcggaggagcagttccagtttcagtcgcagcaacaggttcagcaggaggtgatccctgcccctacccccgaaccgggcaatgcggagctggagccaacggaacccgggcctctggattgtcgcgaggagcagtacccctgcaccagactgtattcaatccatcgcccatgcaagcagtgtctgaatgaggtgtgcttctattccctccgtcgcgtttatgtcatcaataaagagatttgtgtcaggactgtctgcgcccacgaagagttactgcgagccgatttgtgcagggacaagttctcaaaatgcggggtcatggcctcatcaggactctgccagtcagtggctgcttcttgtgcgcgctcctgtgggagttgctag

SEQ ID NO: 124287 - DNA, 549 bp, synthetic construct
  misc_feature 1..549: note = Description of Artificial Sequence: Synthetic coding sequence
  source 1..549: mol_type = other DNA
atgagggcagcctacttgtttctgctgtttctgccaggcctactggcccagggccagtacgacttggatccactgcctccctttcccgaccatgtgcagtacacccactactccgaccagatcgacaacccagattattacgattaccaggaagtgacccctcggccttctgaggagcagttccaattccagtctcagcaacaagtgcagcaggaggtaatcccggcccccacaccggagcccggtaacgccgagctggaacctacggaaccaggacctctggactgtcgggaagagcagtatccctgcacacgactttacagcatccatagaccatgcaaacagtgcttgaatgaagtctgtttctactccctgcgcagggtctacgttattaacaaggaaatctgcgtccgaactgtctgcgcccatgaggagctgctgcgggcggatctgtgccgcgataagttttcaaaatgcggcgtgatggcttcctcaggcctatgtcagtcagtggctgcatcgtgtgcaaggtcctgcggctcttgttag

SEQ ID NO: 124288 - DNA, 1089 bp, synthetic construct
  misc_feature 1..1089: note = Description of Artificial Sequence: Synthetic coding sequence
  source 1..1089: mol_type = other DNA
atgaagctacactgctgccttttcacactggtggcctccatcatcgtaccagcagccttcgtcctggaggatgtcgactttgaccaaatggttagtctcgaagccaaccgaagttcgtataatgcaagctttccatcaagcttcgagttgtccgcttcctcacactccgacgacgacgtgattatcgccaaagaaggtacgtccgtctcgatcgaatgcctactcacggcaagccactacgaggacgtccattggcacaactccaagggccagcaattggacgggcggtctaggggaggaaaatggctggtgtctgacaattttttaaatattactaacgtggcctttgacgaccgtggactgtatacctgttttgtaacttcccctattagggcctcctactcagtcactttacgagtgattttcaccagcggtgacatgagtgtctattacatgattgtgtgtctgatagccttcacaatcaccctgatcctgaacgtgaccagactgtgtatgatgagctcacatcttagaaaaactgaaaaggcgattaacgagtttttccgtacggagggagctgaaaagttacagaaggcgttcgagatcgcgaagcggatacctatcatcaccagtgccaagactctggagttggctaaggtgacacagttcaagacgatggaattcgcccgatatattgaagagctcgcccgcagtgtgcctctcccccctctgatcctcaattgtcgagccttcgtcgaggagatgttcgaggcagtccgggtcgacgacccagacgacctgggggagcgtataaaagagagaccagccctgaacgcacagggggggatatatgtaatcaatccggagatggggaggtccaactcccccggcggagattccgacgacggcagcttgaatgaacagggccaggaaattgccgtacaggtcagcgtccatctccagtcagagacaaaatcgatagatacagaaagccaagggagttcccacttttccccccctgatgatattggctctgcagagtccaattgtaattacaaggacggcgcctacgaaaattgccagctatag

SEQ ID NO: 124289 - DNA, 1089 bp, synthetic construct
  misc_feature 1..1089: note = Description of Artificial Sequence: Synthetic coding sequence
  source 1..1089: mol_type = other DNA
atgaagctccattgttgtctgttcaccctggtggccagcattatcgttcctgcagcgttcgtgttagaggatgtcgattttgaccaaatggtgtcgctcgaagccaataggtcctcatataatgcttccttcccctcatctttcgagcttagcgcatcatctcacagcgacgacgatgtgattatcgctaaagaggggacgagtgtttccatcgagtgcttgcttaccgcctctcattatgaggatgtacattggcacaatagcaagggacagcaactcgacggtcggtctcgaggcggaaagtggctcgttagcgacaatttcctcaatattaccaacgtggccttcgatgatcgggggctgtacacatgtttcgtgacctcccccatccgagcctcctattcggttaccctgagggtgatctttacaagcggtgacatgagcgtctactatatgattgtgtgtctgattgcctttaccattactcttatccttaacgtgacaaggctgtgcatgatgtcttcccacctgagaaagaccgagaaggcgattaacgagttcttcaggactgagggcgctgagaagctacagaaggcattcgaaatcgcaaaaaggattccaattatcacatcagccaagacacttgagctggctaaagtaacccaatttaagacaatggaattcgcacggtatattgaggaattggcccgcagcgttcctttacccccgctcatattaaactgtagggccttcgtcgaagaaatgtttgaggcggtcagggtcgacgacccagatgacctcggagaaaggataaaggagagacctgccctaaacgcacagggcggcatttacgtcattaatccagaaatgggccgcagcaactcccctggcggggattctgatgacggctctctgaacgagcaaggccaagaaatcgccgtccaggtgtccgtgcatcttcaaagtgagaccaagtcaatcgacactgagagccagggttcttcacacttcagtccacctgacgacataggtagcgcagagtcgaactgtaactataaagacggcgcctacgaaaactgccagctgtag

SEQ ID NO: 124290 - DNA, 651 bp, synthetic construct
  misc_feature 1..651: note = Description of Artificial Sequence: Synthetic coding sequence
  source 1..651: mol_type = other DNA
atgtccgtgtattatatgatcgtgtgccttattgcattcacaatcaccttaattttgaacgtgactcgcctctgtatgatgtcttctcatctgagaaagacagagaaggcaatcaatgagttctttcggacagaaggggctgagaagttgcagaaggcttttgaaatcgccaagcgaatcccaatcattacaagcgcgaagaccttggagcttgctaaagtgacacagtttaagacaatggagttcgccagatatattgaagagcttgccaggtctgtgcccctacctccgctgattctgaattgccgggcttttgtcgaggagatgtttgaagccgtgagggtggacgacccagacgatctcggcgaacggataaaagagcgccccgcccttaacgctcaggggggcatctacgtgattaatcctgaaatgggcagatccaatagtccaggcggcgattcggacgacggaagtttaaatgaacagggccaagaaatcgctgtgcaggtctctgtgcacctgcagtctgagaccaagagtattgacacggagtctcaagggtcaagccacttcagcccacccgatgacatcgggagcgcagaaagcaactgcaattataaggacggagcctacgagaactgtcagctgtag

SEQ ID NO: 124291 - DNA, 54 bp, synthetic construct
  misc_feature 1..54: note = Description of Artificial Sequence: Synthetic coding sequence
  source 1..54: mol_type = other DNA
atgaaactgcactgttgcctttttactctcgttgcaagcatcattgtgccctag

SEQ ID NO: 124292 - DNA, 330 bp, synthetic construct
  misc_feature 1..330: note = Description of Artificial Sequence: Synthetic coding sequence
  source 1..330: mol_type = other DNA
atgaagctgcattgttgtcttttcacgctcgttgcctcgatcatagtaccagcagcctttgtcctcgaggacgttgactttgaccagatggtctctctggaggcgaacagatcatcgtacaacgcctccttccctagttcttttgagcttagcgcttcttcccactccgatgatgatgttatcatagccaaggaaggcacatccgtgtctatagaatgtttactgaccgcgtctcactatgaggatgttcactggcacaacagcaagggccagcagctggatggaaggtcccgcggtggcaagtggctggtcagcgataactttctgtag

SEQ ID NO: 124293 - DNA, 372 bp, synthetic construct
  misc_feature 1..372: note = Description of Artificial Sequence: Synthetic coding sequence
  source 1..372: mol_type = other DNA
atgaagctgcactgctgtctatttaccctggtggctagcataatcgtgcccgctgctttcgtattagaagatgtggattttgatcaaatggtctcactggaggcgaataggagttcttacaatgcttcctttccatctagtttcgagctgtccgcaagttcacattctgatgatgacgttattattgccaaagaggggaccagcgtctctattgagtgcctgctcactgctagccattacgaggacgttcattggcacaacagcaagggtcagcagctagatggacggtctagaggtggcaagtggctggttagcgacaattttctaaacattacaaacgtcgccttcgatgacagaggcctctatacatag

SEQ ID NO: 124294 - DNA, 768 bp, synthetic construct
  misc_feature 1..768: note = Description of Artificial Sequence: Synthetic coding sequence
  source 1..768: mol_type = other DNA
atgaaggcgctgttagctctgcctctactgctcctgctgagtactcctccatgtgctcctcaggtcagcggcataaggggcgacgccctcgaacgcttttgcctccaacagcccctcgattgcgacgatatctacgcccaagggtatcagtccgatggtgtatacctgatctacccgtctggaccgtccgtccccgttcctgttttctgtgacatgaccacagaaggaggaaagtggacagtgtttcagaaaagattcaacggaagcgtcagcttttttagaggctggaatgactacaagctgggcttcggacgagccgatggcgaatactggcttgggctgcagaatatgcaccttcttacacttaagcagaagtacgagctgcgcgtggacttggaagatttcgagaataacaccgcatatgctaaatacgctgacttctcaatttcaccaaatgcagtttcagctgaagaagacgggtatacgctattcgtggcaggctttgaggacggcggcgctggggactccctcagttaccattcaggccagaagttctcgaccttcgatagagatcaagatttgtttgtccagaattgtgcagccctcagcagcggcgcgttctggttcaggagctgtcattttgcaaacctgaatggcttctacctgggcggcagccatttatcctatgccaacggcatcaactgggcccaatggaaaggcttttattatagcctcaagcgcactgagatgaagatacggagagcatag

SEQ ID NO: 124295 - DNA, 840 bp, synthetic construct
  misc_feature 1..840: note = Description of Artificial Sequence: Synthetic coding sequence
  source 1..840: mol_type = other DNA
atgggagagctctcccctctccagaggcctctggccactgaaggaaccatgaaagctcagggagtgctactcaagctggcactacttgccttacccttactcctgctcctttcaacacctccgtgtgccccccaagttagcggcatccgcggggacgcccttgaacggttttgcttacagcagcccctggactgcgatgatatttacgctcaggggtaccagtcagacggggtgtacttgatttatccctcagggccctccgtgcctgtgcccgtattctgtgacatgaccactgaaggtgggaagtggaccgtgtttcaaaaacgttttaatggctctgtgagcttctttaggggatggaatgactataaactaggttttgggagagccgatggcgagtattggctgggactgcagaatatgcatttactgaccttaaaacagaaatatgagctcagagtggacctggaggatttcgagaataataccgcctacgccaaatacgcagacttctctatatctcccaacgccgtgagtgctgaggaagacggttatacgctattcgtggcaggatttgaggatggcggtgccggcgatagcctttcataccactccgggcagaaattttctacattcgatagggaccaggacctgttcgtgcagaactgtgcagcacttagctctggggcattttggttccgttcctgtcattttgcaaatctaaacggattctacctggggggctctcacctgtcctatgcaaacggaataaattgggcccaatggaaagggttttactactccctaaagagaactgaaatgaaaatcaggagggcgtag

SEQ ID NO: 124296 - DNA, 468 bp, synthetic construct
  misc_feature 1..468: note = Description of Artificial Sequence: Synthetic coding sequence
  source 1..468: mol_type = other DNA
atggtagacctcactcaggtcatggatgatgaggtatttatggcttttgccagttatgccacaattattttgtctaagatgatgctcatgagtaccgccaccgcattttatcggctgactcgtaaagtgtttgccaaccccgaggactgcgtggctttcggaaagggcgagaacgcaaagaaatacttgaggaccgacgacagagtggaacgggtcaggcgagcacacctgaatgacttagagaatataataccgtttctgggtatagggttgctgtactccttgagcggccccgacccgtcgacagcaatcctgcactttcggctgttcgtgggggctcgcatctaccatacaatcgcgtacctcaccccgctgccgcagccaaatcgggctctttccttttttgtaggttatggcgttactctgtcaatggcctataggctactgaaaagtaaactgtatctatag

SEQ ID NO: 124297 - DNA, 468 bp, synthetic construct
  misc_feature 1..468: note = Description of Artificial Sequence: Synthetic coding sequence
  source 1..468: mol_type = other DNA
atggtcgatcttacccaggtgatggacgatgaagtttttatggccttcgcaagttatgccacgatcattctgtctaagatgatgttaatgagcaccgcaaccgcattttacaggttgacacgcaaggtttttgccaatcccgaagattgtgtggcatttggaaaaggcgagaacgcaaaaaaataccttagaactgacgatcgagtggagagggtccgacgggcccatctgaacgacttggagaatatcatacctttcctgggcatcgggttgctgtattctctgagtggaccagatcccagtacggccattctccacttcagattgttcgttggcgctcgaatttatcacacgatcgcatacctcacgcccctaccccagcccaatagagcccttagcttctttgtcgggtatggggtaacacttagtatggcctacaggctcctcaagtcgaagttatacctatag

SEQ ID NO: 124298 - DNA, 468 bp, synthetic construct
  misc_feature 1..468: note = Description of Artificial Sequence: Synthetic coding sequence
  source 1..468: mol_type = other DNA
atggtggacctgactcaggtgatggacgacgaagtttttatggctttcgctagctacgcaactattatcctctccaaaatgatgttgatgagtaccgcaactgctttctaccggctcacacggaaggtctttgctaatcctgaagactgcgtggcctttggaaagggggagaacgccaagaagtacctgagaaccgatgatcgagtggagcgggtgagaagagcacatcttaatgatctcgaaaacattatcccctttctgggaatcgggttgctgtactcactttctggcccagatccgagtacagccatactccactttcgcctgtttgttggcgcgagaatctaccatactattgcctacctgacgcccctcccccagccaaaccgagcactcagtttcttcgtaggttatggcgtcacactcagtatggcctatagactgttgaagagcaagctgtatctttag

SEQ ID NO: 124299 - DNA, 468 bp, synthetic construct
  misc_feature 1..468: note = Description of Artificial Sequence: Synthetic coding sequence
  source 1..468: mol_type = other DNA
atggtggacctgactcaagttatggatgacgaggtcttcatggccttcgcctcatacgccaccattatcctgtcaaaaatgatgctgatgagcactgctacggcattctatcggttgactagaaaggtgttcgctaatcccgaggactgtgtagcattcggaaagggtgagaatgccaagaaatacctgcgaacagatgatagagttgagagggtcaggagagcccacctcaacgatttagaaaacatcattccctttctgggcatcgggctcctatatagcttgagcggaccagacccaagtacggctatactgcacttccgcctcttcgtcggcgcaaggatctaccacacaattgcctacttaacccctttaccccaaccaaatcgagcactcagctttttcgtgggctacggcgttaccctctcgatggcttaccgccttctgaagagcaaactgtatctatag

SEQ ID NO: 124300 - DNA, 234 bp, synthetic construct
  misc_feature 1..234: note = Description of Artificial Sequence: Synthetic coding sequence
  source 1..234: mol_type = other DNA
atggtggatctgacgcaggtgatggacgatgaggtgttcatggccttcgctagttatgccaccatcatcttgtcgaaaatgatgctgatgagcactgccacagctttctaccggctgacccgcaaggtgttcgcgaatcccgaagattgtgtcgcattcgggaagggcgaaaatgccaagaagtatttgcgaacggacgacagggtcgaaagggtgagaagagctcacctctag

SEQ ID NO: 124301 - DNA, 129 bp, synthetic construct
  misc_feature 1..129: note = Description of Artificial Sequence: Synthetic coding sequence
  source 1..129: mol_type = other DNA
atggtcgatctgacacaggtcatggatgacgaggtgttcatggcttttgccagttacgccactattattctgtctaaaatgatgctgatgtccacagcaacagcattttatcggctgacgcgaaagtag

SEQ ID NO: 124302 - DNA, 243 bp, synthetic construct
  misc_feature 1..243: note = Description of Artificial Sequence: Synthetic coding sequence
  source 1..243: mol_type = other DNA
atggtggacttaacacaggtcatggacgacgaagtcttcatggcctttgcttcctacgccactatcattctctcaaaaatgatgctcatgagcacggccacggcgttttacagactcaccagaaaggtgttcgctaaccccgaggattgtgtcgcgtttggaaaaggggaaaacgcaaaaaaatacttgagaaccgacgatcgcgtcgagcgtgtccgccgagcccacctgaatgatttatag

SEQ ID NO: 124303 - DNA, 264 bp, synthetic construct
  misc_feature 1..264: note = Description of Artificial Sequence: Synthetic coding sequence
  source 1..264: mol_type = other DNA
atggttgacctgacccaagtcatggatgatgaggtgttcatggctttcgcttcttatgccactattatcctctccaaaatgatgctgatgtcaaccgcaaccgcattttatagactcacgagaaaggtgttcgcaaatccagaagattgcgtagccttcgggaaaggggagaatgcaaagaaatatctgaggaccgatgatcgagttgagcgagtaaggcggataaaacagactctctccatttacctggcttcaagcatctag

SEQ ID NO: 124304 - DNA, 444 bp, synthetic construct
  misc_feature 1..444: note = Description of Artificial Sequence: Synthetic coding sequence
  source 1..444: mol_type = other DNA
atggcagggaactctattctgctagctgcagtctcgatcctaagtgcctgccagcagagctattttgcactccaggttgggaaagccaggctcaaatacaaagtcacaccgccagccgttactggtagccctgagttcgagagggtgttcagggctcaacagaattgcgtggagttttaccctatattcatcattaccctgtggatggctggatggtattttaaccaggtcttcgcaacatgccttgggcttgtatacatttatggtcggcacttgtatttttgggggtacagcgaagcagcaaaaaagcgaatcacaggatttagattgagtctgggaattcttgctttactgaccctactgggcgcactgggcatagccaactcctttttggacgagtacctagatctcaatattgccaaaaaactcagacggcagttctag

SEQ ID NO: 124305 - DNA, 444 bp, synthetic construct
  misc_feature 1..444: note = Description of Artificial Sequence: Synthetic coding sequence
  source 1..444: mol_type = other DNA
atggctgggaatagtatcctcctggcagcggtatctattctgtcagcctgtcagcaatcttactttgcccttcaggtcgggaaggctaggcttaagtataaagtgactcctccagctgtcaccggtagccctgagtttgagcgagttttcagggctcagcagaactgtgtcgaattctaccctatctttattattaccctgtggatggccggatggtacttcaatcaggttttcgcgacctgcctcggcttggtatatatttacggacgacacctgtatttttggggatatagcgaggctgcaaagaagcggatcactggatttaggctgtcactgggaatcttagccctgctgaccctgctcggagccctaggcattgccaattcatttcttgatgagtacctggatcttaatatcgcaaaaaagctgcgccggcaattctag

SEQ ID NO: 124306 - DNA, 234 bp, synthetic construct
  misc_feature 1..234: note = Description of Artificial Sequence: Synthetic coding sequence
  source 1..234: mol_type = other DNA
atggcaggaaattcgatccttttggccgccgtgagcatactaagcgcgtgccaacagtcctactttgccctccaggtcgggaaagctcggttaaagtacaaggtgacccctcctgccgtgaccggaagtccagaattcgaaagggtatttcgagcacacttctgttacctcagtggcagtggcgtccacatctggcccagtcctattctgctaggaattttcaggtcttgctag

SEQ ID NO: 124307 - DNA, 501 bp, synthetic construct
  misc_feature 1..501: note = Description of Artificial Sequence: Synthetic coding sequence
  source 1..501: mol_type = other DNA
atgccttggcgtggcaggcgcttcaggctctgtaggcggaaaatggctgtgctttcgaaggaatacggctttgtactcctgacaggcgccgcctcttttatcatggtggcccacttggcaattaatgtgtcaaaggcacggaaaaaatacaaggtggagtatcccatcatgtatagtactgatccagaaaatggacacatattcaactgcatccagagggcacaccagaacaccctggaggtgtaccccccatttcttttttttttagctgtgggtggcgtgtatcacccaaggatagcttcagggttagggctggcgtggatagtaggccgcgtactttatgcatatggctattacactggggaacctagtaaacgaagtaggggggcactcgggtctatcgctttgctcgggcttgttggcacaaccgtgtgcagtgcgttccagcatctcgggtgggtcaagagtggcctggggtctgggcccaaatgctgccactag

SEQ ID NO: 124308 - DNA, 459 bp, synthetic construct
  misc_feature 1..459: note = Description of Artificial Sequence: Synthetic coding sequence
  source 1..459: mol_type = other DNA
atggccgtgctgagcaaggaatacggatttgttctactcaccggggcagcgagctttattatggtggcacacttggcaatcaatgtctccaaagcacgaaagaagtataaggttgagtaccctattatgtactcaaccgatccagaaaacgggcacatttttaattgtatccagcgggctcatcagaataccctggaagtgtatccgccctttctgtttttcctggccgttggcggcgtgtatcacccgcggatcgccagcggattaggactggcctggattgtcggacgcgtgctttacgcctacggttactacactggcgaaccatctaagcgcagccgcggcgcactcggctccattgctctgctcgggttggtggggaccactgtatgttctgcattccaacatttaggctgggtgaagtcgggcctggggtccggccctaaatgttgccattag

SEQ ID NO: 124309 - DNA, 501 bp, synthetic construct
  misc_feature 1..501: note = Description of Artificial Sequence: Synthetic coding sequence
  source 1..501: mol_type = other DNA
atgccttggcgaggccgccggtttagactatgccggagaaaaatggcggttctcagcaaagagtatggcttcgtgcttttgacaggcgctgcctctttcatcatggtagctcatctcgcaatcaatgtctctaaagccagaaaaaagtacaaggtagaatatcctatcatgtacagcacagatcctgaaaatgggcatatttttaattgcattcagcgtgcccatcaaaatacattggaggtctatcctcccttcttgttttttcttgccgtgggtggagtgtaccatccccgcatcgcatcgggtttaggtctcgcgtggatcgtaggaagagtcttgtatgcttatggttactatacgggagaaccttccaagcgatctcggggcgctctgggcagtattgccctcttgggcttagtgggcactacagtgtgctctgctttccagcacttaggctgggtgaagagcggattaggatccggtcctaaatgttgtcactag

SEQ ID NO: 124310 - DNA, 501 bp, synthetic construct
  misc_feature 1..501: note = Description of Artificial Sequence: Synthetic coding sequence
  source 1..501: mol_type = other DNA
atgccatggcgcggccggcggttccgactgtgccgacgaaaaatggcggtcctgagcaaggaatatgggtttgtccttttgaccggcgcagccagttttattatggttgcccacctcgccatcaatgtaagtaaagcacgaaagaaatataaggttgagtacccaataatgtactctaccgaccctgaaaatggtcacattttcaactgtattcagagagctcaccaaaataccctcgaggtgtacccgccctttctgtttttcctggctgtcggcggggtgtaccacccgagaatcgcttccgggctcggccttgcatggatcgtcggccgcgtgctatatgcatatggatattatactggggagcccagtaagcggtcgaggggagccctgggatcgattgcattactgggtctggtcggcactacggtgtgtagtgccttccaacaccttggttgggtgaaaagcggactcgggtccggtcctaaatgctgccattag

SEQ ID NO: 124311 - DNA, 459 bp, synthetic construct
  misc_feature 1..459: note = Description of Artificial Sequence: Synthetic coding sequence
  source 1..459: mol_type = other DNA
atggccgtgctgtctaaggaatatgggtttgtacttttaactggggcagctagctttatcatggtcgcccacttggctattaatgtgagcaaggcaagaaagaaatataaggttgagtaccccattatgtattcgaccgaccccgagaatggacacattttcaactgcatacaacgggctcaccagaacaccttggaagtgtatccaccctttctgttctttcttgcagtggggggagtgtatcacccccgtattgcttcagggctgggcttggcctggattgtgggaagagtgctgtacgcttatgggtactatactggtgagcccagtaagaggagcagaggtgccctgggatcaattgctttactcgggctcgtgggcaccaccgtttgctctgcttttcagcacctgggttgggtcaaatcaggcctgggatctggccctaaatgctgtcactag

SEQ ID NO: 124312 - DNA, 501 bp, synthetic construct
  misc_feature 1..501: note = Description of Artificial Sequence: Synthetic coding sequence
  source 1..501: mol_type = other DNA
atgccgtggagaggccgccgctttagattatgcagacggaagatggctgtactcagcaaagagtatggcttcgtgctgttgactggtgccgctagcttcatcatggtagcccacttagctattaacgtttccaaggccaggaagaaatataaagtcgaatacccaatcatgtacagtactgatccagagaatgggcacatctttaactgcatccaacgggctcatcaaaataccttggaggtgtatccacctttcctgttcttccttgccgtggggggtgtgtatcacccccgcatcgcgagcggtcttggtttggcctggattgtggggagagtgctctatgcctacggctattataccggtgagccttccaaaagatcccgcggcgccctcgggtctattgctctgcttggcctggtgggcactactgtctgcagtgcatttcaacacctgggatgggtgaaatccggtcttggctccggccccaaatgttgtcactag

SEQ ID NO: 124313 - DNA, 972 bp, synthetic construct
  misc_feature 1..972: note = Description of Artificial Sequence: Synthetic coding sequence
  source 1..972: mol_type = other DNA
atgcctcggctgacctttgcgcccaaagggtggccccatccccccacctcccttcattggtggctctttcaagagctgccaactcccagtgaaaactccatgcctcctgggctatcgacgcctaccgctagtcaggaaggcgctggtccagtcccagatccttctcaaccaacgaggcgacaaatccggttatcctctcctgagcgacaaaggctgagctcccttaatctgacacccgacccggaaatggaaccccccccgaaacccccgagatcatgtagtgccctcgcacgccatgctctggaatctagtttcgtgggctggggtctaccagtccagtctccccaggcactagttgcaatggaaaaagaagagaaagagtcccccttcagttcagaagaggaagaagaagacgtgccccttgactctgatgtggagcaggccctccagaccttcgcaaaaaccagcggtaccatgaataattacccgacctggagacgtacacttctgcggagagccaaagaggaagagatgaaacgattttgcaaggcccagacaatccagcgccgcctgaacgaaatcgaagccgcattgagggagctagaggcggagggggtcaagctggagctggcccttaggcggcagagctcaagcccagagcagcaaaagaagctctgggtgggtcaattgctgcagctggtggacaaaaaaaacagcctcgtggctgaagaggcagaactaatgatcaccgtgcaggaactaaatctggaagaaaaacaatggcaacttgaccaggaactaaggggttacatgaatagagaagagaatcttaagaccgctgcggaccggcaagctgaggatcaagtgctacggaagcttgtcgatctcgtcaaccaacgggatgccctgatccgcttccaggaggaacgccgcctcagtgaactggcgctgggcactggggctcaaggatag

SEQ ID NO: 124314 - DNA, 2946 bp, synthetic construct
  misc_feature 1..2946: note = Description of Artificial Sequence: Synthetic coding sequence
  source 1..2946: mol_type = other DNA
atggcaagtccgaccagtaccaatccagcccatgcccacttcgagtcatttttgcaagcacaactatgtcaagatgtgctatccagcttccaggaattatgcggggcgctaggactggagccaggcggtgggttgccccagtaccataaaatcaaagatcagctgaactactggtctgccaagtcactgtggaccaaattggacaagcgggctggacaacctgtctatcagcagggccgggcgtgtacatccacaaagtgcctggtagtcggagctggaccctgcgggctccgtgttgctgtcgaattagccctgctcggtgcccgcgtcgtcttggtggaaaagcgaacaaagttcagcaggcataacgttctacatctgtggcctttcaccattcatgatctcagagccctgggcgccaagaagttttatgggagattttgtacaggcaccctggatcacatctccataaggcagcttcagctactgctgttgaaagtcgcgctactgctgggcgtggagatacattggggcgtgacatttactgggttgcaaccacctccaaggaaaggttccgggtggagagcgcagttgcagcccaatccccccgctcagctggcgaactatgagttcgacgtcctgataagcgcagccgggggcaagtttgtgcctgagggcttcaaagtgcgggagatgaggggtaaattggctattggcatcacagccaacttcgtgaacggcagaactgtagaggaaactcaagtgccggagatttctggagtggccagaatatacaaccagtctttctttcagagtctcctgaaggccacaggcatcgacttagaaaacatagtgtattacaaagatgacacccattatttcgtcatgactgcaaagaagcagtgcttacttaggctgggcgtcttgaggcagcccttctggcccctcggtactggcgtggcacgcgggttccttgcggctttcgacgcagcctggatggttaagcggtgggctgaaggcgcagagtcgctggaagtgcttgcggagagggagagcttgtaccagctgttgtctcaaacatcgcctgaaaacatgcaccggaatgttgcccagtacgggttggaccccgcaacccggtatcctaacttaaacctgagagcagtcacgcctaatcaggtccgcgacctgtacgatgttctggcgaaggaacccgtccagcgcaataatgataagacagatactggaatgcctgccaccggctcagccggcacacaggaggagctcctgcgatggtgccaggaacaaacagctggatatcctggggtgcacgtgagcgatttgagttctagttgggcagatggtttagctctctgtgccctggtttacaggttacagcccggtcttttggagccaagtgagctgcagggcctgggcgctttagaagcaactgcgtgggccttgaaggtggctgaaaacgagctgggcataacccccgtggtttcagcgcaggctgtcgtggctggctctgacccgctgggcctgattgcctatctgtctcacttccacagtgcctttaagtcgatggcccatagccctggacctgtgagccaagcttccccaggcacttcttcagcagttttgtttctgtccaagctgcagcgtaccctgcagcgatcaagagccaaggagaatgctgaggatgccggaggtaaaaagctgcggctggagatggaagccgaaacaccctcaacagaggtgccgcctgatccggagcctggcgttccactgacccctcctagtcagcaccaggaggcgggagctggggatttgtgcgctttgtgtggagagcacctgtatgtcctcgaaaggctctgcgttaatggtcacttttttcaccgttcatgcttccgctgccatacttgtgaggcgactctgtggccgggggggtacgagcagcatcccggcgatggacacttctactgtctccagcatcttcctcagaccgatcataaggctgaaggttccgatagaggcccagagagtcctgagttacctacacctagcgagaactctatgccacctggactttccacaccaaccgctagccaagagggggctgggcctgtcccagatcccagtcagccaaccaggagacagattagactgagctctcccgagagacagcgactttctagtctgaacctgacaccagatcccgaaatggagcctcctcctaaaccccctaggagctgttctgctttagcccgccatgccttggaatcttccttcgtcgggtggggtcttccagtccagtccccacaggccttggtcgccatggagaaggaagagaaggaaagtccctttagtagcgaagaggaagaggaggacgtacctcttgactctgatgttgaacaggccctccagacctttgcgaagacttccggaaccatgaataattatcccacgtggcgtcgtactcttctccgacgcgctaaggaagaagaaatgaagagattttgtaaggcccaaactattcagcgccgcctgaatgagatcgaagccgccctgcgggaactcgaggccgaaggagtgaagctagaactagcgctgcgacggcagtcctcaagtccagaacagcagaagaagctctgggttgggcaactgctccagctcgtggacaagaaaaactccctggtggccgaagaggcagaactaatgatcacagtccaggaactcaaccttgaagaaaagcagtggcaattggaccaggagctgcgcgggtatatgaacagggaggaaaatcttaagaccgcagccgatagacaagctgaggatcaggtcctgagaaagttggttgacctcgtgaaccagcgggatgccctgatccgctttcaggaggagcgaagactttcggagcttgctttgggtacgggggcgcagggttag

SEQ ID NO: 124315 - DNA, 3204 bp, synthetic construct
  misc_feature 1..3204: note = Description of Artificial Sequence: Synthetic coding sequence
  source 1..3204: mol_type = other DNA
atggcctcccctaccagtaccaacccggctcatgcccacttcgagtctttccttcaggcacagctgtgccaggacgttctgtcatcctttcaggagctctgtggcgccctggggctggagcccggcggtggccttccacagtatcataagatcaaggaccaactaaactactggtctgcaaaatcactgtggaccaagctcgacaagagggcggggcagcctgtgtaccagcaaggccgtgcttgtacatctactaagtgtttggtggtcggtgccggtccctgtggcctccgcgtggccgtggaactggctctgctgggcgctagggtagtattggttgaaaagaggactaagttctctaggcacaacgttctgcacctttggccattcaccattcatgatcttcgcgctctgggtgccaaaaaattctatggccggttttgcactggcacactcgaccacatctccattaggcagttgcagctcctcctgttgaaggtcgcactgcttctgggggtggagatacattggggagtgactttcactggcctccaacctccacctcgcaaaggctcaggttggagggcacagctgcagcccaacccaccagcccagctggccaactatgagttcgacgtcctgattagtgccgccggtggcaaattcgtgccggagggcttcaaggtgcgcgagatgagaggcaagctcgcgataggtataacagctaacttcgtgaatggccgtacagtagaggaaacacaggtacccgagatctctggtgtcgccagaatttacaaccagagttttttccaatccctgctgaaagccacaggcattgacctagaaaacatcgtgtattataaggatgacacacattactttgtgatgaccgcgaaaaagcagtgcctccttcggctgggagtgctgcgtcaggattggcctgataccaataggcttttaggaagtgctaacgtagttcctgaggcgctgcagcgattcacccgcgccgcggcagatttcgccacccatggcaagctggggaaattggaattcgcacaggacgctcacggacagccagacgtttctgcttttgatttcactagtatgatgcgtgcagaaagctcagcccgggttcaggagaaacacggggcgagactgcttcttgggctggttggcgattgtttagtggaacctttctggcccctcggtaccggggtcgccaggggctttctcgctgccttcgacgcagcttggatggtcaagcgctgggcggaaggcgcagagagcttagaggtgttagcggaaagggaaagcctctatcagctgttgagccagaccagccccgaaaatatgcatcggaatgtagcacaatacggactggaccccgcaactaggtatcccaatctgaatttacgcgctgtcacccccaaccaagtgagggatttgtacgatgtcctagctaaggaacccgttcagagaaataatgataagactgatactgggatgcccgcaactggaagtgctggtacacaggaggaactgctgagatggtgtcaggagcaaacagctggctatcccggagttcacgtctctgacctttcatcaagctgggccgatggcctcgctttgtgcgcactggtgtatcgactgcagccaggactgcttgaaccaagtgagctgcaggggctcggcgcactggaggctacagcgtgggccctgaaggtggcagagaatgaactaggaattacaccggtggtgtctgctcaggccgtggtcgccggaagtgacccgttggggttgatcgcctatctgagtcatttccactctgcgtttaagtctatggctcactcacccgggccagtaagtcaggctagccctggtacctcatcagctgtcctgtttctgtcaaagctgcagcggacgttgcagcgaagtcgcgcaaaagaaaacgccgaggacgccggcgggaagaaactcaggctcgagatggaagccgaaacgccatccacagaggtgccacctgatccagagcccggggtccctttaactcctcccagccagcaccaggaagcgggtgccggcgatctctgtgcactgtgcggtgaacatttgtacgtgctggagcggctgtgcgtgaacggtcacttctttcatcggagttgttttcgctgccacacctgtgaggccaccttgtggcctggaggctacgaacagcatcctggcgatggacatttttactgtctgcagcacctgccgcaaacggaccacaaagctgagggcagcgatcgaggacctgagagcccagagctgcctacgccatcagagaactctatgccccccggactctctacaccaaccgcatctcaggagggggctggtccagtgcctgatccctcccagccaacaagacggcagatccgcctgtcctctcctgaacggcagcgcctgtcatccttgaacctcaccccggatcctgagatggaacctccacctaaaccaccaagatcgtgttcagcactagccaggcatgctctggagtcctcttttgtcggctgggggcttccagtccagtcccctcaggcccttgtggcgatggagaaagaggagaaggagtccccgtttagcagcgaggaggaagaggaagatgtgcccctggactccgatgtggaacaggctcttcagacctttgcaaagactagcggcactatgaacaattacccaacttggcggagaacgttgctgcggagagctaaggaggaggagatgaaacggttttgcaaagctcagactatccagagaaggctgaacgaaattgaggcagccctaagggagctggaggcggaaggggttaagcttgagcttgccctgaggcgccagagctccagtccagaacagcagaagaaattgtgggtgggacagcttcttcaactggtcgacaaaaaaaattccctcgtggccgaagaggccgaactcatgataacagtccaggaactgaatctcgaggagaagcagtggcaacttgatcaagagctgagagggtacatgaatagagaggaaaaccttaagactgccgccgaccgccaagccgaggatcaggttttacgcaagcttgtggacttggttaaccagagggacgccctcatccgatttcaggaagaacggcggttgagcgaactggctctcggtacaggggcgcagggctag

SEQ ID NO: 124316 - DNA, 3261 bp, synthetic construct
  misc_feature 1..3261: note = Description of Artificial Sequence: Synthetic coding sequence
  source 1..3261: mol_type = other DNA
atgtcctgcctgagccattcatcacttccttcatgctgcccccctcaggaggcctccatggcaagtcccacttccactaatcccgcccatgcacactttgagtctttcctccaggctcagttgtgtcaggatgttctcagtagcttccaggagctctgtggggcgctgggactggaacccggcggcggactgccgcagtatcataagataaaagatcagctgaactattggagtgcaaaaagcctctggaccaagctagataaacgcgccgggcagcccgtgtaccaacaagggcgggcgtgcacatccaccaagtgcctggtagttggcgccggaccctgcggtctgcgggtcgccgtagagctggcactcctgggcgcacgggtggtgctagtggaaaagcgcacgaaattttcccgtcataatgtcctccatctgtggcctttcacaattcacgacctgcgggcactgggagccaaaaagttttacggcagattctgtactggcactctcgaccatattagcataagacaactgcaactgcttctgctgaaggtagctcttctgctgggcgtggagattcactggggtgtgacgttcactggtctgcagccaccgccccgcaaaggaagtgggtggagggcccaattacagcctaatcccccggcccagctggcaaattacgaattcgatgtgctcatcagcgccgccggagggaagttcgtccctgagggatttaaggtaagagagatgagagggaaattagctataggcatcacagccaacttcgtgaacggtcggaccgtggaggaaacccaggtcccggaaattagtggcgtggctcggatttacaatcagagtttttttcagtcattgcttaaggcgaccgggatcgacttggagaacatagtttactacaaggacgacacccactacttcgttatgaccgccaaaaagcaatgcctactgagactgggcgtacttcgccaggactggccagacaccaaccgtctcttaggttcggcaaacgtggtacctgaggcactgcagagatttaccagagccgctgcagatttcgcaacccacggaaagttgggcaaattagaatttgcccaggacgctcacggccaacccgacgtaagtgcattcgacttcacatccatgatgagagcagagtcatccgcacgtgtccaagaaaaacacggggcgcgtctgctgttggggttagttggtgactgtctggttgagccattttggcctttaggtactggggtggccagaggctttttagctgccttcgacgccgcgtggatggtcaaacggtgggcagagggcgcagagtccttggaagtgctggcagagagggagtctctttaccagctcttgagccagacttctcctgagaacatgcacaggaacgttgctcaatacggactggacccagccacccgatatcctaatttgaacctgcgagctgttactccaaaccaggtacgtgatttgtacgacgtgctcgccaaagaaccagtgcagcgtaacaacgataaaacagacactggcatgccagctacaggaagcgcaggcacccaagaggagcttcttagatggtgccaggagcagactgccgggtacccaggagtgcacgtgtctgatttgtccagttcttgggccgacggtctcgccctctgtgccctggtgtataggttgcagcccggactcctggagccttcagagctgcaggggctgggcgcactagaagcgacagcctgggccctgaaggttgctgagaacgagctcggcattactcccgtggtgtccgctcaggccgtcgtagccggatctgacccactcggcctaatcgcctacctgtctcacttccactccgcatttaaatccatggcccacagtccagggccagtgtctcaggcctctccaggcacatcttccgctgtgctgtttctctctaaactgcagcgcaccctgcaaagaagccgagcaaaagaaaacgccgaggatgcaggtggaaaaaagctacggctagagatggaagcagagacaccttctaccgaggtgcctccagatcccgaaccaggggtgcccctgacgccaccatcccagcaccaggaagcgggtgccggagacctatgtgccctgtgcggtgagcacctgtacgtgctggaaagactgtgtgtgaacggacacttctttcaccgctcttgctttcgctgtcatacgtgcgaggccaccctgtggccggggggctacgaacagcatcctggcgacggacacttttattgtttacagcatctcccacagacagaccataaggcagaaggcagcgaccggggaccagaaagccctgaactgcccacacccagcgaaaactccatgccgcccgggctgtccacgccaacagcttctcaagaaggagccggacctgtacctgatcccagccagccaactagaaggcaaatacgcttgtcatcccccgagaggcaacgactctcatctctgaatctcaccccagaccccgaaatggaaccgccacctaaaccccctaggagttgtagtgcactggctaggcacgccctcgaatctagttttgtgggctggggcctgccagtccagagtccccaggccctggtggccatggaaaaggaggaaaaggagtccccctttagctccgaggaagaagaggaggacgtgcccctagattctgacgtcgagcaggctttgcagacctttgccaagaccagcggtactatgaataattaccctacctggagacgcaccctactgaggcgggccaaagaagaagagatgaaacgtttctgcaaggctcaaaccattcaacggcgcctcaacgagatcgaggctgccctaagggaactggaagcagagggagtgaagctggaattagcacttcgtcgccagagttcatcccctgagcagcagaagaagctttgggtggggcaactgctgcagctggtggataagaaaaattccctggtagctgaggaggctgagctgatgattacagtgcaggaattgaacttggaagagaagcagtggcaacttgaccaggagttacgcggctacatgaacagagaggaaaacttgaagactgcagctgacagacaggcagaggaccaggtgttgaggaagctggtggatctcgtgaatcagcgggacgccctgattcggttccaagaggaaaggaggctgagcgagttggctctgggtaccggagcccaggggtag

SEQ ID NO: 124317 - DNA, 1776 bp, synthetic construct
  misc_feature 1..1776: note = Description of Artificial Sequence: Synthetic coding sequence
  source 1..1776: mol_type = other DNA
ccaaagtatgtacttccgtcggaggcccaggtggtgccagccaagcagttgcaacctcaagaccggagttctgttcccgaacacagcctgttggctggaactcaggaggagctgctcaggtggtgtcaggagcagacagctggctacccaggggtgcatgtatctgacttaagttctagttgggccgacggccttgccctgtgcgcactcgtctatagactccaaccgggtttgctggagccctctgaactccagggccttggagcactggaggccactgcctgggcccttaaggtagcggagaacgaacttggaataacccctgtcgtcagcgcccaagccgtggtggccgggtcggatccgctgggactgatagcctatctttcacactttcactccgctttcaagtctatggcccattctccaggcccggtatctcaggcctctcccgggacttcctccgccgtgcttttcctgagtaaactccagcggaccctgcagcggtctcgggccaaagagaatgccgaggacgccgggggcaagaagctcagacttgagatggaggctgagacgccaagcaccgaggtgccacccgatcccgaaccgggagtgccactaacccccccaagccagcaccaggaagccggcgccggcgatctctgcgctctgtgtggcgagcacttatacgtgttggaacgactctgcgtaaatggacattttttccatcgcagttgcttcaggtgccatacctgtgaggccactttatggcctggtggctatgagcagcacccaggggatgggcatttttattgcttgcagcacctgccacagactgaccacaaagctgagggttcagatcggggccctgagtcacccgagctgccaacaccgagcgagaactctatgccacctggtctgagcactcccacagcatcccaagaaggggccggtcctgtcccagatcctagccagccgaccaggaggcaaatcaggctaagttccccagagcggcagcgcctctctagtctcaaccttacacctgacccagaaatggagcccccacccaaaccgccgagaagttgcagtgcactagctagacacgccctagagtcgagttttgttggctggggtttgcccgtccagtcaccacaggccttagtcgccatggaaaaagaagagaaggaatcaccttttagctctgaagaggaggaagaggatgttccgctcgattccgacgtcgagcaggcactacaaacatttgctaaaacatctggtacgatgaataattatccaacatggaggaggactctccttagacgggcgaaagaggaagagatgaaacggttctgcaaagcccagaccatccagagacggctcaacgaaatcgaagcggctctgcgcgaactggaggccgaaggcgttaaacttgagttggccctgaggcgccagagttcaagcccagaacagcaaaagaaactatgggtcggacagctgctgcagctggttgacaagaagaactctttggttgctgaggaggccgaactgatgatcactgtccaggagctgaacctggaggagaaacagtggcagctcgaccaagaattacgggggtatatgaatagagaggagaacctgaagactgccgccgacaggcaggccgaagatcaggtgctgcgcaagctggtggacctcgttaatcagagagatgcgctgattaggttccaggaggaaaggagacttagtgagttggcgctggggaccggggcccaggggtag

SEQ ID NO: 124318 - DNA, 735 bp, synthetic construct
  misc_feature 1..735: note = Description of Artificial Sequence: Synthetic coding sequence
  source 1..735: mol_type = other DNA
atggcaagccccaccagcacgaatcccgctcacgcgcatttcgagtccttcctacaggctcagctgtgccaggacgtgctgtcttcctttcaagaattgtgcggtgcgcttgggctcgagcctgggggcggcctaccacagtatcacaagattaaagatcaactgaattattggagtgccaagtctttgtggacaaagctggacaagcgtgccggacagcctgtgtatcaacagggccgcgcctgcactagtaccaagtgcctggtagtgggagccgggccttgtggtctaagggtcgcagttgagctagctttactcggggctagagtcgtcttagtggaaaagcgcactaaatttagtcgacataatgtgctgcacttatggcccttcactattcacgacttacgcgcgctaggcgcaaaaaaattctacgggcgtttctgtacaggaaccctagaccatatttctattaggcagttacagttgttgctcctcaaggtcgctctgctccttggcgtggaaatacactggggggtaacttttaccggactgcaacccccacctcggaaggggtccggctggagagctcagctgcagccaaatccacctgcccagctggctaactatgagtttgatgtactgatttcggctgccggcggaaagttcgtacccgaaggctttaaagtgcgtgaaatgaggggcaagctagcgatcggcataaccgctaacttttag

SEQ ID NO: 124319 - DNA, 3375 bp, synthetic construct
  misc_feature 1..3375: note = Description of Artificial Sequence: Synthetic coding sequence
  source 1..3375: mol_type = other DNA
atgggagagaatgaggatgagaaacaggcccaggctggccaggtcttcgaaaacttcgtgcaggcctctacttgcaaaggaacactgcaggcgtttaacatcttaacccggcacctcgatttggatcctctggaccacaggaacttttatagtaaacttaagtctaaagttaccacatggaaagccaaagcactgtggtacaagctggacaaacgtggcagtcataaggagtataagcggggcaagagttgtacaaacacaaaatgcctgatcgtcggcggaggtccctgcggcctccgcacggccatcgagctcgcttatctgggggcaaaagtggtggttgtggagaagagggactccttctctagaaacaatgtgttgcatctttggccctttacaattcatgatctcagaggccttggcgcaaaaaaattctatggtaagttctgtgccggatccatcgatcacatttcaatcaggcaactccagctgatattattcaaggtggcactaatgttaggtgtggaaatccacgtgaatgttgagtttgtaaaagtgttagagcctccagaagaccaggaaaaccagaagattgggtggcgagcggaattcttgcctacagaccacagtttatcagaatttgagtttgatgtgatcattggcgccgacggccggaggaacacactcgagggtttccggcgaaaggagttccgaggtaagctggccattgccattacagccaatttcatcaataggaactcaacggcagaggctaaggtggaagagattagtggagtggcgtttatctttaatcagaagttctttcaagacctgaaggaggaaactgggattgacttggaaaatatcgtctactataaggattgcacacattattttgtgatgaccgcgaaaaagcagtcactcctcgataagggcgtcatcatcaatgattacattgacactgagatgctcttgtgtgccgagaatgtgaaccaggacaacctactctcatacgccagagaagccgctgatttcgccaccaattaccagcttccctccctggactttgccatgaatcattacggccaaccagatgtagctatgtttgactttacttgtatgtatgcctctgaaaatgctgctttagtaagagaaagacaagctcaccaactgctggtcgctctggtaggagactcactgttggaacccttttggcccatgggcacgggctgtgccagggggtttctggccgccttcgacacagcttggatggtgaaatcatggaatcaaggtactccgccccttgaactcctcgcagagagggaatcgctatacagacttctgccgcagacaactcccgagaacatcaacaagaacttcgagcaatataccctcgatcctggcacccggtatcccaacctgaatagccattgcgtccgcccccaccaggtaaagcatttgtatataaccaaagagctggaacactatccactggaacgccttgggtcagtacgcaggtccgtcaacctgtcacggaaagagtctgacatcagaccatccaaacttctgacttggtgccagcagcagaccgaagggtatcagcacgtcaacgtgaccgacctgaccacaagttggcggagtgggctggccctgtgtgcaatcattcaccgattcagacccgaactgattaacttcgactctttgaacgaagacgacgcagtggagaacaatcaactggcttttgacgtggcggaaagagagttcggcatcccgcccgtgactaccggtaaagagatggcctccgcgcaagagcccgataagctgtctatggtcatgtatctctccaagttctacgagctgtttagaggcaccccactcagacctgtcgactcttggagaaagaattatggcgagaacgccgacttaagtctggcgaagagctcaatctccaacaattatctcaaccttaccttccctcgtaaaaggaccccaagagtggatggccagactggtgagaatgatatgaacaaaagaaggagaaaggggttcacgaatttggatgagccttccaacttttcatcgcggtctctggggtctaatcaggaatgcgggagtagcaaagaaggaggtaaccagaacaaggtaaagtcaatggctaaccaattactggctaaatttgaggaatcaacgcgcaatcccagcctcatgaagcaagagaggcgtgtgtctggcatcggaaagcctgtgttgtgttcatcctccggaccccccgtacattcatgttgccccaaaccagaagaggccaccccttcgcccagtccacccctcaaacgccagttcccgtcagtggtagttacaggccatgttctccgcgagcttaagcaggtgtccgccggatctgagtgcctctcaagaccgtggagagctagggccaagtctgatctgcaactgggcggtaccgagaacttcgccactctgccttctacacgaccacgcgcccaggccctctccggggtgttgtggcggctgcagcaggtggaggagaagatccttcagaagcgtgcccagaacctagcaaacagagaatttcatacgaagaacattaaggagaaagccgcccatctggccagtatgttcggccacggcgactttccgcaaaataagttgctgtcgaagggcctgtcacatacccaccccccgagtccaccttcacggctgccctcacctgatccagccgctagtagctcgcccagcaccgtggattccgcctcccctgccagaaaagagaagaagagtcctagtggcttccacttccatccttcccatctccgcactgttcacccgcagcttaccgtgggaaaagttagctctggaattggggccgctgccgaggtgctggtgaatctttatatgaacgaccataggccgaaggcgcaggcaacaagccctgacctggaatctatgaggaagtccttcccactgaaccttggcggaagcgacacctgttacttttgcaagaaaagagtgtacgtgatggagcggttgtctgccgaggggcactttttccatagggagtgcttcaggtgtagtatatgcgctaccactttaaggctggccgcctatacctttgactgcgacgaaggcaagttctactgtaaaccccacttcatacactgcaaaacaaactctaagcagagaaaaagaagagctgaactcaagcaacagagagaggaggaggctacctggcaagaacaggaagctccacggcgggacacaccaaccgaatcgagttgcgcagttgccgccataggcacattggagggtagtccccctgttcacttctcactcccggtactacatccgctcctcgggtag

SEQ ID NO: 124320 - DNA, 3312 bp, synthetic construct
  misc_feature 1..3312: note = Description of Artificial Sequence: Synthetic coding sequence
  source 1..3312: mol_type = other DNA
atgggagaaaatgaagacgaaaaacaggcacaggccggacaggtcttcgagaactttgttcaggcaagtacttgcaagggaaccctccaggcatttaatattttgaccaggcaccttgatctggacccgttagatcaccgaaatttctacagcaaactgaagtcaaaggtgacaacctggaaagctaaagcgctgtggtataaacttgacaaaaggggttcgcacaaagaatacaaacgcggcaagagttgtacgaatactaagtgcctcatcgtagggggtggcccttgcggtctgcgtacggccattgagttagcatatctgggtgcaaaggtggtggtagtggaaaaacgcgattcattttcacggaataatgtcctgcacttgtggccctttaccatacacgaccttcgaggtttgggggcaaaaaaattctatggtaagttctgtgcaggatccattgaccacatctcaattcgacagctgcagttaatcctgtttaaggtcgccttgatgctgggcgtagagatccacgtcaacgtagagttcgtgaaggtcttggaaccacccgaggaccaggaaaaccagaagattggatggcgcgcagagtttctgcccaccgatcactcactgtctgaatttgaattcgacgttattatcggcgcagacggccgcagaaatacgttggagggttttagacgaaaggagttccgcggaaagctggccattgcaatcactgcgaatttcatcaacaggaacagtaccgccgaggctaaagtggaagaaatctctggagttgcttttattttcaatcaaaaatttttccaagatttaaaagaggagaccggcattgatctggaaaacattgtctactataaggattgcactcactacttcgttatgaccgcaaagaaacaaagcctcctggataagggggtgataatcaacgactatatagataccgaaatgctcctgtgcgccgaaaacgtgaatcaggataacctgctcagctacgcaagagaggctgccgatttcgccaccaactatcagctaccatctctcgatttcgccatgaatcattatggacagcctgacgtagccatgtttgacttcacatgtatgtatgccagcgagaacgctgccctggtccgcgaacgccaggcccaccagttgctggtggcgctggttggcgattcactgcttgagcccttttggcccatgggaaccgggtgcgctcgcggcttcctcgcagcattcgatactgcctggatggtgaagtcctggaatcagggtacccccccccttgagctgctggctgagcgcgagtcactgtacaggttacttccacagaccactcccgagaatatcaataaaaattttgagcagtatactctggaccccggaacccgataccctaatctcaactctcactgtgtccggccacatcaggtcaaacacctctatattaccaaagagctggagcattacccgttggagagactgggctctgtgcggcggtcagtaaatctgtcacgaaaggaaagcgacatacggccatctaaacttctcacctggtgtcagcaacagacagagggatatcagcatgtgaatgttactgatttaaccacctcctggcgctccgggctggcattgtgtgccattatccataggttcaggcctgagctcatcaacttcgatagcctcaatgaggacgatgccgtagagaacaatcagttggcttttgacgtggcagagcgggaatttggcatcccccccgtgaccaccggcaaagaaatggcttcggctcaggagccggataagctgtcaatggttatgtatctgagcaaattttatgagctcttccgcgggacgcccctgcgccccgtggacagctggcgaaagaattatggtgagaacgctgacctttctctggccaagtcgtcaatatctaacaactacctcaatctcactttcccgcgaaagcgtacccctcgcgtagacggtcagactggagaaaatgacatgaacaagcgaagaaggaaggggttcactaatctggatgagccatccaacttctccagcaggtctcttggctcgaatcaggagtgcggctctagcaaagagggaggaaatcagaataaagtgaagtcaatggccaaccagctactggctaaatttgaagagtcaactaggaatccctccctcatgaagcaggagaggagggttagcggaatcggcaagcccgtcttgtgttcttcatcaggcccgccagttcactcctgttgccccaagccagaagaagccactcctagtccctctccaccccttaaaagacagttccccagtgttgtcgtgacagggcacgtgctgagagagttaaaacaggtctccgcagggagcgaatgcctgagtcggccttggcgggctcgagctaagtcagatctccagttggggggcaccgagaacttcgctactctcccttcaacgagacccagagcccaggctctgtctggagtgctgtggcgcctacagcaggttgaagagaaaatattgcagaagagggcacagaatctggctaatagagagttccacaccaaaaacatcaaggaaaaagccgcccatctggcctcaatgtttggacatggagatttcccccagaataaactgcttagtaaaggactgtcacatactcatccaccatctcctccaagccggctgccctctccagacccagccgcatcatcgagcccttctacagtagacagtgcttccccagctagaaagctcactgtgggaaaagttagctccggcataggggctgcagcagaagtcctggtgaacctgtatatgaatgaccacagacctaaagcgcaggcgacttcccctgacctcgagtctatgaggaaatcctttcctctgaaccttggagggagtgacacatgttacttctgtaagaagagggtgtatgtaatggaacggcttagtgccgaaggacacttctttcacagagaatgtttccgctgctccatttgtgctacaactctccgcttggcagcgtatacctttgactgcgacgaaggcaaattttactgtaaaccccattttatccactgcaagactaacagcaagcaacgaaagcgccgcgctgagctcaagcagcagcgcgaggaagaggccacctggcaggagcaggaggcccccaggagggacactcccacagagagctcatgcgccgtggctgctatcggtaccctggaaggctcgcccccggtgcacttttctctgcctgtgctccatccactgctgggctag

SEQ ID NO: 124321 - DNA, 2931 bp, synthetic construct
  misc_feature 1..2931: note = Description of Artificial Sequence: Synthetic coding sequence
  source 1..2931: mol_type = other DNA
atgggggaaaatgaagacgagaagcaggcccaggccgggcaggtgttcgagaactttgtccaggcatctacctgcaagggcactttacaggctttcaatatcctcacgcgccatctggatctagatccgctggatcacaggaacttctatagcaaattgaagtctaaagtgacaacttggaaggcaaaggccctttggtataaattggacaaacgcggctctcataaggagtataagaggggaaagagctgcactaacaccaagtgcttgatcgtgggcggcggaccgtgcgggctccggacagccatagaactcgcttacttgggcgccaaagtggtggtggtcgaaaagcgggattctttctctcggaacaacgtgttgcatctgtggccattcacaattcacgatctcagagggctgggtgccaaaaagttttacggcaaattctgcgctgggtcgatcgatcacattagcatccgacagcttcaactgattttgttcaaagtcgccctgatgttaggtgtggagatccacgtaaacgtcgagtttgtcaaagtcctggagccacctgaggatcaggagaatcagaagatcggctggcgggcagaattcctgccgaccgaccactctctgtccgagttcgagtttgacgttataattggggcagacgggcgacggaatactttggaaggtttcaggcggaaggagttccgagggaagctggctattgccataaccgcgaatttcatcaacaggaactccactgccgaagccaaagtagaggagatttctggtgtcgccttcatctttaatcagaagttcttccaggatctgaaggaagaaacagggattgatctagagaatattgtgtactacaaggactgtacacactacttcgtcatgactgcaaaaaaacagtctctcctcgacaagggggtgatcattaatgactatatcgacactgagatgttactgtgcgccgaaaatgtgaaccaggacaacctgctgagttatgctcgagaagctgccgactttgctaccaactaccaactgccctctttggacttcgccatgaaccattatggccaaccagacgtcgctatgtttgactttacctgcatgtacgcttcagagaacgccgctctggttagagaacgacaggcccaccagttgctcgttgccctcgtaggagattctctgctcgaacctttctggcccatgggaacgggatgcgccaggggtttccttgctgctttcgataccgcctggatggtgaaaagctggaatcagggaacaccccccctggaactgctggcggagcgggagagcttgtacaggctgcttccgcagacgaccccagaaaacataaataagaacttcgaacaatacactctggatcccggcacccggtaccccaacctgaactcccactgcgtccggccacatcaggtcaagcatctgtacatcacaaaagaactggaacactatcctcttgaacggctgggaagtgtcagacggtccgtgaatctcagcaggaaggagagtgatattcgaccatcaaagctactaacatggtgccaacagcagacggagggataccagcatgtgaacgtgacggacctgacaactagctggagaagtggcttagccctatgtgccattatccaccgattcaggccagagctcattaactttgattccctgaacgaagacgacgcggtcgagaataatcaattggccttcgacgtggctgaaagggagtttggaataccgcctgtgactactgggaaggaaatggccagcgcccaagaaccggacaaactgtcaatggtcatgtacctttccaagttctatgagctctttcgcggtaccccactccgtcccgttgattcttggcgcaagaattatggcgagaacgccgatctgtctctcgccaagtctagcataagcaacaactatcttaacctgacatttccgagaaagcgtacccctagagttgatggacaaaccggtgagaacgatatgaataagcgtcgccgcaaggggtttactaacttagacgaaccaagcaatttctccagccgctccctggggtctaaccaggaatgtggctccagtaaggaagggggaaaccagaataaggtgaagagcatggcaaaccagctgctggctaagttcgaagagtccaccaggaatccttctctgatgaaacaagagaagaagagtcctagtgggttccattttcatccaagccatctacgcaccgtccacccacaggaaagcatgagaaagtcatttcccttgaatctaggtggaagcgatacctgttacttttgcaagaagagggtttacgtaatggagcgtctgagcgctgaaggacactttttccacagagagtgcttccgctgttccatttgcgccaccacactgaggttggccgcttatacgtttgattgcgacgaaggaaaattctactgtaagccacactttatccactgtaagaccaattctaagcagcggaaaagacgagctgaactgaaacagcaacgggaggaggaggccacctggcaggaacaagaggcccctcggagagatacccctaccgagagttcctgcgccgtggctgcaattggaactctggagggttcaccccctggtatcagtaccagcttttttcgcaaagtgttaggctggccgctgcgactcccaagagacttgtgcaactggatgcagggactcctgcaggctgcaggcttgcatattcgggataatgcttataattattgctatatgtacgagctgctcagtcttgggctgcctctcctgtgggcgtttagcgaggtgctggctgctatgtaccgggaatcagagggctccctggaatccatctgcaactgggtgttgcgctgtttccctgtaaaacttaggtag

SEQ ID NO: 124322 - DNA, 363 bp, synthetic construct
  misc_feature 1..363: note = Description of Artificial Sequence: Synthetic coding sequence
  source 1..363: mol_type = other DNA
atgggggagaatgaggacgagaaacaagcccaagctggacaggtcttcgagaattttgttcaggcgtccacctgcaaaggcaccctgcaggcctttaatatattgacaaggcatttagatctggaccccctagaccaccgtaatttctactccaagctgaagagtaaggtcacaacgtggaaggcaaaagctctgtggtacaagctcgacaagagaggctctcataaagagtacaagcgggggaagtcctgcaccaacactaaatgtctcatcgtgggaggaggaccttgcggcctcaggacagccatcgagctggcctacctgggcgcaaaagtggtcgtggttgaaaaacgtgatagttag

SEQ ID NO: 124323 - DNA, 405 bp, synthetic construct
  misc_feature 1..405: note = Description of Artificial Sequence: Synthetic coding sequence
  source 1..405: mol_type = other DNA
atgggagagaatgaggatgaaaagcaggcccaggccgggcaggttttcgagaacttcgtccaagctagcacatgcaaagggacactacaggcattcaatatcctcaccaggcacctggacttggatccccttgaccataggaatttctactcaaaactcaagtctaaagttactacctggaaggcaaaggctttgtggtacaagctggacaagagagggagtcacaaagagtataaacgtggaaagtcgtgtaccaataccaagtgccttattgtgggcgggggcccctgtggactgcgcaccgctatagagctggcttacctcggtgctaaagttgtcgtcgtggaaaagcgcgattcgttcagtcgtaataatgtgctgcacctttggccttttaccatttag

SEQ ID NO: 124324 - DNA, 267 bp, synthetic construct
  misc_feature 1..267: note = Description of Artificial Sequence: Synthetic coding sequence
  source 1..267: mol_type = other DNA
atgggcgagaatgaggacgagaagcaggcacaggcggggcaagtttttgaaaattttgtgcaggctagtacctgcaaagggacactgcaagcatttaatatcctgactcggcatctggacctagaccccctggatcatcgcaacttctactctaaactgaagagtaaggtgaccacatggaaggccaaggcgctctggtacaagcttgacaaacgcggatcacacaaagaatacaagagaggaaagtcctgcaccaatacaaagtag

SEQ ID NO: 124325 - DNA, 12 bp, synthetic construct
  misc_feature 1..12: note = Description of Artificial Sequence: Synthetic coding sequence
  source 1..12: mol_type = other DNA
atgggtgaatag

SEQ ID NO: 124326 - DNA, 297 bp, synthetic construct
  misc_feature 1..297: note = Description of Artificial Sequence: Synthetic coding sequence
  source 1..297: mol_type = other DNA
atgggcgaaaacgaagatgaaaagcaggcacaggccggccaggtgtttgaaaacttcgtacaagctagcacatgcaaggggactctgcaggcttttaacatcttgacaaggcaccttgatctcgatccacttgaccatcggaacttttactcaaagttgaagtccaaggtgacgacctggaaagctaaggctctctggtacaagttggacaaacgaggctcacataaggaatataaaagaggtaagtcatgtaccaacaccaaatgcctcattgtcggtggagggccctgcggatag

SEQ ID NO: 124327 - DNA, 267 bp, synthetic construct
  misc_feature 1..267: note = Description of Artificial Sequence: Synthetic coding sequence
  source 1..267: mol_type = other DNA
atgggcgagaacgaagacgagaagcaagcacaagcaggccaggtgtttgagaattttgtccaggcttcgacgtgtaaagggaccctccaagctttcaacattttgacaaggcacctagatttggacccactggaccatcgcaatttctattctaaactcaaatctaaagtaacaacgtggaaagcaaaagctctatggtacaaattggacaaacgaggctcccacaaggagtataagcgagggaaatcttgcacaaataccaaatag

SEQ ID NO: 124328 - DNA, 309 bp, synthetic construct
  misc_feature 1..309: note = Description of Artificial Sequence: Synthetic coding sequence
  source 1..309: mol_type = other DNA
atgggtgaaaacgaggatgagaaacaagcccaagctggccaggtcttcgagaatttcgtccaagccagcacatgcaaagggaccctgcaggccttcaatatactcacccggcatcttgatctggacccacttgatcaccggaatttctacagcaagttgaagtccaaggtcacgacctggaaggccaaagctctatggtataagctggataagaggggatcccataaggagtacaagcgggggaaatcatgtaccaatacaaagtgcctgatcgtgggcggagggccatgcggcctgcgcacagcatag

SEQ ID NO: 124329 - DNA, 2805 bp, synthetic construct
  misc_feature 1..2805: note = Description of Artificial Sequence: Synthetic coding sequence
  source 1..2805: mol_type = other DNA
atgggagagaacgaggatgagaagcaggcccaggctggtcaagttttcgagaactttgtgcaggctagcacgtgcaagggcactcttcaggcctttaacatcctcacacggcatctggatctcgatcccttagaccaccggaacttctatagtaaactaaagagcaaggtgaccacctggaaggcaaaagctctctggtataaactggataagagaggcagccataaagaatacaagcgcggtaaatcgtgtacaaacacaaaatgcctgatagttggagggggaccttgcggcttgcgtacagcgatcgagttggcttatttaggcgcaaaagtcgtcgtggtggaaaaacgggatagcttttcacgcaacaacgtcctgcacctctggccgttcacaatacacgacctgcgggggctgggtgctaagaaattctacgggaaattttgcgccggctccattgaccacatatcaattagacagttacagctgattttatttaaagttgccctcatgttaggggtggaaattcacgtgaacgttgagttcgtgaaagttttggagccccccgaagatcaagagaatcaaaagatcgggtggagggctgaattcttgcccaccgaccatagtctgagtgagttcgaattcgacgtgattatcggcgccgacggccgcagaaatacccttgagggctttagacggaaagagtttcgagggaaactggccatcgcaattacagccaatttcatcaatagaaatagtaccgcggaggcaaaggtggaggagatttctggggtggcctttatatttaaccagaaattcttccaggatctgaaagaggaaacaggaattgatttggaaaacatcgtatattacaaagattgcacccattactttgtgatgaccgcaaagaagcagtctctgcttgataagggggttatcattaacgactatatcgatacagagatgctgctgtgcgctgaaaacgttaatcaggataatctgctgagctacgccagggaggcggctgactttgccactaattatcaactcccaagtttggacttcgcaatgaatcattacggacagcctgacgtggcaatgtttgacttcacctgtatgtacgcttcggaaaacgcagccctggtgcgcgagcgacaggctcaccaactcctggtggctctggtgggtgactctcttttagagccattttggcccatgggtacagggtgcgctcgggggtttctggccgccttcgacaccgcctggatggtgaagtcttggaaccagggcacaccccctctcgaattgctggctgaaagagagtcactgtacaggctactcccacagacaactcccgagaatatcaataaaaacttcgagcagtacacactcgacccaggcacccggtaccccaatttgaactcccactgtgtgcgaccccaccaggtgaagcatctgtacattacaaaagaactagagcactatcctctggaacgattgggttcagtgcggaggtccgtgaatctgagccggaaggaatccgacatcaggcccagcaaactgctgacttggtgtcagcagcagactgaaggctatcagcatgtgaatgtaacggaccttactaccagttggagatctggcctagccctttgtgccataattcatagattccgtcccgagctgatcaacttcgatagtttgaacgaggacgatgcggtggagaacaaccaactggcttttgatgtcgcagagcgcgaatttggtatcccccctgtgacaaccggtaaagagatggctagcgcacaggaacccgacaagctgtctatggtgatgtacctgtcgaagttttacgagctgttccgtggtaccccactaagacctgtggattcgtggaggaagaactatggcgagaatgctgatctgtccctggcaaaaagcagtatttccaacaactacctgaatcttacatttccccggaaacggacaccccgagttgacggccagaccggagaaaacgatatgaataagcgcaggagaaagggattcacaaatctggacgagccttcaaatttcagctcacgctccctcgggtcaaatcaagagtgtggatccagcaaggaaggcggaaatcaaaacaaggtgaaaagcatggctaatcagctcttagcaaaatttgaggagtccacacggaacccctcactgatgaaacaggaaaagaagagcccatctggctttcatttccatccttctcatcttcgcacggtacatccccagctaacagttgggaaagtgtcaagcggcatcggcgccgccgcagaggtgctagtcaatctgtacatgaacgatcaccgacccaaggcccaggccacatccccagacctcgaatccatgcgcaaatcgttcccccttaacttgggaggttcagacacctgttacttctgtaagaagcgtgtgtatgtgatggaacgcctctctgcagaagggcacttttttcacagggaatgttttaggtgttcaatctgtgctacaaccctccggctggcagcttacaccttcgattgcgacgaagggaagttttattgtaaaccgcactttattcattgcaaaacaaatagcaaacagcgaaagagaagagccgagctgaaacagcagcgcgaagaggaggcaacttggcaggaacaggaggcgcctcggcgggacactcctactgagtcttcatgtgcggtcgcggcaattggtacactggaggggtctcctcctgtccacttctccttgcccgttttacacccactgttgggatag

SEQ ID NO: 124330 - DNA, 1638 bp, synthetic construct
  misc_feature 1..1638: note = Description of Artificial Sequence: Synthetic coding sequence
  source 1..1638: mol_type = other DNA
atgaggtccagccccgacctgaatagccactgtgtccggccgcaccaagtcaagcacctgtatatcacgaaagagctcgagcactatcctctcgagaggctgggatctgttaggcgttctgtcaacctgagtagaaaagaatctgacatccggccgtctaaactcctgacttggtgtcagcagcaaaccgaaggctaccaacacgtgaatgttaccgacttaacgacatcctggcgctccggactggccctatgcgcaattatccaccgcttccggcccgagcttatcaacttcgactctttaaatgaggacgacgcagtcgaaaataaccagctggcattcgatgtggctgaacgggagtttggcatccctcccgtgacgacaggaaaagaaatggcatcggctcaggaaccggacaagctcagcatggtcatgtacctgtccaagttttatgagctgtttcgggggacacctcttagaccagtcgactcgtggagaaaaaattacggagaaaacgccgatctgtcccttgctaaaagcagcatcagtaataactacctgaatctcacctttccacgcaaacgtacccctagggtggacggccagaccggagagaatgacatgaacaaaagaagacggaaaggctttacaaacctcgacgagccttccaactttagttccagaagtctcggatcaaaccaagagtgtgggagtagtaaagagggtggcaatcagaataaggttaagtctatggccaatcagctcttagccaagttcgaagaatctactcgcaatccatccctgatgaagcaggaaaagaaaagcccatccgggtttcacttccaccccagccacctgaggactgttcacccacagcttacggtaggaaaagtaagctccggcatcggcgcagcagcagaagtgctcgttaatctctatatgaatgaccaccgcccaaaggcccaagccacctctcctgatctggaatcaatgcggaagtctttcccactcaaccttggtggctcagatacatgttacttttgcaagaagcgagtctacgtcatggagcgtttgtccgcggagggtcacttcttccaccgcgagtgcttcaggtgttcaatttgtgccactaccttgcgtttggccgcatacactttcgattgcgacgagggcaagttctactgtaaaccccacttcatccactgtaagaccaatagcaagcagaggaagaggagggccgaacttaaacagcagagggaagaggaagccacctggcaggaacaggaggccccacgtcgtgatacacctactgagtcatcgtgcgcggtcgccgccataggcactctcgaagggagcccacctgggatttctaccagcttcttccgcaaggttctgggctggcctttacggttgccgcgggacctctgcaattggatgcagggtcttctgcaggctgccggcctgcatatccgagacaacgcctataactattgctatatgtatgaacttctttcactcggtctaccactgctctgggctttctcagaagtcctcgccgcaatgtaccgagaatctgaaggatcgcttgaaagcatttgcaattgggtcttgcgatgttttcctgtgaagctgcggtag

SEQ ID NO: 124331 - DNA, 3273 bp, synthetic construct
  misc_feature 1..3273: note = Description of Artificial Sequence: Synthetic coding sequence
  source 1..3273: mol_type = other DNA
atggccaccctactaagccatcctcagcagaggccccctttccttcggcaggctattaagatccggagacgaagggttagggatctgcaggaccctccccctcagatggcccctgaaatacagccaccatctcatcacttttcacccgaacaaagggccctgctgtatgaagacgccttatacactgttctgcaccgactggggcacccagaaccaaatcacgtgacggaggcatctgaactgctacgctacctgcaggaggccttccatgtagaaccagaggaacatcagcaaaccttacaacgggtgagagagctggagaagccgattttttgcctcaaagcgaccgtgaaacaggccaagggcatcctgggaaaagatgtatctgggttttcagacccgtactgtctcctggggattgagcagggagtgggggtccccggcggcagcccagggtctcgccatcggcaaaaagctgtagttcggcacactatcccagaagaggagacccaccgaacacaggtcataacccagaccctgaaccccgtctgggacgagacattcatcttagagttcgaggacattaccaacgcgagtttccacctggatatgtgggacctcgacaccgtggaatccgtgcgccagaagctcggcgaattaactgacttacacggtctccggcgaatctttaaggaggcacggaaggacaagggacaggacgacttcttgggcaatgtggtcctgcggttacaagacttaaggtgccgagaggatcagtggtatccactggagcctaggacggagacttacccagacaggggacagtgtcatctgcagtttcaactcatccataagcgtcgcgcgaccagtgcttcaagatcacagcctagctatacagtacatctgcaccttctgcagcagctggtttctcacgaagtgacacagcacgaagccgggtctaccagttgggacggatctctaagcccacaggcggcaaccgtgttattcttacatgccacccagaaggatctgagtgattttcatcagtcaatggcccagtggctggcatactcacgcctttatcaatcccttgagtttccttcttcatgcctgttacaccccatcacatcaattgagtatcagtggatacaggggcgcctcaaagccgagcagcaggaagagctagctgcttccttttcttccttgctaacgtacggtctgtctttaataaggcgattccgctccgtgtttcctctctcagtgtcagatagccctgcccgcctgcagtctctgttgagggtgctggttcagatgtgtaaaatgaaagccttcggagagctgtgtcctaacactgctcccctaccacagctggtcaccgaggctctgcagaccggcacaactgaatggtttcatctgaagcagcagcatcatcagcccatggtgcaggggattccagaggcaggaaaggcccttttgggtcttgtgcaagacgtgataggagatctccaccaatgccagagaacctgggataaaatcttccacaatacactgaaaattcacttgtttagcatggcctttagggaactgcaatggctcgtggcgaaaagagttcaggaccacactaccgtggtgggcgatgttgtaagccccgaaatgggagagagcctgttccagctctatatatctctgaaggaactgtgccagctccgcatgtcatcctccgagagggatggcgttctggcactggacaacttccatagatggttccagccagccattcctagctggcttcaaaaaacatataatgaagccctggccagagtgcagagagctgtccagatggacgagctagttcctttaggagagctcacaaagcacagcacctccgccgtggatctgtccacatgctttgcccagatttcccacaccgcacgccagctggattggcccgacccagaggaggcattcatgatcacggtcaagttcgttgaagatacttgtaggttggcactggtctattgttcattgatcaaagcccgggctcgcgagcttagttcgggacagaaagaccagggacaggctgctaatatgctttgcgtggtagtcaatgatatggaacagctgcgccttgtgatcgggaaattacccgcgcagctggcttgggaggccctggaacagcgggtaggcgccgtattggagcagggacaacttcagaacacgctgcatgctcaacttcaaagcgcacttgccggcctggggcacgaaatcaggaccggggtccggactctcgctgagcagttagaggtaggaatagcaaagcacattcagaagctggtgggggtgagagagtcggtccttcccgaagacgcaatcttgccactaatgaagtttctcgaagtagagttatgctatatgaacaccaacctggtgcaggaaaatttctcttccctgctgacactcctgtggacacatactttgactgtgctggtagaggctgcggcctcccagagatcgtcatcacttgcctctaatagactcaaaatagcactgcagaatttagaaatttgctttcacgccgagggctgcggtctccccccaaaagcactgcacactgccactttccaggcccttcagagggatctggagttgcaggcggcatcctccagagagttgatccgtaaatacttctgttccagaatccagcagcaagctgaaactacatcggaagagctcggggcagtcacagtgaaggcctcttaccgcgcctctgagcaaaaattgcgggttgagctcctctccgctagctcattactgcctctggattccaatggaagttctgatccctttgtgcagctaaccctcgagcctcggcacgagtttcccgagctcgccgctagggaaacccagaagcacaagaaggatttgcaccctctgttcgacgaaacattcgagttcctggtcccggctgaaccctgtcgaaaggctggggcctgtctgctcctaaccgttctggactacgataccctcggggccgatgatttggagggagaagcctttctgccactgagggaggtgccgggcctgagcggaagtgaagagccgggtgaggtgccacagacccgcctgccgctgacttatcctgcgcccaacggcgacccgattcttcagctcctggagggcaggaaaggagacagggaagcccaggtcttcgtgcgcttgcgccggcaccgcgcaaagcaggccagccaacatgccttaagaccagctccttag

SEQ ID NO: 124332 - DNA, 2847 bp, synthetic construct
  misc_feature 1..2847: note = Description of Artificial Sequence: Synthetic coding sequence
  source 1..2847: mol_type = other DNA
atggaggagagaaagcatgagacaatgaaccctgctcatgtgctttttgatcgttttgtgcaggccaccacatgcaagggaaccttgaaggcttttcaagagctgtgtgaccaccttgaactcaaaccaaaggattacaggtcgttctatcacaagctgaagagtaagctgaactattggaaagccaaagccctgtgggcaaaactcgataagaggggatcgcataaggattacaaaaagggtaaagcttgtaccaacacgaagtgtctgatcattggtgcaggaccatgcggactcaggacagccatcgacctgagcctgctaggtgcaaaggtggtggtgatcgaaaagcgagacgccttttctcgtaataacgtactgcatctttggcctttcacaatccacgatttacgggggttgggtgccaagaaattttacggtaagttctgcgccggtgccattgaccacatttccataaggcagctgcagctgatcctactaaaagtagctctcatcctcggtatagagattcatgtgaacgtcgagtttcagggcctcatccagcctcctgaagatcaggaaaatgagagaatcgggtggcgggctttagtgcacccaaagacgcacccagtatcagagtacgaattcgaggttataataggcggtgatggacgacggaatacattagagggcttcagacggaaggagtttcgaggaaagttagccatcgcaatcacggcgaacttcattaacagaaacacaacagcagaggcgaaggttgaagaaatctccggcgtcgcttttatctttaatcaaaagttctttcaagaactccgcgaggcaacaggcatcgacctggagaatattgtctactacaaggatgatactcattatttcgtgatgaccgccaaaaaacagagcctcctggataagggtgtgatcctgcacgattatgccgataccgagctcctgttgtctagagagaatgtagatcaggaagcattgttgtcttatgctcgcgaggctgctgacttctccactcagcaacagctgccctcgctggatttcgcaatcaaccattacgggcagccagacgtagcaatgtttgacttcacctgcatgtacgcctcagaaaacgccgcgctggtccgtgagcaaaatggccatcagctattggtggcactggtaggggatagccttctcgaacctttttggcccatgggtactggcatagcccgaggcttcctcgccgccatggactcagcctggatggtgaggtcctggagccttggtaccagccccttggaggtgctcgccgagcgcgagtccatttaccgtctcttaccgcagacaacccccgagaacgtgtcaaaaaacttttcacagtattctattgatcccgttacacggtatcccaacattaatgtcaactttctcagaccgtctcaagtgcgccacctctacgacactggcgagactaaagacattcatctggaaatggagtccttagtgaactcccggaccacaccaaagcttacccgtaacgaaagcgtggcgaggagctctaagctgcttgggtggtgccagagacaaacagacggctatgccggagtgaacgtaacagacctgaccatgagctggaagagcgggctggccctttgcgccattatccacagatatcggcccgacctaatagactttgactctctcgacgagcagaatgtggagaaaaataatcaactggccttcgacatcgccgagaaagaactcggtatcagtcctatcatgacgggaaaggaaatggcttccgttggagaaccagacaagctctccatggtgatgtacctgacacagttttatgagatgtttaaagactccttgcccagttctgacactctagacctgaacgcggaagagaaagccgtgctcatcgcctccacacgctccccaatttcttttctgtcaaaacttggtcagacaatttcacgcaaacggagtcccaaggacaaaaaggaaaaggatttggacggcgccggaaaaagacgaaaaacatcccagagtgaagaagaggaggcaccccgcggtcataggggagagcggcccaccctcgtgtcaacgctcactgatcggagaatggacgtggctgtgggaaaccagaataaagtgaagtacatggctacgcagctactggccaagttcgaggaaaacgccccagctcaatcaatcggaatccgccggcagggctccatgaaaaaagaatttcctcagaatcttggcggatctgatacttgttacttttgtcagaaaagagtgtacgtgatggagagactgagcgcggagggcaaattcttccacagaagctgctttaaatgcgaatactgcgctacgactctgcgcctgtctgcttatgcctatgacatcgaggatggcaaattctactgtaaacctcactactgctaccggctctctgggtacgcccagaggaagcgtccagctgtggctcccctgagcggtaaggaggctaagggccctttgcaggatggtgcaaccacagatgctaatggccgggccaacgcagtggccagttctaccgaacggacacctggaagtggcgtgaacgggttagaagagccaagcattgccaagcgactgagaggaacaccggagcgaatcgaattggaaaactatcgactgagtctgagacaggccgaggcactacaggaagtgcctgaggagacccaggctgagcacaatctgtcttccgtgctcgacactggcgccgaagaggatgtagcctctaggtctgctaggcgtgccgctggtagacccccggccacacggccatag

SEQ ID NO: 124333 - DNA, 2901 bp, synthetic construct
  misc_feature 1..2901: note = Description of Artificial Sequence: Synthetic coding sequence
  source 1..2901: mol_type = other DNA
atggaggagcgcaagcacgagactatgaaccccgctcacgttttgtttgacagatttgtacaagcaaccacatgtaagggtaccctgaaggccttccaggaactttgcgaccatttggagctgaagcctaaagattaccgtagcttctaccacaagctcaaatccaagctgaactattggaaagcaaaagccctgtgggccaagctggacaagagaggatcgcacaaagactacaagaaaggcaaagcctgtacaaacacaaaatgcctgatcatcggagctggcccttgcggtctgagaacagcgatagacttgtcgctgttaggcgcaaaggtcgtcgttattgaaaaaagggacgccttctcacggaataacgtcctccacctgtggcccttcaccatccacgatctgcgcgggctaggagcaaaaaagttttacgggaaattttgtgctggagcaattgaccacatatccatcaggcagctgcagcttatcctgcttaaagtggcactgattctgggcattgagatccatgtgaacgtcgagtttcagggactgatccaacctccagaagatcaagaaaacgaacgcatcggttggcgagccctggtccaccccaaaacacaccctgtttccgagtatgaatttgaagtgatcatcggaggagacggtaggcgcaacaccctagagggcttcagacgcaaagagttccgcgggaaacttgcgattgccatcactgcaaatttcatcaataggaatactacagccgaagctaaggtcgaggaaatttcgggagttgcattcatcttcaaccagaagttcttccaagagctgcgcgaagcaacggggatcgacttggagaacattgtgtattacaaagatgacacacattacttcgtgatgaccgccaaaaagcagtctcttctcgacaagggcgtcatcttgcatgattacgccgacaccgagctcctgctctcacgggaaaacgtagatcaggaggccctactcagttatgctcgggaggcagctgatttttcaactcaacaacagctgccatccttagatttcgcaatcaaccactatgggcagcctgacgtggctatgtttgacttcacttgtatgtacgcctccgaaaatgcggcactagtgcgggagcagaatggacatcagttactggtggctctggtgggcgatagcctgctcgaacctttttggcctatgggaaccgggattgcccgaggcttcctcgcagccatggactcagcctggatggtcagaagctggagtctgggcacgtctccgctagaggttctcgccgagagggagagcatctaccgcttactgcctcagaccaccccagaaaatgtgtctaaaaacttctcgcagtactccatcgatcccgttacgcggtatcctaacatcaacgtcaactttctaaggccatcacaggtgcgacatttatatgataccggcgagaccaaggatatccatttagaaatggagtctttagtgaatagccgcactacaccaaaactgacgagaaacgagagtgtcgcaaggtcctccaaactcctggggtggtgccagcgacaaaccgacgggtacgccggggttaacgtgaccgacctgacaatgagctggaagtccgggttggccctctgtgccatcatccacaggtatcggcccgatctcatagacttcgacagtctcgatgaacaaaatgtcgaaaagaataaccagctcgcgtttgacattgccgagaaagagcttggaatctctccaatcatgacgggaaaggagatggctagtgttggcgaacctgacaaactgagtatggtcatgtacctgacccagttctatgagatgtttaaggactccctaccaagcagcgatacactggacttgaatgctgaggagaaggccgtgctgatagcgtctaccaggtcacccatctcatttctgtctaaactcggccagactattagtcgcaaacgctccccgaaggataagaaagagaaggacttagatggggccggcaaaagacgcaaaacctctcagagcgaagaggaagaagcaccacgcggacataggggcgagcggcccacactggtaagcaccctaaccgatcgacgcatggatgttgcagttggcaaccagaataaagttaagtatatggccacccagctgctggcaaaattcgaagagaacgcccccgcacagtcaatcggaatcaggagacaaggcagcatgaaaaaagaattcccacagaacctggggggtagcgacacatgttatttctgccagaaaagggtttatgtaatggaacggttaagtgccgaaggcaagttttttcaccgctcctgtttcaagtgtgagtactgcgccactacactcagactgtccgcctatgcctacgatattgaggacggtaagttttactgtaaaccacactattgttatagactaagcggctacgcccagaggaagagaccagcggtggctccactatcgggtaaggaagccaagggccctctgcaggacggtgccaccaccgacgccaatgggagagctaatgcagttgcctcgagcacagagcgcacgccagggtctggagttaacgggctcgaagaaccatctatagccaagaggctaagaggcactcctgaaaggatagagcttgaaaactaccgcctttctctcagacaagcagaggccctgcaggaggtgcctgaggagacgcaagccgagcacaaccttagcagcgtcctggatactggggcagaggaagacgtggcctcacgagattgggtgtcgccctggctccctaggatggttagcaactcttgggcccaaatgattcaccccccacagccaccaacagtgctgggaagccagatgtag

SEQ ID NO: 124334 - DNA, 4713 bp, synthetic construct
  misc_feature 1..4713: note = Description of Artificial Sequence: Synthetic coding sequence
  source 1..4713: mol_type = other DNA
atgtctgactccctgtggacggccctgtccaactttagcatgcctagcttcccgggaggctccatgtttcggaggacaaaatcttgccgtacctccaatcgaaaatcgttgatcttgacatctacgtcaccaactctgcctaggccgcacagtcccttgccgggccacctgggctcaagcccgctagacagtcctagaaacttctctccaaatacacccgcacatttcagcttcgcgtcttcaagacgtgcagatggacgacgatggtccctggccagcctaccatccagcggttacggaactaacacgccttcaagcactgtctcgagctcttgctcttcccaagagaggctgcaccagctcccttaccaacctaccgtggacgaactgcacttcctgagcaaacacttcggctctactgagtccatcaccgatgaagatggaggccgaaggtcacctgccgtgcgtcccaggagcagaagcctgtcccctggaagatccccatccagctacgacaacgagatcgtgatgatgaatcacgtgtacaaggaaagatttcccaaggccacggcccagatggaggaaaaacttagagatttcactcgtgcatatgagcccgactctgtcttgccactggccgatggagtcctaagtttcattcatcaccagataattgagttggcccgggattgtctaactaaaagcagagatggcttgatcaccaccgtttacttctatgagcttcaggagaacctggagaaactattgcaggacgcgtatgagaggagtgagtctctagaagtcgccttcgtgactcagttagtgaaaaagttactcatcatcatttcaagaccagctcgcctgttagaatgcctcgaattcaatcctgaagagttctaccaccttctggaggccgccgaaggccacgctaaggaaggacacctggttaagacggacattccacggtatatcattaggcagctcgggttaactcgcgacccttttccagatgttgttcacctggaggagcaggattcaggtggctccaatactcctgagcaggatgacctgagtgagggaagatcttcaaaggccaagaagccccccggagagaatgactttgacaccattaaattgattagcaacggcgcatatggcgcagtctacttggtgagacacagagataccaggcaacgctttgcaatgaagaagatcaacaaacagaacttaatcttacgtaaccagattcagcaagcctttgtggagagagacattctaaccttcgcagagaacccctttgtggtaggaatgttctgtagctttgaaacaagacgccacttgtgtatggttatggaatatgtggaaggtggagattgcgctaccctgctgaaaaacattggcgcactgccagtggagatggcgcggatgtattttgcggaaaccgtgcttgccctagagtatttgcataattacgggatcgtccacagagacctcaagccagacaaccttcttatcactagcatgggacacatcaaactgactgattttggcctcagcaagatgggactcatgagcctcacaacaaacctgtacgaaggtcacatcgagaaggacgcacgggaatttctcgataagcaggtttgcggcacccctgagtatatcgctcctgaggtgatactccgccagggttatggaaagcccgtggattggtgggctatgggcattatactgtacgagttcctggtgggatgcgtgcccttctttggcgatacccctgaggaactctttggccaggtgatcagtgatgacatcctttggcccgaaggcgacgaggccctccccaccgaagcacagcttctcattagctccctgcttcagaccaaccctctcgtgaggctcggtgcgggcggcgcctttgaggtgaagcaacatagtttctttagggacctggactggactgggcttcttcgccagaaggctgaattcattccacatctggagtcagaagatgatacctcttacttcgatacacgttctgaccggtaccatcatgtcaatagctatgacgaagatgatactaccgaggaggagccagttgaaatccggcagtttagcagctgttccccacggttttctaaagtttactcctctatggagcaactgtcgcagcatgaacccaagacaccggtggctgctgctggttcctccaagcgagagccgtcaactaagggccctgaagagaaagtcgcaggaaaacgcgagggactgggcggcttgaccctgcgggaaaagacatggagaggcggctctcctgaaatcaagagattcagcgcaagcgaggccagctttctcgagggcgaagcctcccccccattgggtgcccgtagacggtttagtgcgcttctcgagccttcaaggtttagtgccccccaggaagatgaagatgaggcccggttgagaagacctcccagaccgtcatccgatccagccggctcattagacgcaagagccccaaaggaagaaacacaaggcgagggcacctctagcgcaggcgattctgaggcaaccgaccgccctcgtcccggggatctgtgtcccccatcaaaagatggcgacgcaagcggccccagggccacgaacgatttggtcctgcggcgtgctcgccaccagcaaatgtccggagacgttgccgtagagaagcgaccttcgcgcactggtggcaaggtgataaaatctgcatccgccactgcgctctccgtcatgatcccagcagtggacccacacggttcgtcccccctggccagccccatgagtcctcggagcctgagctcgaacccatccagtagggactccagcccttctagggattacagccctgcagtgagtggcctgaggtcccccataaccatccagaggagtggaaagaaatacggatttaccctccgggcaatcagagtgtacatgggcgatactgacgtatattctgtgcaccacatcgtctggcatgtggaggaagggggcccagcccaggaagctgggctctgcgcgggcgacctaattactcacgtgaacggcgaacctgtacatgggatggtccacccagaggtcgtcgaattgattctgaagagtgggaataaggttgccgtgacgactaccccatttgagaatacttcaatacgtatagggcccgcacgtagaagcagctacaaggctaagatggcgcgtaggaacaagagaccatcagcaaaggaaggacaggaaagcaagaaacgtagcagtctgtttcgaaagataacaaaacaatctaacctattacatacaagtagaagcctgtcgagtttaaaccgcagtttgtcctcttctgattcactgccgggatcgcccacacacggcctccctgctcgatcacccacacacagttatcgctccactccagactccgcctacctgggcgctagctcacaatcctctagtcctgctagcagtacccccaactcaccagccagtagtgcctcccatcacattcggccttctaccctccacggactgtcacctaaactgcaccgccagtatcggtctgcacgatgtaagtctgccgggaatatccccctcagccccctcgcgcacactcccagcccgacccaggcctctccgcccccactccccggccataccgtcggtagcagtcacacaacacagagtttccccgctaagctccacagttcgccaccagtggttcgaccccggcctaagtccgcagaaccacccaggtctccattgctgaagagagtgcagtccgctgagaaactgggagcatccctttctgccgacaagaagggagcactgcggaaacattctctcgaagtcgggcatcctgatttcagaaaagattttcatggcgagctggccctgcattctctggcagagagtgatggcgagaccccacctgttgaggggcttggtgctccgagacaagtggctgtgcgccgcttagggagacaggagtcaccactctccttgggggcggatccattgcttcccgaaggcgcatcccgacctccagtttccagcaaggagaaggaaagccctgggggggctgaggcatgcactcctccgcgcgccacgacccccggtgggcgaacgctggagagggatgtgggatgtactcgacaccaatccgtccaaactgaagatggtaccggggggatggcaagggcagtcgcgaaggccgccttgtcccccgtgcaagaacacgaaacaggtcggaggtcaagctccggggaagcaggcactcccctggtccctatcgtcgtggaacctgctcggccgggcgctaaagccgtggtcccccagccattaggcgcagactcgaagggacttcaggagcctgcgccgctggccccctcggtgcccgaggcccccagaggaagggagcggtgggttttggaggtggtggaggaaaggaccaccttgtccggcccaagaagcaagccagcctcaccaaagttgagccctgaaccccagacgccaagcttggctccagcgaaatgctccgcgccatcgtccgctgtcacaccggtgccccccgctagccttctcggtagcggaactaagccacaggtggggctgacatccagatgcccagccgaagccgtgccccctgcaggactgacaaagaaaggcgtgtcctctccggctccgcccggaccttag

SEQ ID NO: 124335 - DNA, 2178 bp, synthetic construct
  misc_feature 1..2178: note = Description of Artificial Sequence: Synthetic coding sequence
  source 1..2178: mol_type = other DNA
atgtcggattccctctggaccgcattatcaaacttttccatgcccagtttccccggggggtccatgttcaggcgaactaagagttgtcggaccagtaaccggaaatcattaattctcaccagcacttcccctacactgcctagaccacactcacccctcccgggccacctggggtctagtcccctggatagcccaaggaatttctccccaaataccccagcccatttcagcttcgcctctagcaggcgtgcagatggaaggagatggtccttagccagccttccttcatcaggatacgggactaatacaccatcctcgactgtctcatcaagttgttcatctcaggagcgcctgcaccagttgccctatcagcctactgtcgacgagctacacttcctgtccaaacacttcggatctaccgagtccatcactgatgaggatggcggccgtcgatcccctgccgtgcggcctcgttcccgttcactgtctcctggacgctctccaagcagttacgataacgagattgtcatgatgaatcacgtgtacaaagaacggttccctaaagccacggcacagatggaggagaaattgcgggacttcactcgggcctacgaaccagatagcgttctgcctctggcagatggagttttaagtttcattcaccaccaaattatcgagcttgcacgagattgcttaaccaagtcaagggatggcctaattaccaccgtgtatttttatgagctgcaggagaacctcgagaagttgctgcaggatgcatatgagaggagcgagagcctggaggtagcattcgtgactcaactcgtgaagaaactactgattatcatttcacggcccgctcgccttctggagtgcctcgaattcaaccccgaggagttctatcatttgcttgaagctgcggaagggcacgcaaaggagggtcatcttgttaagacggacattcccagatacatcatcaggcagctagggcttacgagagacccattccccgatgtcgtgcatctcgaggaacaggactcaggcggatcaaacacccccgaacaggatgatcttagcgaggggagaagctccaaggccaagaagcctccaggtgaaaacgattttgacactatcaagctaatttctaatggcgcctacggtgcagtctacctagttcgccatagggataccagacagaggttcgctatgaagaaaatcaataaacagaacttgatcttgaggaatcagatccagcaggcgttcgtcgaacgtgatattctaacgtttgctgagaatcctttcgtagtgggaatgttttgttctttcgagaccaggcgacatctttgcatggtcatggaatatgttgagggcggcgattgcgcaactttgttgaagaatatcggagccctcccagttgagatggccaggatgtatttcgcagaaacagtacttgcactggaatatctgcataattacggtatcgtccatagggacctcaaaccagataacctgctgatcacgtcaatgggacacattaagctaactgactttggcctatcaaagatgggactgatgagtttgacaaccaatctttatgaaggacacatcgagaaagacgctcgcgagttcctggataaacaggtctgcggaactcctgaatacattgctcctgaagtgatactccggcaggggtatggtaaacctgtggactggtgggccatgggaataatcctgtacgagtttctggttggctgcgtgccttttttcggggacactccggaggagttatttggccaggttatatccgacgatatcttatggccagaaggagatgaagctttgcccaccgaagctcagctgttaatttcctccctgttgcagaccaatcctttggtgcgcctcggcgccggcggcgcctttgaggtgaagcagcacagttttttcagagacctggattggactgggctactgagacagaaggcagagttcatcccgcacctggagtccgaagacgacaccagctattttgataccaggagtgacaggtaccatcatgtgaattcctatgatgaggacgacaccaccgaagaggaacctgttgaaatccgccaattcagcagctgttctccacgttttagtaaggtttattccctccggatccatatgtatacttataagtag

SEQ ID NO: 124336 - DNA, 5397 bp, synthetic construct
  misc_feature 1..5397: note = Description of Artificial Sequence: Synthetic coding sequence
  source 1..5397: mol_type = other DNA
atgaaacgcagccggtgccgagatagaccacaaccccccccaccagataggcgcgaagatggcgtgcagcgcgctgctgagctgagtcagagtctgccaccgcgccgacgggcccctcctgggaggcagcgcctagaggaacgcaccggccccgccgggccagaaggaaaagaacaggacgtcgtgactggggtgtctccgttgctgtttaggaagctgtccaaccctgatatcttctctagcacgggtaaggtgaaactgcagcgtcagttatctcaagatgattgtaagttgtggcgcggtaacctggcatctagcttgtcagggaaacagttgttgccactgtcatcctccgttcacagtagcgtgggccaggtgacgtggcagagctccggcgaggcctcaaatctggttcggatgcgaaaccagtctcttgggcagtctgccccctcccttaccgctggactgaaagagttgtccctgccacggcggggtagcttctgcaggacttccaatcgaaagtccctaattgtaacatcaagtactagccccaccctgccccgaccccactccccactgcacggtcatacggggaactcacctctggatagtccccgtaatttctctcccaatgcccctgcccacttttcctttgttccagcacgccgaaccgatggacggcgatggtcgctcgcctctttgcccagctcgggttacggaacaaatacccccagctccactgtctcatcttcttgttccagccaggagaagctccatcagttaccctttcagccaaccgccgacgagctgcactttctaactaaacacttttctactgagtcggttcctgacgaggagggacggcaatccccagccatgcgacctaggtccaggagcctgtcacccggccgctcacctgtgagcttcgactcagaaattataatgatgaatcatgtctataaggagcgattcccgaaggccacagctcagatggaggaacgtcttgctgaatttataagctccaacaccccggattccgtactgccccttgcagacggagccctgtcgttcattcatcatcaggtgattgagatggcgcgggactgcttggacaagtccaggtcgggattgatcactagccagtacttttacgaattacaagacaatctggagaaactgctgcaggacgcccacgagagatcagaatcaagtgaagttgcttttgtcatgcaacttgtcaaaaaactaatgattataattgccagaccagctagactgctggagtgccttgagttcgacccggaagagttttatcacttattggaagccgccgaaggccacgccaaggaaggtcagggaattaaatgcgatatcccccgatatatcgtgtctcagctggggcttactagagacccgttggaggaaatggctcagctttcttcctgcgactcccctgataccccagagaccgacgactcaatcgagggacacggcgcaagtctgcccagtaagaagacccctagcgaggaggacttcgagaccatcaagttaataagcaacggcgcctacggagccgtcttcctagtgcgccacaagagcacacgacagagatttgccatgaagaaaattaataagcagaacctgatcctgaggaatcaaatccagcaagcctttgttgaacgtgacatcctcacatttgcagagaatccttttgtggtgagcatgttctgtagctttgacacgaaacgccatctatgcatggtgatggagtacgtggaagggggagactgcgcaacattgctgaaaaacattggggcactgcctgtagatatggtgagactttactttgccgagacagtcctggcgcttgaatatttgcacaactatggcattgtccatcgggacctgaaaccagacaacctcctgataacaagtatgggtcacatcaaactgaccgattttgggctgagtaaaattggactcatgagtctcacgaccaatctttacgaaggccacattgagaaggacgcccgcgaatttctggataaacaagtctgtggaacgcccgagtatatcgcgccggaggtaatcttacgtcagggatacgggaagcccgtcgactggtgggccatgggcatcatattatatgagtttctggtgggatgtgttccattttttggggacacaccggaagagctttttggtcaggttatttcggatgagatcgtctggcctgagggtgatgaggctcttccccccgatgcgcaagatctaacctccaaactgcttcaccagaaccctctggaaaggctgggcactgggtctgcttacgaagttaaacagcacccatttttcactggcttggattggacgggtctgctgcgacagaaggccgagtttattcctcagctggagtctgaagacgataccagctacttcgatactcgatcagaacggtatcatcatatggatagtgaggatgaagaggaagtgagcgaggatggatgcctggagatccggcagttcagctcctgttcgccacgatttaacaaggtgtacagtagcatggaacgcctgagccttttagaggagcgccgcacacccccaccaacgaagcggagcctgagcgaggaaaaggaagaccattcagatggtctcgctggtctgaagggcagggacaggagttgggttattgggagcccagagattctgagaaagcgcctaagcgtttccgagagcagccacactgagagcgactcctcccctccgatgactgtaagacgcagatgtagtgggctgttggatgccccccgttttcccgaaggccccgaggaggcgagtagcactctgcgaagacaacctcaagaggggatttgggtgttaactccaccaagtggtgagggagtctccggtccagtcacggagcactccggggaacaaaggccaaaattggatgaagaagctgtggggcgttctagtgggtcctctcctgctatggaaacacgcggacggggtacaagtcagctcgccgagggcgcaactgccaaggcaataagcgatctggcagttaggcgggcccgccataggctcttatcaggagactccaccgagaaaaggacagctcgtccagtgaataaggtgattaagagcgcaagcgccacggcacttagtcttctcattccatcagaacaccatacttgctcccctttggcaagtcccatgagtccacactcccaaagcagcaacccctcctctcgggatagtagcccttccagggactttctacccgccttgggctcaatgcggccgcccatcattatacacagggcagggaagaaatatgggttcacgctcagggctatcagagtatatatgggagacagcgacgtgtacactgtgcaccatatggtgtggcacgtcgaggacggcgggcctgcttccgaggccggattgcgacagggcgatctgatcacccacgtgaatggagaaccggtgcatggactggtccatacggaagtcgtagagctgatcttaaagtctggcaacaaggtggctatctcaaccacccctttggagaatacatcgataaaagtcggcccagcaaggaagggcagctacaaggccaagatggctaggcgcagcaagcgaagcagagggaaggacggacaagagagccgcaaaaggagcagcctatttaggaagatcacgaagcaggccagcctcctccacacctcaaggtcattgtccagtttgaataggagcctctcaagtggtgagtcaggccctggatctccaacccactcacacagcttaagcccacggtccccaactcaagggtaccgggtcaccccagatgccgttcacagcgtgggcggcaattccagccagagctctagccctagcagttccgttccaagtagtcccgccggctccggccatacacggccatccagcctccacggtttagctcctaagcttcagaggcagtacaggtctcctcgtcggaaatctgctggtagcatacccttgtccccactggcccacacaccatcaccacctccccccacggcctccccccaacggagcccttcccctctgagtggtcatgtcgctcaggcctttcctacaaaactgcatttatcaccacccctgggacgccaactaagccggcctaaaagcgctgagccaccccggagccccctattgaaacgcgttcagagcgctgagaagctcgctgccgccctggccgcatctgaaaagaagctcgctactagccgcaaacatagcctcgatctgccccacagcgagcttaagaaggaactgcctccaagggaggtttccccattggaggtggtcggcgccaggtcagtcttatccggaaaaggtgccctgcctggaaagggtgttttacagcctgccccaagccgagccctgggcacgcttcggcaagaccgagcagagagaagggagagtttacagaaacaggaggccatccgggaggtggatagctctgaagacgatacggaggagggcccagagaattcccagggtgcccaggagctcagtctggcaccacacccagaggtttctcagagcgtggctccaaagggggcgggtgagagcggtgaggaagacccgttcccatctagagatcctcggtcgctgggccccatggttcccagtctccttaccggtatcacactcggcccgccacggatggaaagccccagcggtccacacaggcgattaggcagcccccaagcgatcgaagaggccgcctcatcttcaagcgcgggaccgaatctggggcagagcggggccactgaccccattccacctgaaggatgttggaaagcacagcacctccacacacaggcgctgacagcattgtctccttcaacgtctggtctcacacccacatcatcgtgctctcccccttcatccacctctggcaaactgagcatgtggtcttggaaaagcctgattgaaggccctgaccgggccagcccttcaagaaaagcgaccatggctggcggattggcaaatttgcaggaccttgaaaacaccaccccagcgcagcccaaaaatctgtcaccaagagagcagggcaagacacaacctccgagtgcgccgcggttggcccacccgtcatatgaggacccctcgcagggatggctgtgggaaagcgaatgtgctcaggccgttaaagaggatcccgcattatcaattacccaggttccagatgccagcggagacaggaggcaggatgttccctgccgggggtgccccttaacacagaaatcagagccttccctccgacgaggtcaggaaccaggcggacatcaaaaacaccgtgacctagccctggtgcccgatgaactcctcaaacagacttag

SEQ ID NO: 124337 - DNA, 2379 bp, synthetic construct
  misc_feature 1..2379: note = Description of Artificial Sequence: Synthetic coding sequence
  source 1..2379: mol_type = other DNA
atgttttcccctacatcagctcccgcattgtttcttacaaaggtacccttttccgcagattgcgctctggcaactagcccacttgctatcttcctcaacccccgagcccatagttccccgggaaccccatgttcctcaagacctcttccttggtcatgtcgaacgtctaatcgaaaatcgctcatagtgacatctagcaccagcccaaccttgccaaggccgcactctcctctacatggtcataccggcaatagccctctggacagtcccagaaacttcagcccgaatgcccccgcacactttagcttcgtgcccgctcgacgtacggatgggcgacggtggtcactcgcatccttgccttccagcggttatggcaccaatacaccatcatcaaccgtgagttctagttgttcttctcaggagaaattgcatcagctgcccttccagcctacagcggacgagttgcattttctgacaaagcacttttctacagagtctgtcccagacgaggaaggccggcagagtccagccatgcgaccaagatcacggtcactctctccagggaggtccccagtctccttcgattccgagatcataatgatgaatcacgtttacaaggaaagatttcctaaggcgaccgcccagatggaggagagactggccgagtttatttcctcaaatacaccggatagcgtcctccccctcgccgacggggctctttcattcattcatcaccaggtcatcgagatggctagggactgcctagacaagtcaagatcaggtctcattacctcacaatacttctatgagctgcaggacaatctggaaaagctgttgcaagacgcccacgagcggtcagagtcaagtgaagtagccttcgtgatgcagctggtgaagaagttgatgattataatcgcaaggcctgcccggttgcttgaatgtctagagttcgaccctgaggagttttatcacttactcgaggccgctgagggtcacgcaaaagagggccagggcatcaaatgcgacatcccccgatacattgtcagtcagctcggcttaactcgcgaccccctagaagaaatggctcagctcagctcctgcgatagcccagacactccagaaacagatgactcaatcgaagggcacggagcctctttacccagtaaaaaaacaccgtcagaagaggacttcgagacaattaagctgatctcaaatggggcctatggagccgtgttcttggttagacacaaatctaccaggcaaaggttcgctatgaagaagattaacaaacagaaccttatcttacgcaatcaaatacagcaggcatttgtggagagagatatcttaacatttgcagaaaatccattcgttgtttcaatgttctgcagcttcgatacgaaacggcacctgtgtatggtgatggaatacgttgagggtggggactgcgccactttactcaagaatattggagccctgcctgttgacatggtgcggctttacttcgccgaaactgtcttggccctggaatacttacataactacgggatcgtacacagagacctcaagccagataatctcctgattacttctatgggccatatcaaattaaccgatttcgggctgtctaaaatcggtcttatgagtttgacaacaaatttgtacgagggccatatagagaaggatgccagggaattcttggataaacaggtgtgtggcacacccgagtacattgcaccagaagtcatcctaaggcagggatacggtaaacctgtggactggtgggctatgggaatcatactgtacgagtttctggtgggctgcgttcccttttttggagatacaccagaggagttgttcggccaggtcatcagcgatgagatagtctggcccgaaggcgatgaggcactgccccccgatgcgcaggacttgactagcaaactgttgcatcagaatcctcttgaaagactgggtacaggctctgcatacgaggtgaaacagcatcccttttttacgggactggactggaccggactgttgcgccagaaggctgaatttattcctcagttggaaagcgaagacgacaccagttatttcgacacaaggtccgagcgctaccatcatatggacagtgaggatgaggaggaggtttcagaggatggatgcttggagatccgtcaatttagctcttgcagtccaagatttaacaaggtttactcatcaatggaacgcctctcactactcgaggagcggaggactcctccacccacgaagagatctctgtcagaggaaaaagaggaccattctgacggcttggccggcttgaaaggaagggaccggtcctgggtgattggaagtcccgaacatcacccctcagcctag

SEQ ID NO: 124338 - DNA, 4827 bp, synthetic construct
  misc_feature 1..4827: note = Description of Artificial Sequence: Synthetic coding sequence
  source 1..4827: mol_type = other DNA
atgaaacggtcacggtgcagggatcggccacagcccccaccccctgataggagggaagatggcgttcagcgcgccgcagagttgtctcagagtctccccccacggagaagggcccctcctgggcgccagcgccttgaggagcgaacaggaccagcaggtccagaaggcaaggaacaggatgtggtaacaggcgtgagtccactgttattccgaaaattgtctaatccggacatcttttcctccaccgggaaagtgaaactgcagcgccaactcagtcaggacgattgcaaattgtggagagggaatctggcatcatcattgagtggtaagcagctgctgccattgtcatctagtgtgcattcctccgtgggccaggtaacatggcagagctctggggaggcaagcaatttggtcagaatgaggaaccagtccctgggacagtctgcgccatctctcacagcggggctgaaggaattgtcgctacctaggcgtggcagcttctgtcggacaagtaaccgaaaaagtcttatcgtgacatctagtaccagtcctaccctgcctcggccacacagtcctctgcacggccacaccggcaacagccctctggacagtccccggaacttctctccaaatgccccagcccacttctcattcgtgcccgctaggcggactgacggtcgccggtggtcactggcttcccttccttcctctggatacggtaccaacaccccctcgtccactgtttcttcctcttgctccagtcaggaaaagctgcatcagcttccattccagcctactgccgatgagctccacttcctgaccaagcacttctcaaccgagagcgttccagacgaagaaggacggcaatcccctgcaatgcgacccaggtctagatcactctcaccaggccggtccccagtatccttcgacagtgaaatcatcatgatgaaccatgtgtataaggagcgattccccaaagcccacgaacgcagtgaatcaagcgaggtggcatttgtgatgcagctggtcaagaaactcatgatcattattgcgaggccagcccggttactggaatgcctggagttcgaccctgaggagttctatcatcttctggaagcagcggagggacatgcaaaagaagggcaagggatcaaatgtgatatcccacggtatattgtgtctcagctcggactcacgcgcgacccgctggaagaaatggctcaacttagttcctgcgactcacctgacacccccgagacagatgatagtatcgagggccatggcgcgagccttccctcaaagaagacaccatccgaagaggactttgaaacaatcaagctcatatctaatggcgcctacggggcagtttttcttgtgcggcacaagagtacaagacagcggtttgctatgaagaagattaataagcagaatttaattctgaggaatcagatccagcaggcctttgtcgagcgagatattcttacctttgctgagaaccccttcgtggtgtccatgttttgttcctttgataccaaaagacacctgtgtatggtaatggagtacgtggaggggggtgactgcgcaaccctgttgaagaatatcggtgcattacccgtcgacatggtgcggttgtacttcgcagaaaccgtccttgcattggagtacttgcataattatggcatagtgcatcgcgacttaaaacctgataacctactaattaccagcatgggccacatcaagctgaccgactttggcctctcaaagattgggttaatgagtctgaccacgaatctgtatgaaggacatattgagaaagatgcacgggaatttctggataaacaagtgtgcgggactccagagtacatcgctcctgaagtcattctgaggcagggttacgggaagcctgttgattggtgggccatggggatcatcttgtacgagtttctcgtggggtgtgtgccattctttggggacacacccgaagagctcttcggtcaagtcatctcagacgaaatcgtgtggccagagggagacgaggctctgcccccagacgcccaggatctgacctcgaagctcctccaccagaacccactggagcggcttgggaccggcagcgcctatgaggtaaaacagcacccctttttcactggcttagattggacaggccttctgaggcagaaagctgaatttatccctcagttagaaagtgaggacgacacatcttatttcgacaccaggtccgaacgctatcatcacatggatagtgaagatgaagaagaagtctctgaggacgggtgcttagagatccggcagttctcaagctgctcccctaggttcaataaagtatactctagtatggaacgtctgtcactcctggaagagaggagaactccacctcccaccaaacgatctctgtccgaggaaaaggaagaccattcagatggactggctggtcttaaagggagggaccgaagctgggtcattggttctcccgaaatcctgaggaaacgtctgtccgtttctgagtcatcacacacagagtctgactctagccccccaatgacagtgaggcggcggtgctcggggctgctcgatgctcccagatttccggagggcccagaggaggccagcagtaccctgaggagacaacctcaagaaggcatatgggtattaacaccacctagtggggaaggggtgagcggtcctgtgaccgagcacagtggtgagcagagaccaaagctggacgaagaggccgtagggcggtcttccggctcctctcccgctatggagacacggggaagggggacatctcagctagccgaaggagctacagctaaggccatctcagatcttgctgtgaggcgcgcgcggcaccgcctcctttcaggagactccactgagaagcgcaccgcccgcccagtgaacaaggtaataaagagtgcatccgctactgccctgagcctgttgatccccagcgaacaccacacgtgtagccccctggcttctcctatgagtccacacagccagtcttcgaacccatctagccgtgattcctccccttatggattcactctcagagcaattcgcgtgtatatgggggactctgatgtgtacacagtacaccatatggtatggcatgtagaggacggtggtcctgcttcagaagctggcttgcgtcaaggcgacttaattactcacgtgaacggggagcccgttcatggacttgtgcataccgaggtcgtcgagctaatcctgaagtccggaaataaagtggccataagtacaacaccactcgagaatacctctatcaaggtgggccccgccaggaaaggatcttataaggcaaagatggcaaggcgcagcaaacggagcagaggaaaagatggtcaagaatctcgcaagcggagctccctctttcgtaaaattaccaagcaagcgtctctcctgcatacgagcaggtcactctccagtctcaacagatcactgagctctggtgagagcgggcctggcagccctacccacagtcacagtctttcgccacgatctcccacccagggatatcgggttacccctgatgccgtgcactcggagctgagtagacccaagtcagcagaacctcctagaagccccttgttaaaaagggtccagagtgccgagaaattggccgccgcgctggctgcctctgagaaaaagttggccacgtcacgcaagcactctctggacctgcctcattcggaactgaagaaggagctccctccccgggaggtcagtccgctcgaagtagtgggagcaagatccgtgctctctggaaagggagccctgccaggcaagggcgttctgcagcccgctccaagtagagcacttggcacattgcgacaagaccgtgctgagaggcgagagagccttcagaaacaagaagccattagagaggtcgactcttccgaggacgacacagaggaaggtcccgagaattcccaaggcgcccaggagctgtccctggctccacatcctgaagtgagtcagagtgtggcacccaagggcgcaggcgagtccggggaggaagacccattcccgagtagggatcctagatccttaggccctatggttccgtctctgcttaccgggattacgctaggcccacctcggatggaaagtcccagtggcccacaccgccgactggggagtccacaggccattgaggaggcagctagctcttcttccgccggacccaacctaggacaatccggggccacagaccctattccccctgagggatgttggaaggcacagcacctacacacgcaggcgctcactgccctgtccccttctacatctggactcacgcctacatccagctgtagccctcctagcagcacctctggcaaattgtctatgtggagttggaagtccttgattgaaggcccagatcgggcaagccccagtaggaaggcaactatggcgggggggctcgcaaacttgcaagacttagagaacactacccctgctcagccgaagaacttgtcccctcgggaacagggcaaaacccaacctccaagcgccccacgactggcccacccaagttacgaagatccgtcccaggggtggctgtgggagagtgagtgtgcccaggccgtgaaagaggaccccgcactcagtatcacccaagtgcccgacgcatcgggggaccgccggcaggacgtgccgtgtagaggttgtccactgactcagaaaagcgagccctctctgagaagaggccaagagccagggggccatcaaaaacatagggatctggcactggtacctgacgagctgcttaaacagacttag

SEQ ID NO: 124339 - DNA, 1893 bp, synthetic construct
  misc_feature 1..1893: note = Description of Artificial Sequence: Synthetic coding sequence
  source 1..1893: mol_type = other DNA
atgagacccagatcacgtagtttgtcaccaggacggagtcccgtaagttttgatagcgaaatcatcatgatgaatcacgtgtataaagaaaggttcccgaaggctacagcccagatggaagaaagattggctgagttcatatccagtaatacccccgactctgtcctgcctctggccgatggcgccttgtcatttattcaccatcaagttatcgaaatggctcgggactgtctggataagagccgatcgggcctgatcacatctcagtacttttacgagcttcaggataacctggagaagctccttcaagatgaattcgatccggaggagttttaccatctcctggaggcagccgaagggcacgccaaggagggacagggcattaaatgtgacatcccgaggtatattgtgtcccaactcggcctgacacgagatcccctcgaagagatggcgcagctgtctagctgtgactccccggatactccagaaactgatgactcaattgaaggacatggtgctagtctgccttctaaaaaaaccccttccgaagaggacttcgaaaccatcaagttgatctctaacggagcctatggcgccgttttcctcgtgaggcataagagcactaggcaacgctttgccatgaaaaagatcaacaagcagaatctcatcctgcgaaatcagatacagcaggctttcgtggagcgggatattctcactttcgccgagaaccccttcgtcgtcagcatgttctgttcattcgacaccaaaagacatctgtgtatggtgatggagtacgtggaaggtggcgattgtgctactctcctgaaaaacatcggcgctctgcccgtcgacatggtgagactctacttcgcagaaaccgtgctagccctggagtatctgcacaattatggtattgtgcacagggacttaaagccagataacctcttgatcacaagcatgggccacatcaagctaacagacttcgggctctctaagatcggtctcatgagcctcactacaaatctgtacgaaggccacatcgaaaaggacgcccgcgaatttttggataagcaggtgtgcggcacaccagagtatatcgcacctgaggttattctgcgccagggctacggaaaacctgtggactggtgggccatgggcattatattgtatgagttcttggtcgggtgcgtaccattcttcggagacactcctgaggaactgttcggccaggtgatcagtgatgagattgtgtggcctgaaggtgatgaagctctaccccctgacgcccaagaccttacatcaaagctgttgcaccagaatccacttgagcgactgggcacgggatcagcctatgaggtcaaacagcatccgttcttcacgggtctagactggactggcctacttaggcagaaggcagaattcattccccagcttgaaagcgaagatgacacatcttactttgatactcgctccgagcgctaccaccatatggacagcgaggatgaggaagaagtttcggaggacgggtgcctcgagatccgtcagttcagcagctgctctccacggtttaataaggtctattccagcatggaaaggctgagtttgctagaagagcgaagaacaccgccccccaccaagagatctttatctgaggagaaagaagaccatagtgacggccttgcagggctgaagggccgtgatcgatcgtgggtcattgggagtccagaaatcctgcggaagagattatccgtatcagagtcaagcctcttgaaggtagcagggcggcccagcaccttcagtcagcatttcgggacacaccctcatcagcagctgctgagctctcagcttcatttgtgggaggctgagcatgtagtgttggaaataccgtactag

SEQ ID NO: 124340 - DNA, 1035 bp, synthetic construct
  misc_feature 1..1035: note = Description of Artificial Sequence: Synthetic coding sequence
  source 1..1035: mol_type = other DNA
atggacgacagcagcatcctgcggcggaggggactccaaaaagaactgagcctcccacggcgcgggagcttttgccgcaccagtaaccgcaagagccttatcgtgacaagcagcaccagtcccacactacctagacctcattcccccctgcatggccacactggaaatagccccctggacagccctcggaatttctccccaaacgcgcccgcccacttcagttttgttccagcccgatcgcactcccatcgggctgatagaacagacggtaggcggtggtcactcgctagccttccttcttcaggatatgggacaaatactccgagttcgaccgtgtcgtcatcttgttctagtcaggagaagctgcaccagcttccatttcagcctacggcagacgaattacatttcctgactaagcacttcagcaccgagagcgtgccagacgaagagggtcgccagtcccccgccatgcgacccgcaccttcacgcgccctgggtacactgaggcaagatagagccgagcgtcgagaatcattgcagaagcaggaagccatacgagaggtggactcttcagaggatgacacagaagagggccctgaaaacagtcagggcgctcaggagctgtcactggcaccccacccagaggtctctcagtcagtggcacctaagggagctggggaaagtggggaggaagatccctttccatccagagatccccgaagtcttggccccatggtcccgtccttacttacgggtataacccttggtccacctcgcatggagtccccctctgggccccaccgccgactcgggtcaccgcaagctatcgaagaggctgctagttcttctagtgcagggccgaacctaggacagtctggcgccacggaccctataccgcccgaaggatgctggaaagcccagcatctccacacccaagcactgaccgctctgagcccgagcacctccggtttggcacacctgatgcggattccagccagggcgggttatggttctctcagcgtccacaagcaatag

SEQ ID NO: 124341 - DNA, 3930 bp, synthetic construct
  misc_feature 1..3930: note = Description of Artificial Sequence: Synthetic coding sequence
  source 1..3930: mol_type = other DNA
atggacgaatcttccctcctgagacggagaggcttgcagaaggaactgagtctgccaagaagagggaggggttgccgatccggcaatagaaaaagcctagttgtgggaacaccgtctcctactctctcccgtcccctgagccctctgagtgttcctactgccgggtccagccccttagattcaccgaggaatttctctgccgcctccgcgctcaactttccatttgcccgccgggcggatggaagacgttggtccctagctagcctgccctcttctggttacggaaccaatactccaagcagcaccctgtctagcagtagcagctcccgggagagacttcaccagctgccatttcaaccaactccagacgaactgcacttcctgagcaaacattttcgttcctcagaaaacgtgcttgatgaagagggcgggcggtctcctcgactacggcctcgatccaggtccctgagtcctggccgggccacgggcacttttgataatgaaatcgtgatgatgaaccatgtgtacagagagcgattccccaaagctaccgctcaaatggaagggagactccaggagttcttgacagcatatgctcccggagccaggctggccttagcagacggcgtgctgggcttcatccatcaccagatcgtcgagctggcccgagattgccttgctaagagcggtgaaaatcttgtgactagtcggtatttcctggaaatgcaagagaagctagaaaggctgctccaggatgcacacgagcgcagcgatagtgaagaagtgtccttcatagtgcagctcgtaaggaaattgctgataatcatttctcggcctgcaaggctgctggaatgtctggagtttgaccctgaggaattctatcatcttctcgaagccgccgaggggcacgcccgggagggacaagggatcaaaaccgatctcccacagtatatcataggccagctggggttagccaaagaccctctggaggagatggttcccctttctcatctagaagaggagcagcccccagcccctgagtctcccgaaagcagagccctggtggggcagtcacggcggaaaccctgcgagtctgactttgagaccataaaactcatctccaacggggcttacggtgccgtctacctggtgcgccatagggacacgaggcaacgcttcgctatcaaaaagatcaataaacaaaacttaatcttacgtaatcaaattcagcaggtgtttgtcgagagagatattctcactttcgcagaaaatccattcgttgtctcaatgttctgctcattcgaaactaggcgccacctttgtatggtgatggagtatgtcgagggcggggactgcgctacgttactgaagaacatgggcccgctgcctgtggacatggctcgcctgtacttcgccgagactgtgctcgcactcgaatacttgcacaactacgggattgtgcaccgggatctcaaaccagataatctgcttataacttctcttggccatattaaactaacagatttcgggctgagcaagatcggcctgatgtccatggcaaccaacctttacgaggggcatatagagaaggacgctagagaattcatagacaaacaggtgtgcggcacccccgaatacatcgctcctgaggtgatcttcagacagggctacggcaagcccgtggactggtgggctatgggcgtcgtgttgtatgaattcttagtaggatgcgtcccattctttggtgacacacccgaggaactgtttggtcaggttgtgtccgacgaaattatgtggccagaaggtgacgaggcgcttcccgccgatgcccaggatctgatcactcgactccttaggcagagcccactggatagactgggaaccgggggaacccatgaagtgaagcagcaccccttttttcttgcactcgattgggccggactcttgaggcataaggcagagttcgtgccccagctcgaggccgaagacgatacatcttacttcgatacgagaagcgagcgttacaggcatcttgggagtgaagacgacgagactaacgatgaagagtcatccacggaaataccacagttcagctcctgttcccatcggttcagtaaagtttactcaagttcagagtttctggcagtgcaacccacaccaacgtttgcagaaagatctttcagtgaagaccgtgaggaggggtgggaaaggtccgaagtggattacgggcgaagactcagcgcggacattagactcaggtcgtggacaagtagtggaagctcctgtcaatcctcgagcagccagcccgagcgaggccctagcccctctcttctgaacaccatctcgctggacactatgcccaagttcgctttcagcagtgaagacgagggcgtaggacctgggcctgctggacccaagaggccagtttttatcttgggagaacccgatccaccccctgccgcgacccctgttatgcctaaaccaagtagtctgtccgccgatacagccgccctgtcacacgcacgcctccgctccaacagcatcggagcccggcactccaccccgcgccccctagacgccgggcgtggccgccggctcggggggccacgcgaccccgctcccgagaagtcacgagctagctcctccgggggctctggcggtgggtctggagggagggtaccgaagtccgcaagtgtgagcgctctctccctgattatcaccgctgatgacggttccgggggcccactcatgtcccctctgagtcctcggtccctgtcttctaatccatcctccagggattcctcacctagtcgcgacccatccccagtgtgtggcagcctgcgaccgccgatagtcattcacagcagtggtaagaagtacgggttcagtctgagggccattcgggtctatatgggcgactctgacgtgtatactgtccaccacgtcgtgtggtcagtggaggacggttccccggcccaggaggcaggtctcagagcgggagacctaatcacacatatcaacggcgagagtgttttgggattggtgcacatggatgtggtggaactgcttttgaagtctgggaataagatttctctgagaactacagccttagagaatacatcaattaaggtgggaccggcaagaaagaacgtggcgaaagggcggatggctcgccgctcgaaaaggtccaggcggcgtgaaactcaggatcgcagaaagagcctttttaaaaagatctccaagcagacctcagtacttcacacttccagaagctttagttcaggactgcatcattctttatctagcagcgagagcctccctggctcccccacacactctttaagtccttccccaacaactccttgtcgcagccctgctcccgatgtgcctgccgacacaactgcttcacctcccagcgcttcgccttccagctcttcgccagcctcccctgccgccgccggccatactaggccgagcagtctccacggactggctgccaagctggggccccccaggcccaagaccggcagaaggaaatctacttcttcaatcccaccctccccattggcgtgtccaccaatctcagcacctcccccccgtagcccgagccccctgcctgggcatccccccgccccagctcggtcccccagactgcgtcgagggcaatcggccgataagcttgggaccggtgagagactcgatggggaagcaggacgtagaactcggggaccagaggctgaactcgtcgtgatgcggagattgcacctgtccgaaagaagggattcctttaaaaaacaggaagcagtacaggaagtaagcttcgacgagccccaggaggaggctactggcctgcccacctccgtgccacagatcgccgtcgaaggggaagaggcagtgccagtggctctcggacctaccggtcgggattag

SEQ ID NO: 124342 - DNA, 2523 bp, synthetic construct
  misc_feature 1..2523: note = Description of Artificial Sequence: Synthetic coding sequence
  source 1..2523: mol_type = other DNA
atggatccgacagccggttcaaaaaaggagcccggcggtggcgccgcaacagaggaaggtgtcaaccgcatcgccgtgcctaagcctccctccatcgaagagttctcaatcgttaaacccattagtagaggagccttcggcaaggtgtacctggggcagaaaggcggcaagctctatgctgtcaaggtcgttaagaaagccgatatgatcaataagaacatgacacaccaggtacaggccgaacgggatgcactcgcgctgtccaagagccctttcatagttcacctgtattactccctccagtccgctaataacgtttacttggtcatggagtatctcattggcggagatgtcaagtcccttctgcatatctatggctactttgacgaggagatggcagttaaatatatttccgaagtggctttggctctggactaccttcacagacacggaattattcacagagatctgaaaccagacaacatgcttatctccaacgagggtcacataaaactgacagactttggcctcagtaaggtgactctgaatcgcgacatcaatatgatggacatacttaccactcccagtatggccaaacctcgccaagattattcaagaacacccggccaagtgcttagcttaatttcttctctgggtttcaataccccaatagcagagaagaatcaggatcccgcgaacatcctgtcagcctgcctttctgaaacctctcagctttcccaggggctcgtgtgtcctatgtctgtggaccaaaaggacactacgccatacagctcaaagcttcttaaaagttgtctagaaactgtggccagcaaccccgggatgccagtgaaatgcctgacatctaatctcctgcaaagccgaaaaagactggctacatcatcagccagcagccagtctcacactttcatttcttccgtggaatcagagtgtcactccagcccgaaatgggagaaggactgccaggagtcggacgaggcacttggccccacaatgatgtcatggaacgcagtcgagaagctgtgtgctaaaagcgccaacgcaatcgaaacaaaggggttcaataaaaaggacttagaattggccctttcacccattcacaatagttccgcactaccgaccacggggcgttcttgtgtgaacctcgcaaaaaagtgtttttctggagaggtatcgtgggaggctgtcgagctggatgtcaacaatatcaacatggacacggacacctcccagctggggttccaccagtccaaccaatgggcagtggacagcgggggaatcagcgaggagcacctcggtaagcgatcacttaaaagaaactttgaacttgtggactcatcaccgtgcaagaaaattatacagaacaagaagacgtgtgttgaatacaagcacaacgaaatgactaactgttataccaaccaaaacactgggctgacggtggaggtccaagatctgaagctttcagttcataagtcccagcagaacgactgcgcaaacaaggaaaacatcgtgaactcctttaccgacaagcagcagacccctgagaagctccccatccccatgatagctaaaaacctcatgtgtgaactcgatgaagattgtgaaaagaacagtaagcgcgattatctgtcgagcagtttcctctgttcagacgatgatcgcgcgagtaaaaacatcagtatgaatagtgactccagctttccgggcatttccatcatggagagtccactcgagagccagcctctagatagcgacagaagcatcaaggagtcaagctttgaggaaagcaacatcgaggacccactgattgtgacccctgactgtcaggaaaagactagcccaaaaggcgtggaaaatcctgctgttcaggagagcaatcagaagatgctgggaccgcctctggaagttcttaaaacactggcttcaaaacgtaatgccgtagccttcagaagctttaatagtcacatcaatgcctccaacaattctgaaccgtcccgcatgaacatgacatccctggatgcgatggacatctcctgtgcatatagtgggagctatccgatggccatcacacctactcagaaacgacgatcctgtatgccacaccaaactccaaaccaaattaagagtggtaccccttatcgcactcctaagagtgtccgacgtggggtagctcctgtcgatgacggcagaattcttggtacacccgactatctcgccccggagttgctactgggtcgggcccacgatatcccatggcccgagggtgaggaaaaactgtccgacaatgcccaaagcgccgtggaaattctccttactattgatgacaccaaacgcgccggaatgaaagagctcaaacgccaccctctgttctctgacgtggattgggagaacctgcaacatcagacaatgccatttattcctcagcccgacgacgagaccgacacttcctatttcgaggcccgtaacactgcccagcacctgacagtgagcggattcagcttgtag

SEQ ID NO: 124343 - DNA, 2640 bp, synthetic construct
  misc_feature 1..2640: note = Description of Artificial Sequence: Synthetic coding sequence
  source 1..2640: mol_type = other DNA
atggatccaaccgccggttcgaagaaagaacccggcggaggagccgcaaccgaagaaggggtaaaccgcattgcggtacctaagccccccagcattgaggagttcagcatcgttaagccaatctccagaggggcattcggtaaggtctatctgggacagaaggggggaaaactgtatgctgtcaaggttgtcaaaaaagcggacatgatcaacaagaatatgacccaccaagtgcaagccgagcgggacgcactagcactatccaagagcccattcatcgtccacctgtattacagtctacagtctgctaacaatgtttatctcgtcatggagtatctgattggcggcgacgttaagtctttgcttcatatctatggctattttgacgaggagatggcagtaaaatatatctcagaggtggcgttggctctcgattaccttcacaggcatggtattattcatagagacctcaaacccgacaacatgttgatcagcaacgaaggtcacatcaaacttactgatttcggcctgtcgaaagtgacacttaacagagatattaacatgatggatatccttactaccccatctatggccaagccacgacaggattactctagaaccccaggacaggtgctctctctgataagctcactgggtttcaacacccctatcgctgaaaagaatcaagatcctgccaacatcctctccgcctgtctgtctgaaacttcacagttaagccagggtctcgtgtgtcctatgtcagtggatcaaaaagacaccacaccgtattctagcaaacttctgaagtcatgcctggagacagtggctagtaacccaggtatgccagtaaagtgcctcacatcaaatctcttacagagtcggaagcgtctggcgacaagctcagccagtagtcagtcccacacattcataagttccgtggaaagtgagtgccactcaagtccaaagtgggagaaggattgtcaagaaagtgatgaagccttggggcccactatgatgtcttggaacgctgtcgaaaaactttgcgcaaagtctgccaatgccattgaaacaaaagggttcaataagaaagacctcgagttggctctgtcaccgattcataacagctccgccctccctaccactgggcgcagttgcgtcaacctggccaaaaaatgcttttccggggaagtatcttgggaggctgtggagttggatgtaaacaatattaacatggacactgacacgagtcagttgggatttcatcaatcaaaccagtgggctgtcgacagcggcggcatcagcgaagagcacctaggaaagagatccttgaaacggaattttgaattggtcgactcaagcccctgtaaaaagattatacagaacaagaagacgtgcgtggaatataaacataacgagatgactaattgctacactaaccagaatacaggccttaccgtagaggtccaggatttgaagctgagcgtacataaaagccagcaaaacgattgtgctaataaggagaacattgtcaattcgtttacggacaaacagcagacacctgagaaactgcctattcctatgatcgccaagaaccttatgtgcgagctggatgaggactgcgagaagaacagtaaacgagactacctctccagctccttcctctgttctgacgatgatcgggcaagtaagaacatttccatgaacagtgacagttctttccctgggatctccatcatggaatcacccttggaaagccagccactggactcagatcgatccatcaaagagagtagctttgaggagtcgaacatcgaagacccactgatcgtcacccccgactgccaggagaaaacttctcccaaaggtgtggagaatcctgccgtgcaagagagcaaccaaaagatgctcggtccaccacttgaagtgctcaagacgctcgctagcaagcgcaacgccgtggccttcaggtcttttaattcacatattaatgccagcaacaactccgagccttcacgtatgaatatgactagcctggacgcaatggacatttcttgtgcttacagtgggtcatatcccatggcaatcacccctacacaaaagcggagaagctgcatgcctcaccaacagacccccaatcagataaagagcggaactccatatagaacccccaaatccgttaggagaggtgtggcacctgtcgatgacgggcgtattttggggactcctgactacctggcccctgaactcttgcttggaagggcacacgggcccgccgtggactggtgggcgctgggtgtatgcctgtttgagttcctgacaggtattccccctttcaatgacgaaacaccccagcaagtgtttcaaaacatcttaaaaagggacatcccctggcccgagggcgaggaaaagctgtctgacaacgctcagtccgctgtggagatactgctcacaattgacgataccaaacgtgcggggatgaaagaactcaagagacacccgctgttttcagatgtagactgggaaaatctgcagcaccagaccatgccctttattccccaaccagatgatgaaacggatactagttacttcgaagcccgtaacacagcacaacatctaacagtttctgggtttagtttgtag

SEQ ID NO: 124344 - DNA, 2637 bp, synthetic construct
  misc_feature 1..2637: note = Description of Artificial Sequence: Synthetic coding sequence
  source 1..2637: mol_type = other DNA
atggaccccaccgccggctcaaagaaggaaccaggggggggagcggccactgaggaaggtgtcaatcgaatagcggtaccaaaacccccatctattgaggagttcagcatcgtgaaacctatatcccggggggccttcgggaaagtgtatctgggccagaaaggaggcaagctgtacgctgtgaaggtggttaaaaaggcagacatgataaacaagaatatgactcaccaggtacaggctgaaagggacgctttagcgctgtccaagtctccctttatcgtgcatctctactactccctgcagtcagcaaataacgtatatctggtgatggagtatcttatcggtggggacgtcaagtcacttctgcacatctacggatatttcgatgaggagatggccgtcaagtacataagtgaggttgctctggcactggattacctgcacaggcatggcatcatccatagagatctgaaacccgataacatgctaatctcaaacgaagggcatatcaaattgacagattttgggctgtccaaggtgaccctgaatcgcgacataaacatgatggatatccttaccaccccctcaatggctaaacctagacaggattatagcaggacccccggccaggttctgagtcttatctcaagcctgggctttaatacaccgattgccgaaaaaaaccaggatccggcgaatattctgtccgcttgcttgagtgaaacctcacagctgtcccaaggcctggtgtgtcctatgtctgtcgaccagaaggacacaactccctatagtagcaaactgctgaagtcatgcctcgaaaccgtggcaagtaatcctgggatgcccgtgaagtgtctaacttctaacctgcttcagagtcgaaagcgcctggcaacatcaagcgcgtcttcgcagtcccacaccttcatcagttccgtcgaatccgagtgtcactcttcaccaaaatgggaaaaagattgccaagagtccgatgaggccctaggaccaaccatgatgtcttggaacgcagtggagaagctgtgtgctaagagtgccaacgcaattgagaccaaaggttttaacaagaaggacctggaactggcattgtcccccattcacaatagctcagccttgcccactaccggccgcagttgcgtcaacctggctaagaagtgcttcagcggggaggtgagctgggaagccgttgagctggacgtgaacaatataaacatggatacggatacctcacaattgggttttcaccagtccaatcagtgggccgtggatagtggaggcataagtgaggagcacctggggaaacgaagtctgaaaaggaacttcgagctcgtggacagcagtccctgcaagaagataatacagaataagaagacttgcgtagagtacaaacacaacgaaatgactaactgctacacgaaccaaaacaccggattgactgtcgaggtacaggaccttaaactcagcgtgcacaagagccagcagaatgactgtgccaacaaagagaacatcgtgaactccttcacggataagcaacaaactcccgagaagttgcctatccctatgattgccaaaaacctgatgtgcgagctagacgaggattgtgagaagaacagtaaaagggattacctatcctcatcgtttctttgttctgacgatgacagagccagtaaaaatattagcatgaatagcgattcttcttttccgggcatcagtattatggagtcccccctagaaagccagccactcgactctgaccgcagtattaaggagtctagtttcgaagaatctaatattgaggaccctctgatcgtgacgccggattgtcaggagaagacgtctccaaagggggttgagaatccagctgtgcaggagtctaaccagaaaatgttgggcccacccctggaggtgctgaagacacttgcatccaagaggaatgccgttgcctttcggagctttaatagccatatcaatgcctctaataatagcgagcccagtcgtatgaatatgacctcgctcgatgcaatggacatctcctgcgcctactctggttcctatccaatggccatcaccccgacccaaaaaaggcgctcttgcatgcctcaccagactccaaaccaaataaaatccgggacaccttatcgaacccccaagtcggtccgaagaggggtggcacctgtcgatgatgggcggatcctgggaacaccagactacctagccccggagttgcttctcggtcgcgcacatggccctgctgtggactggtgggcacttggtgtatgtctgttcgaattcctgacagggatccccccctttaacgacgagacgccacagcaagtgttccagaacatcctgaaaagagatatcccatggcctgagggagaagagaagctgagcgacaatgcgcagagcgcggtggaaatcctgctaaccatcgacgacacgaaacgagcaggcatgaaggagctcaaaagacaccctctctttagtgacgtggattgggaaaacctccagcatcagactatgcctttcatacctcagccagatgacgaaacagatacctcttacttcgaggctagaaacacagcacaacacttgacagtgagcggcttctccctgtag

SEQ ID NO: 124345 - DNA, 17817 bp, synthetic construct
  misc_feature 1..17817: note = Description of Artificial Sequence: Synthetic coding sequence
  source 1..17817: mol_type = other DNA
atgcagaaaggtctcctggaccaagataccggcttagtcttgctggagtctcaggtcattatgtccggtttaattgcccccgaaacaggcgagaacctatctctggaagaggggatcgcccgaaatttgattaacccccagatgtatcagcagctgcgtgaactacaggatgcattggcactcatatctagactgaccgaatcccgcggcccactgtccgtggtggaagccatagaaaaaaggattatcagcgaaactgtggggcttaaaattttggaagctcatctggctacaggaggctttagcttgagcccttccgagaactgcatcaatcttgaggaagcttttcaccagggattgatcagtgcttggttgcatagcgtgctggagtcttacttacgaaccagcaagaacctgattgacccaaataccgccgagaagatcggccttctggacctcatgcagagatgtatcgtccatcaggagagcggctttaagttgctccccgtgaagcagctggccggtgggatggtgagtctcaagtcaggtcgaaaggtgtccatcttcagggcggtccaagagggtctgatcgatcgccaggtaacagtcaggctgcttgaggcccagctcttcgcaggcggaatagtcgacccacgaaccggccacaggctgacggtcgaagaagcagtccgtcacaacctgatcgatcaggacatggcatgtgcgatcctaataaggcaacttcagaccggaggaatcatcgatactgtgactgggcagcgattgacaatcgacgaggccgtgtctaatgatctggtggcagcgaagattgctctggtgattctggagagtctctggagttttatgggactcctctggcccgagagtggcgagatcctgccaatcacagacgcgctcgaacagggcatcgtcagtaccgaactcgctcataagatcctctccaaccgacagcatatcaaagcactctttttgccagcgaccaccgaaatactttcatggaaaaaagctatcgagtcaggaatcctggatagggatttagccaataatctgaagagcatctgcattcctgacgtgatgcctcatatgcaattagccgacagcgccgagcaaaacatcaatcccggagcagccgtcctgccctgcagtaaaagccacccgaaagcaaccgcctcccagtcggaaaatctgctgtttcagttaatgacccactcttacatcaatgtgcagaatggccagcgactcctgctgctcgacaaagagctcatggaaacgctgactagtcgcgacgagtatcagacctctcctcccaaggtcgtagagatcggccatcagcggcaaaagacccccgaggggctccaggaaagtgcaaatgtaaagatatctggaacttttagctcggggtggacagtacgcctgccagaattccagttttcatcacagaataaagagtatcctgaccgggaagattgtaccacagaaaaagggaaaaaaacaactgtagagaccgaagattcctcagtcgagaatcctgaacaggatctgttcgtggagcagaaggaaagaaatcccaatattgatgcactgaaagtgatcaataaagtcaagctggaggtacagagacagttaataggaacgcaacgtgaggaccagacagcagtgtccgtccgagagaatgcctcacgtggccacctgctgaccatacccccagctgaggccgagggcgttcctctggtggtggacaaggatgtgtttagcgtagagactcctaagaaagaacaccagcctctccggaatacctcttttacgtgtcagaatgagcaggcccacactttagaaacagagtatattcacgatgagacaggcggaagtcacatcaaaccccaatccaaaaaactgcaggtgcaggtgaagaaaaccttaggcatcaagttagagttgaagagcgaaacagacgggaatgtgcaccctctggacaaaaaggagatgctcaaaaaaactttcttagctaaggatgaccacaaggaatcacaggaggcacagaacatcgctggcggcagcatgatgatgtcagagaagactgacgaagaggattcggggagggagatctttctcagttgttcccaccctctggagctgttggaggaagcgacactcaacgtgctcagcgctcaattactagacggcgggatatttcacgagcaaactggacaaaagctcctgcttaatgaggcgatcagtcgcggtatcgtcccatcgcacacagccgttaagctgatggagaaacttaacatgttccagggttttttcgactcacagacttgcgagagcctgactacagaggaggttattaacgaggggctgatggatgagaagctgctacataacgtgcttatggccgacaaggccataagcggtgtgctggacccaagaacccaaacactgtgttccgtgaaagacgcagtgacagtcggactgctcgataaggagaccgcgacacgcattctagaaagacaagttgtgactggtggcatcattgacctgaagcgtggcaagaaggtgagtgtcactcttgcttccacgttaggcctagtcgatgttgctgaccagccagagttaattaacctcgagaaagcaagtaaggggagagatgccgagaaaaccgtccgggagcggctcatatccctacaaatggagacaactggactcatcgaccctgacagcaaggcaccattaaccgttgttcaaagcatcgacagaggcctgctcgaacgggaggaagctgtgcggctgctgaccaagcaggtggtggacggcggcatcattcatcacatttcaggcatgaggctatccgtcgacaacgctttccgacacggactcattggcgaggacctggccgaaaagctcaaaagggtggaaaatctgaacattcaccagatctttaaccctgagacaaaagagaatatttcgctcccaaaggcaatcaagttggacctgatcacatccgaccttaagcgtgagattcaggaagtccaggcattcacgggcaacttcgtggatctgattagcggtcaacggttgaccctggctgaggcaaaaaaggagggccttctgactaacgaggccgtactgtcacctgggatgatgcacggcatagtcgaccctgagaattgcaggatcgtaccatactccgagttagtaaagaaatgcaagatcgatattgagtcaggacagagatatcttgaagtgattcccttctccgacataaaggatggggtgtccgacaaggttttaaccctgtcacaggccatccagctgggaaaggttgattttgccagcactttgaaggtgctggaagcccaagccaatacgggcgggataatcgataccgccaccggtaagagactaaccttggctagtgctcttgaggaaaagctggtggatgagaatatggttaggatcattgcaagccaccaggtgctgaacggcgggattgttgatatctttagcgatcaaagagtgacactggtcgaagctatcgagaaaaggctgatctcgcctgaattagctaatatgattcaaatagatagctccgagttttctgatcaccgagcacagattgaaaaacaggagggtatcgaggtctgcgcgctgcagaacgaatttctcggtaaagacatgctgatcgcatgcaatcagaccgcggagatgtcctgtaataaggtggaggagtctgaacgactattccaggtcgagaaccagtccgcccaagagaaagtgaaagttagagttagtgacggcgaacaggcaaagaaatctcgggagatttcacttaaagagtttgggtgtaaagatcagaggaaaccacggatgagctcagacgctaaggagttcatctcaatcattaatccacataaccttaaagggaaaagcctgggacaggtgtccctaacacacccatatagcgagtgtgattttaagctgaaagaggtggcccggaataacatgggcaatgatacgaatgaggagcaggaaaaagcagtcaccaaaatcgaaataattagtcatatgaagcaatctacgagctgcctggattccgaggagattagagagaatcaaggcgaagttatccttgaagttcaggaaacctactgtgaaacctcaggcaaactccctagcgaacaggtgctgcagcagcctatgaatgcccgggtgaaatctaagcgcgaaaagcgtgaagtcattgtagaggaatccattaggacatgcaaacccgcctttctatcggaggaaaaactatatcaggagaccgctatccgcgatgagcatgacagccacatcaaaagccaaccaagggaaatgacctcaagcgagaaaggtaaggaggccgatactgaaatgggattctcaatcacctttaaaattgaagagtcgtctagccaggttgttccacagggaattagtgtgaaacacttagacgccttgacattgttctcttcaaaacaggcaaatgagggcaaagtgaataacctaagtctttgtctcactctgaagccagaagaaaacctgtcgagggagatagcctgcggcgcacagtcggaacctttcccctgtatgacgcctagaccagagggactccactatcaggagtctgatggaaaagcccaagtgacgggcccgtcccaaatttcgaagactgacaaatcctttcaaggcaccaccagacaagaaacgaattatcaggattcatgggtgacctcgaaaacaaaggagaccaaacaccagatctcctctagcaatgagtgtaaggagaagtcttatcaggaggtatctttcgatccagctagaggcttgaaactcgaggagattactgtgtcccgaccagactctaaggaagtccgatacttagaattttctgatcgcaaggacctgcaccaccagggatccaagagtgacgacaagctctgtggtactttaaagtcagaaattgcgacccaggagctaactggcgagaagtttctggagatggcaaaccctaatgtcgcggggctggaagctggctccatcgaagacattgtgacccaaagaggaagtagagttctcgggtcgtttctgcctgagaagctgttcaagggcgtatctcaaaaggaaaacaccgggcaacagaacgctatcatcagccccacagtgctggaaacttccgaagaaaaaacagtctcactgactgtctgcagcgccgtgaagacagagaagaccccacaagaaaaactcagggagagccctggatccgagcagacgcctttcatgacagcccccgagggcaagggcaacgggggtgtgaacccggaaccattccgggcaacacaaaatgtgtttaccagacagctttgtctggaacacgatgagaagctggtctcttacttgtcgctactccgaaatattgagatgaggacaaagcagatccagcccttggagcttaacctcgctgagctccaagatctgctgtgtcaggctaaagtgctggaacgggaactgaaagatttgacgaccttggtttctcaagagctcgaatgcgttaaccagatcataatctcgcaaccccaagaggtgcccgcccagctcctcaaggcccttgagaaggacgccaagaacctgcagaaatcgttgtccagcgtctctgacacctggaacagtcgccttctgcacttccagaacgccgtggagatagagaaaacaaaggtgctgaaccaacatacccagctcgagggtcggctccaggaccttagagcctgggtggggaataaaaatctcatcctgaattcaaaaggttcgaactccgagattgacgtcgattcgctgaatttgtgtctgcagcaatacgaagacttgaaacaacccatggcagagaggaaggcccagctggacgcactggccttcgacatccagttcttcatttccgaacatgcccaggatttgtctccccagcagaatagacagatgctccggctgctcaacgagctacagcggagcttccaagacatactggaacaaacagcagcccaggtcgacgcgctccagggtcacttgcagcagatggagcaggaggcattggttaaaacactccagaagcagcagaatacgtgccatcagcagctggaggacctctgttcctgggtgggtcaggccgagagggcgctggccggtcaccagggaaggacgacacaacaggatttatccgctctgcaaaagaatcagtctgacctgaaagacctacaagacgacattcagaatcgagctacaagttttgccacagtggttaaggacatcgaggggtttatggaggagaaccaaacaaagctttctccaagggaactgacagccctgagagaaaagcttcatcaggccaaagagcagtacgaagcactgcaagaagagacacgcgtggcacaaaaagaactggaagaggccgtaacatccgcactgcagcaggaaacggagaagtccaaggcggctaaagaactcgccgagaataaaaagaagatcgacgctctgttggactgggtcacgtctgtgggcagttctggcggacagctccttacaaaccttcccggtatggagcagctgtccggagcaagcctggagaaaggagcacttgataccactgacggttatatgggagttaatcaggctcccgagaaactggacaagcaatgcgagatgatgaaggcaagacatcaggaacttctgtcccagcagcaaaacttcattctggctacacagtctgctcaggctttcctggaccagcatggtcataacctgaccccggaggaacagcaaatgttacagcaaaagctcggagagttaaaggagcagtactcgacatccttagcccaatctgaagcagaactgaaacaggtgcagaccctgcaggatgaattgcagaagttcctccaggatcataaagaattcgaaagctggctagaacgatctgagaaggagctcgagaacatgcacaagggcggtagctcacccgaaacgttgcctagtctgttgaaacggcaagggagtttcagtgaggacgttatttcacataagggagacctgcggttcgtgacaatctctggccagaaggtgttggacatggaaaattctttcaaggaaggtaaggagccgtccgaaataggaaatcttgtcaaggataagttgaaagatgcaacggagcgatacaccgctctgcactccaagtgtacgagactcggaagccatctgaacatgctgctcggacaataccaccaatttcagaactcagcagatagcttgcaggcatggatgcaggcttgcgaggcgaacgtggaaaagctcctttcggatacagtggcgtcagaccccggggtgctgcaagaacaactcgctactaccaaacagttgcaagaagagctggctgaacatcaggtaccagtggagaagctgcagaaggttgcacgggacatcatggagatagagggggagccagcccctgatcaccgccacgttcaggaaaccactgatagtatattatcacactttcaatctttgagctactcccttgcggaacggtcatcattgctacagaaagctatcgcccagagtcagtcagtgcaggaatccctcgagtcactgctccaatccatcggggaggtcgaacaaaatttagaggggaaacaggtttcctctctgagctcaggcgtgattcaggaggccttggccaccaacatgaagctcaagcaggacatcgccagacagaaaagcagcctcgaggctaccagagagatggtaaccaggttcatggaaactgctgactcaacaacagcagcggtgctgcagggcaaattggcagaagtctctcagcgattcgagcagttatgcctccaacagcaagaaaaagagagcagcctgaaaaaactcctcccccaggccgagatgttcgaacatttatcaggaaagctacagcagtttatggagaataagtcccggatgctggcttccggcaatcagccggaccaagatataacccacttttttcagcagatccaggagctgaatctggagatggaagatcagcaagagaatttggatactcttgaacatctggtcaccgaactgtcttcctgtggattcgcccttgacctgtgccagcatcaggaccgggtgcagaaccttaggaaggactttaccgagctgcagaagacagtcaaggagagggagaaagacgcgtcctcctgccaggagcagctagacgagttccgaaagctggtacgcacctttcaaaagtggcttaaagaaacagaaggctctataccacccacggagactagcatgtccgcaaaggagttggagaagcagattgagcacctcaagagcctattggacgactgggctagcaaaggtacactggtagaagagataaactgcaaagggacatccttggagaatctgatcatggagatcaccgcgccagatagccaaggtaaaaccgggtcaatcctgccatcggtcgggagttcagttggtagcgtgaatggctaccatacctgcaaagacctgacagagatacagtgcgacatgtccgatgtgaaccttaaatacgagaagcttggaggtgtactgcacgaaaggcaggaaagtctgcaggccattcttaataggatggaggaggtccataaagaagccaattctgtgctccaatggctcgaaagcaaggaggaggttctgaagagtatggatgctatgtccagtcctaccaagacggaaacagtcaaagctcaagcagagtccaataaagctttccttgcagagcttgaacaaaattccccaaaaatacaaaaagtcaaagaggctctggctggtctgctggtcacttatccaaacagtcaggaggcagagaactggaaaaaaattcaagaagagctcaattctcgctgggagcgggccaccgaggttaccgtcgcgcgccagcgacaactcgaagaatccgcatcacatttagcctgtttccaagccgccgaatctcagttgcggccctggcttatggagaaagagttaatgatgggagtgcttggcccactgtcgatagaccccaacatgttgaatgcccagaaacagcaagtccaatttatgctgaaagagttcgaggctagaagacagcagcacgaacagctgaacgaggccgcacagggtattttaaccggccccggcgacgtgagtctttcaacctcccaggtgcagaaggagctgcaatcgatcaaccagaagtgggttgagctaaccgacaagctgaattcacgatctagccagatagatcaggcaattgtgaaatcaacacagtaccaggagctccttcaggacctgtcggagaaggtaagagccgtgggccagcgcttgtctgtgcaaagcgcaatttctacgcaacccgaagcagtcaagcagcagctggaggaaacgtcggaaatacgatctgatcttgagcaactcgaccacgaggtgaaggaggcccagactctgtgcgacgagctgagtgtgctgatcggcgaacagtacttgaaagacgagttgaaaaagagactcgagactgtggccctcccgctccaagggctagaagatttagcagcggatcggatcaatcggctgcaggccgctttagctagcacacagcaatttcagcagatgtttgacgagctgagaacatggctagatgataaacagtcccagcaagccaagaactgcccaatttctgcaaagctggagaggctccagagtcagcttcaggaaaacgaagagtttcaaaagtcactaaatcagcactcgggtagctatgaggtgatagtcgctgagggtgaatctctgttactctccgtgcctccaggcgaggagaagcgaacacttcaaaaccagctggtggagttaaagaaccactgggaggaactcagcaaaaagactgccgaccgccagtctagactgaaggactgtatgcagaaggctcaaaaatatcagtggcatgtcgaagacctagtgccatggattgaggactgcaaggctaaaatgtcggagctccgtgttactctcgatcctgtccaactagagtcctctttacttcggagcaaggcgatgctcaacgaggttgagaaaaggcggagtcttctcgagatccttaacagcgctgctgatatcctaattaatagcagtgaagctgatgaggacggcatcagagacgaaaaagctggtattaatcagaatatggacgccgtgacagaagagctacaggccaaaactggtagcctggaggagatgacccagagactccgcgaatttcaggaatcattcaagaacatagaaaagaaggtggaaggagcaaagcaccagctcgagatatttgacgccttaggcagccaagcttgctccaacaagaacctggaaaaactgcgggcccagcaggaagtgctgcaggctctggagccgcaggttgactacctccgaaatttcacacaggggttagtggaggacgccccagacgggagcgatgcctcgcagttattgcatcaggctgaggttgctcaacaagagtttctggaggtgaagcagagagtaaactcaggttgcgtgatgatggaaaacaagctagaagggatcggccagtttcactgtagggtgagggaaatgttttcccagttggctgatcttgatgatgaactggacgggatgggcgccattggtcgcgataccgatagcctccagtcccagatagaagatgtaagactgttcctcaacaagatacacgtgctgaagctcgacatcgaggcttccgaagcagaatgtcgacatatgctggaagaagagggcacactggaccttttgggattaaaacgggaactggaagcattgaataagcagtgcggtaaactgacggagcgcggaaaagctaggcaggaacaattggagctgaccctcgggcgagtagaggacttctatcgaaagcttaaggggttgaacgacgcgaccactgccgctgaagaagctgaagctttgcagtgggttgtcggcactgaggttgagataatcaaccagcaactcgccgactttaagatgtttcagaaggagcaggtggacccacttcagatgaagctgcagcaggtaaacggtctgggccaaggtctgattcaatccgctgggaaggattgcgacgtgcagggcctcgagcatgatatggaggaaattaacgctcggtggaataccctgaacaaaaaggtggctcagcgcattgcccagctacaggaggctcttctccactgcggtaaatttcaggacgcactggaacctctgctatcatggctggcagatacggaagaactgattgccaatcagaaaccacctagcgctgagtacaaagtagtgaaggcacagatccaagaacagaagctacttcagcggctactagacgatagaaaggcgacggtcgatatgctgcaagcagagggaggccgcattgcacaatccgctgagctcgccgacagggagaagatcacagggcagctagaaagcctggaaagtaggtggaccgagctgctgtccaaagccgcagctcgccagaagcagctggaggacattcttgtgcttgccaagcaattccatgaaactgccgagccaattagcgacttcctcagcgtgactgagaaaaaactggccaacagtgagcccgtaggtacacagaccgccaagattcagcaacagataatccgccacaaggccttggaggaggacatcgagaatcacgctaccgacgtccatcaggccgttaaaattggccaaagcctgtcttcactaacgtctccagccgagcagggggtgctgtccgagaagattgactcactgcaggccagatatagcgaaattcaagaccgatgctgcaggaaagcagccctgctggatcaggctctcagcaacgcaaggctctttggggaggacgaagtggaggtcctgaactggctcgctgaagtggaggataaactatcttccgtcttcgtgaaagatttcaagcaagacgtcctacacagacagcatgccgaccatctggccctgaacgaagagatcgttaacagaaaaaagaatgtggatcaggccatcaagaacggccaagccttactgaaacaaacaacgggcgaggaagtattgctcatccaagagaagctggacggaataaaaactcggtacgccgatattacggtgacatcgtctaaagcactacggacgctggagcaagccagacagctggccacgaagttccagtccacatatgaggagttgaccggatggctgagggaagtagaagaggaactggcgaccagcggcgggcagtcacccaccggggagcagattcctcagttccaacaacggcaaaaggaactgaagaaggaggttatggaacatcggttggttttagacaccgtaaacgaagtttcccgcgctctgttggaactcgtgccgtggcgggcaagagaaggcctcgacaagcttgtttctgatgccaacgagcagtacaagcttgtgtcggacacgataggccagagggtggacgagatagacgcggcaatacagaggagtcaacagtacgagcaggccgccgacgctgagttggcgtgggtggccgagaccaagagaaagcttatggccctcggaccaattcgcctggaacaggatcaaaccactgcacagctgcaggtacaaaaggcattctccatagatatcattaggcataaggatagtatggacgaacttttcagccaccgctccgaaatctttgggacatgcggagaagagcagaagactgtgctgcaagagaaaactgaatctctgatccaacagtatgaggcaatttcacttcttaactccgagaggtatgcaaggctagaacgcgcccaggtactggtgaaccaattttgggagacctacgaggagctgagtccttggattgaggagacacgagccctcattgcacagcttccttccccagcgatcgatcacgagcagcttaggcagcagcaagaggaaatgcggcagttgcgcgagagcatcgccgaacacaagccccacatcgacaagctgctaaagatcggtcctcaactgaaagaactcaatcctgaagagggcgagatggtggaggaaaaataccagaaagcagaaaacatgtatgcacaaataaaagaagaggtgagacaaagagccttagccttagatgaagccgtcagtcagtctactcagatcacagaatttcacgataaaattgagcccatgctggaaacattagagaacctgagttctagactccgaatgcctccgcttattcctgctgaggttgacaagatccgcgagtgcattagcgataataagtctgccactgtcgaactcgagaagctgcaaccctctttcgaagccctgaaacgtcggggcgaagagttgattggccgctctcagggagcggacaaggatttggcagcaaaggagattcaggacaaattagatcagatggtcttcttctgggaggatatcaaagctagggccgaggaaagggaaattaagttcctcgacgtgctcgaacttgctgagaaattctggtatgacatggcagcccttctaacaaccatcaaagatacacaagacattgtgcacgacctggagtcgccaggcatagaccccagtattataaagcagcaggtcgaagcagccgaaactataaaagaggagacagatggattgcacgaggaactggagttcataagaatcctgggcgctgacctaatctttgcctgtggagagacagaaaagcctgaggtgaggaagtccattgacgagatgaataacgcttgggaaaacctgaacaaaacctggaaagagagactggaaaagcttgaggacgcgatgcaagcagccgttcagtatcaggacacattgcaggctatgtttgactggctggataacaccgttatcaagctgtgtactatgcctcctgtggggactgatttaaacacagttaaggaccagttaaatgagatgaaggagtttaaggtggaggtgtaccaacaacagattgagatggagaaactgaaccaccagggggaactcatgttaaaaaaggcaaccgacgagacggatagggatattatccgagagcccttgacagagctgaaacatttgtgggagaacctgggggaaaaaattgcacacagacagcacaagcttgagggcgccctgctggccctcggccagtttcaacacgcactggaagagctgatgtcctggttaactcacacagaggagctgctagacgcccagcggccaattagcggggaccctaaagtgatcgaggtggaactggcaaaacaccatgtcctgaagaacgatgtgctggcccaccaggccacagttgagacagtgaacaaggcagggaatgagttgctggagtcatccgccggcgacgatgcctcctctctccgtagccgcctggaagctatgaatcagtgctgggaaagcgtgttacaaaaaaccgaggagcgagagcagcaactccagtcaacactgcagcaggcacaagggttccattcggaaatcgaggattttttattggagctaactcggatggagtcacaactgagtgcgtcaaaacccaccggtggcctgcctgagaccgccagggagcaactggacacgcacatggaactgtatagtcagctgaaggcgaaggaagagacgtacaatcagttgcttgacaagggccggttgatgcttctctccagagacgactctgggtctggctcaaagactgagcagagcgtcgcactcttagagcagaagtggcatgtcgtcagctctaaaatggaggagcgtaagtcgaagctcgaagaggccttgaacctcgcaaccgaatttcagaactcacttcaggagttcatcaactggcttacactggctgagcagagtcttaatatagccagccccccaagtctgatcctgaataccgtactgtctcagatcgaagaacataaagtgttcgccaacgaggttaatgcccacagagatcaaataattgagcttgaccagactggcaaccagcttaagttcctctctcagaaacaggacgtggtgctgattaaaaacctgctagttagcgtgcagtcaagatgggaaaaggttgtacagcgaagtatagagagaggtcggtctctcgacgacgcgagaaaacgcgccaagcagttccacgaagcctggaaaaagctgattgattggcttgaagacgctgagtcacacctggattcagagctggaaatttctaatgaccccgacaagatcaagctccagctgtccaagcacaaggagtttcagaagacattgggaggaaagcagccggtctatgatacaaccattcgaacaggaagggcacttaaggaaaaaactctgctgcccgaagattcacagaaactcgacaattttctgggggaagtgcgtgataagtgggacacagtttgcgggaaaagtgtcgagcgtcagcacaaactcgaggaggctctgctcttctccggtcagtttatggacgcactgcaggctttggtagactggctgtataaagtggaaccccagttagcagaagaccagcccgtacatggggacctagacctcgtgatgaacttaatggacgcccacaaggttttccagaaagaattgggaaaaagaactggtaccgtccaggtcctgaaaaggtcaggtcgggagttaattgagaacagtcgtgacgataccacctgggttaagggccaattacaggagctcagcacccgttgggataccgtctgcaagctttccgtcagtaagcagtcaagactggaacaggctcttaaacaggccgaagtcttcagagacactgtgcacatgttattggagtggttatcggaggccgagcagaccctccggtttaggggtgcactacccgacgacaccgaggctctacagagcctcatcgacacccacaaggaatttatgaagaaggtcgaggagaaaagggtcgatgtgaattccgcagtggcaatgggggaggtcatactggccgtgtgtcatcctgattgcatcacgaccatcaaacactggattacgatcattagagctcgatttgaagaagtgctcacatgggctaagcaacatcagcagcggctcgagaccgcgctctctgagctcgttgcaaatgcagagcttctggaagagctcctggcctggattcagtgggccgagaccaccctaattcagagagaccaagaacccattcctcagaatatagaccgcgtgaaggcccttattgccgagcaccagacattcatggaggagatgactcgaaagcagccggacgtggaccgtgtgacaaagacctataagaggaaaaacatcgaacccacccatgcgcccttcattgaaaaatcaaggtccggaggacggaagtccctgagccagccaacgcctcccccgatgccgatactgagtcagtccgaggctaaaaatccccgcattaatcagctgagtgcccggtggcaacaggtgtggcttttagcgctggagcgacaacggaagctcaatgacgccctcgatagacttgaggaattgaaggaatttgcgaacttcgacttcgacgtgtggcgcaagaagtacatgaggtggatgaaccataagaagagccgcgtgatggacttcttcaggcgaatcgataaggaccaggatggtaaaataacacgacaggagttcattgacggaatccttgcttcaaagttcccgacaaccaaacttgaaatgaccgctgtcgccgacatctttgatcgcgacggtgatggctatatagattactatgagttcgtagcggccctgcaccctaataaggatgcttaccgtccaacaaccgatgccgacaagatagaagacgaggtgacacgtcaggtggcgcaatgcaagtgcgcgaaaagattccaggttgagcagataggtgagaataagtaccgcttcttccttgggaatcaattcggcgattctcagcagctgcgactggtgagaattttgaggtcaactgtgatggtgagagtgggaggcggttggatggcactggatgagtttctggtcaagaatgatccgtgcagagcccgggggcgtacaaatatcgaactgagggagaagtttatccttccagagggcgcatctcaaggaatgaccccttttcggtctcgcgggcgccggtctaagccatcaagtcgtgccgcttcccccacaaggagttcctcaagtgcctcccagtccaatcacagctgtacctctatgcctagctctcctgcgacccctgccagtggtaccaaagtgatacctagcagtggctccaagttaaagcgccctactccaacatttcactctagtcgcaccagtttagccggagatacaagcaattccagcagtcctgccagtacaggcgctaaaaccaaccgggcggaccccaaaaaatcggccagcaggccgggatcaagagctggcagccgggccggctcacgagccagctcccgccgaggcagtgatgcctcagacttcgatttattagaaacgcagtcagcttgctcagatacttccgaatcctctgctgctgggggccagggcaactcgagacgagggctgaataagcccagtaagatcccaaccatgagtaagaaaactactactgccagcccaagaactcctgggccaaagcggtag

SEQ ID NO: 124346 - DNA, 16293 bp, synthetic construct
  misc_feature 1..16293: note = Description of Artificial Sequence: Synthetic coding sequence
  source 1..16293: mol_type = other DNA
atgagctccagcgatgaagagaccctctccgaaaggtcttgccgatccgagagatcttgccgaagcgaacggtcctacagaagcgagcgttcagggtccctgtcaccatgcccaccaggtgatacattaccatggaatctccccctgcacgagcagaaaaaaagaaagtcacaggacagcgttttagaccccgccgaacgcgcggtcgtgcgcgtggcagatgagagggatagagtgcagaaaaagacattcacaaagtgggtgaataagcaccttatgaaagttcgtaaacacattaatgatctctacgaggacctcagggacgggcacaatctgatcagtctcctggaagtcctatcaggaattaaattgcccagggagaaaggacggatgaggttccaccgccttcagaacgtccagatcgctctggacttcctgaaacagagacaggtcaagcttgtgaatattcgaaacgacgacattactgacggcaatccaaaactgaccctcggcctgatttggacgattatcctgcacttccagatcagtgatatttatatttccggtgaatctggtgacatgagtgcaaaggagaagcttctcttgtggacccaaaaggtgacggcaggatacacgggaattaagtgtaccaatttctctagttgttggagcgacggcaagatgttcaacgcactcatccacaggtatcgacctgacctggttgatatggaaagagttcagatacagtcgaacagagaaaatctcgagcaggcttttgaagtggccgaacggcttggcgtcactcgcttactggatgctgaggatgtcgatgtaccatcacctgacgaaaaatccgttattacctacgtgagctctatctacgatgccttccctaaagtgcctgagggaggtgagggcataagcgcgactgaggtagactcccgctggcaggagtatcagtcaagggtcgactctttgatcccttggataaagcaacatacaattctcatgtcagacaaaacctttccccagaatcccgtcgagctgaaagcactgtataatcagtacatccacttcaaagagacagaaatcctggccaaggagcgcgagaaaggcagaattgaggaactgtacaagttgctggaagtttggatagagttcggtcggattaagcttccccaaggctatcatcctaatgacgtggaagaggagtggggtaaactcatcattgaaatgctggagcgggagaagtccctcaggcccgcggtggagcgccttgaactattgctacaaatagcaaacaagatccagaatggcgcgcttaactgtgaagagaagcttactctggccaagaacactttgcaggccgatgctgcgcaccttgagtcaggacagcctgtgcagtgcgagagtgacgtgattatgtacatacaggagtgcgaaggtcttattcggcaattacaggttgacctgcaaatccttcgagacgagaactactaccagttggaggagctggcgtttcgcgtgatgcgtctgcaggacgaacttgtgacgctccggctggaatgcaccaacctataccgcaaaggccacttcacctcgttggagcttgtgcccccatcaacactcacaacgacccatctgaaagcagagcctctgaccaaggctacacacagtagtagtacaagctggttccggaagcccatgactcgcgccgagcttgtggccatctcctcttcagaagacgaaggcaatctgaggttcgtttatgagttactctcctgggtcgaggagatgcagatgaagctggaaagagctgagtggggcaatgacttgccctccgtggagctccaattggaaacgcagcagcacatacacacaagcgtagaagaactgggcagcagtgttaaggaggcccggttgtatgagggtaagatgtcacagaattttcatacaagttacgcagagacacttggaaaacttgagactcagtactgtaagcttaaagaaacatcgtctttccgcatgagacatctccagtccttgcataagtttgtgagccgagccactgctgaacttatttggcttaacgaaaaggaggaggaagaactcgcgtatgactggtctgacaataatagcaacatttcagccaagcgtaattacttttccgaactcaccatggagctcgaggaaaagcaagacgtattccgtagtcttcaggatacggccgaactgctctcattggaaaatcatcctgctaaacagacggtggaggcctattctgccgcggtgcagagtcagctgcagtggatgaagcagttgtgtctgtgcgtggaacagcacgtgaaggagaacactgcctatttccagttcttttctgacgctcgcgaactggaatccttcctgcgaaacttacaggatagtattaagcgtaaatacagctgcgaccacaacacctcgctcagcagactggaagatcttctgcaggactcaatggacgaaaaggagcagctcattcaatctaaaagctctgttgcaagcttggtgggccggtccaagacaatcgtccagctgaagcccagatcacccgaccacgtcctaaaaaacactatcagcgtaaaggccgtgtgtgattacagacagatcgaaatcacgatctgcaaaaacgacgagtgtgtactagaggataatagccagcgtaccaagtggaaagtaattagtccgaccggcaatgaggccatggtgccctcggtgtgtttccttatccctcccccaaataaggacgctatcgagatggcgtctagagtcgaacagtcataccagaaggttatggcactctggcatcagctccacgtgaacaccaagtctctgataagttggaattatcttagaaaggatctcgatctggtgcagacatggaacctagagaagttacggagcagtgctccgggggagtgtcatcaaatcatgaaaaatctccaggcccattacgaagacttcctgcaagatagcagggattctgtattgttttctgtggccgataggctccgattagaagaggaagtcgaggcctgtaaagcccgttttcaacatttgatgaagtctatggagaatgaagacaaggaagaaaccgtcgccaaaatgtacatttcagaattgaaaaacatccgactacgcttggaggaatatgagcaacgggtggtgaaaaggatccaaagcctcgcgagttctaggactgatagggatgcatggcaagataatgccctccgcatcgccgagcaggagcatacccaggaagatctgcagcagctgagatcagacctggatgcagtgtccatgaaatgcgactcattcctgcaccaaagcccgtcctcgtcatcagttccaacattaagatctgagctgaatctcctggtggaaaaaatggatcatgtgtacggtctgagcaccgtctacctaaataaacttaagacagttgatgtcatagtgcgcagcatccaggatgccgagctgttggttaaaggatacgagattaaactttctcaagaggaagtggtactggccgacttgtccgccctcgaggcacattggtcaacactgcgccactggctttccgacgtgaaagataaaaacagcgtcttttcagtcctggacgaagaaatagcgaaagctaaggtggtagccgagcaaatgtcaaggctaactcctgagcggaacctggacctggagcgctatcaggagaagggatcgcagctgcaggagcgctggcaccgggtaattgcacagctagagattcggcagtcagaactcgaatcaatccaggaagttttgggagattacagggcatgtcacggcacactgataaaatggatcgaggaaaccaccgcccagcaggagatgatgaaacctggacaagctgaggactctcgcgttctctctgagcagctttcacaacaaaccgcactgtttgccgaaatagaacggaatcagactaaactagaccagtgtcagaaatttagccaacagtactcaactattgtgaaggattacgagcttcagctcatgacttataaggcattcgtcgagagtcaacagaagtccccgggaaagcgacgccggatgctgtccagcagtgacgcaattacccaggagtttatggatctccgcaccaggtatacagccctggtaacccttaccacacaacacgtgaagtacatctctgacgctctccgaagactggaagaggaggaaaaagtggttgaggaagagaagcaggagcacgtagaaaaagtgaaggaactcctcggttgggtgtctacattggctaggaacactcagggtaaagcgaccagtagcgagactaaggagtcaaccgacattgagaaggctatcctcgaacagcaggtgttgtcagaggagctgacaacaaagaaggaacaggtgtccgaggctatcaagaccagccaaatcttcttggcaaaacacggtcacaagctctctgaaaaagagaaaaagcaaatctctgagcagctgaacgccctgaataaagcataccatgatctctgtgacgggtcagctaaccagcttcaacagctgcagagccagcttgcacaccaaacagagcagaagactcttcaaaagcaacagaacacttgtcaccagcaactcgaagacctgtgttcttgggtgggtcaagcagaacgcgctctggctggacaccagggaaggactacccagcaagatctttctgccctgcagaagaatcagagtgacttgaaagatctgcaggacgacatacaaaatcgggccaccagtttcgcaactgtggtgaaggatatcgagggctttatggaggaaaatcagactaagctgagcccccgagaactgactgcgctgcgggagaaactgcaccaagcaaaggagcagtatgaggctctacaggaggaaactagagtggctcagaaagagctcgaagaggcagttacaagcgcccttcagcaggagacagagaaaagcaaagcggccaaggagctggctgaaaacaaaaaaaagatcgatgcccttctggactgggtgactagcgtaggcagtagtggaggccagttgttaacaaaccttcccgggatggaacagctctctggggctagtctggaaaaaggtgccctcgacactaccgatggatacatgggcgtaaatcaggcaccagagaagctggataagcagtgcgagatgatgaaagctcgccaccaggagttactgagccaacagcagaactttatcctggctacgcaaagtgcacaggctttcttggaccaacacggtcataacctgacccctgaggaacagcagatgctccagcagaaacttggagagttgaaggagcaatacagtaccagtctggcacagtctgaggccgagcttaagcaagtccagactttacaggatgagctgcagaaattcctccaggatcacaaggagttcgaatcgtggttggagaggtccgaaaaggaactggagaatatgcacaagggcggatccagccccgagaccctgccttcactgctcaaacgacagggctcattctcagaggatgtcatttcccacaagggagacctcagattcgtcacaatttcaggacagaaagttctcgacatggaaaactctttcaaggagggcaaagaaccctctgaaatcggaaacttggtaaaagacaagctcaaggatgcaacagagaggtacacagctctgcatagtaagtgcacaaggctagggagccatctgaatatgcttctcggccagtatcaccagtttcaaaattctgctgatagtctccaggcctggatgcaggcatgcgaggccaacgtggaaaagctactttctgacacagtagcgtccgacccaggtgtactgcaggagcagctcgccaccacgaaacagctgcaggaggagctggccgaacaccaagtcccagtagaaaaattgcagaaggttgctagggatatcatggagatcgaaggcgagccggcgccagaccatcgacatgtccaggagacaaccgatagcatcctctcgcacttccaatcattatcctactcactggcggagcggagctctctcctccaaaaggccatcgcccaatcacaatcggtccaggagagcctggagagcttactccagagtataggggaagtggaacagaacctagaaggcaagcaggtatcaagtttgtcttctggcgttatccaggaggccctggcaacaaacatgaagctgaagcaggacatcgctagacagaagtcgtcgctagaggccacacgggaaatggtgacccgcttcatggaaacagcagactctaccaccgctgccgtgctgcaggggaaattggcggaggtgtcccagcgtttcgagcaactttgtttgcagcagcaggagaaagagtcctccctgaaaaagctgctacctcaagccgaaatgtttgaacatctgtccggcaagctgcaacaattcatggagaataaaagcagaatgctggcttcaggcaaccagccagaccaggacatcacccactttttccagcaaatccaggaactcaatcttgagatggaagatcaacaggaaaacttggacaccctcgagcatctcgtaactgagctaagcagctgtggcttcgccttggacctttgtcagcaccaagaccgcgtccagaatctgagaaaggatttcaccgaattgcaaaaaaccgttaaggagcgcgagaaggacgcaagttcctgtcaggagcagctagatgaatttagaaagctcgtgagaacttttcagaagtggctgaaagagacagaagggagcataccacctacggaaactagcatgtctgctaaagaattggagaagcagatagagcacttgaaaagcctgcttgacgactgggcttctaagggcacactggtcgaggagattaactgtaagggaacatcactagagaatttgattatggagataaccgccccagattcccagggcaaaaccggctccattttaccaagcgtcggctcgtccgtgggctctgtgaacggctatcacacctgtaaagatctgacagaaatccagtgcgacatgagcgacgtgaatttaaagtatgaaaaattgggtggcgtgctgcacgaaagacaggagtctctacaagccatactgaatcggatggaagaggtgcataaggaagccaatagcgtgcttcagtggctcgagtcaaaggaggaagttctcaaatcaatggatgctatgagctcccccacgaagactgaaacagtgaaggcacaggccgagagtaataaagctttcctggccgaactggagcaaaactcacccaagattcagaaagtgaaggaggccctggccggactgctagtgacttaccccaactctcaggaagcagagaactggaaaaagattcaagaggagctaaacagtcgttgggaacgcgctaccgaagtaactgtggcacggcaacgccagctggaggagtccgcgagccacctggcttgcttccaagcagctgagagccagctcaggccctggctgatggagaaagagctcatgatgggggtcctaggccccctatccatcgacccaaacatgcttaatgctcaaaagcagcaggtgcagttcatgctcaaggaattcgaggctagaagacagcagcatgaacagctgaacgaagccgctcagggtattctcactgggcccggtgatgttagtctgagcactagtcaggtacaaaaagagctccagtccattaaccagaagtgggtcgagctgactgacaaacttaatagcagaagctctcagatcgaccaggccatcgtcaaaagcacacagtatcaggagcttttgcaggacctgtccgaaaaggtgcgggctgtcgggcaaagactcagtgtgcagagcgctatcagtactcaaccagaggcggtgaaacagcagctggaagaaacctccgaaattcgatctgaccttgaacaactggatcacgaagtgaaggaagcgcagacgctctgcgacgagctcagcgttctcatcggcgagcaatatctcaaagacgaactcaagaagaggttggaaacagtcgcgctccctctgcagggtctggaggatctggctgccgataggatcaatcggctgcaagccgcacttgcatccacacagcagttccagcagatgttcgatgagttacggacctggctcgatgacaagcagagccagcaagcgaaaaattgtccgatcagtgctaagttggaacgcctacagagtcagcttcaggaaaatgaggagttccagaaatccctgaatcagcactccgggagctacgaagtcattgtcgctgaaggtgaatcactgttgttgtccgttcctccaggggaagagaagcgtactctgcaaaaccagctggtggagcttaaaaaccattgggaggagctgagcaaaaagaccgcggatcgccaatctcgcctgaaggattgcatgcaaaaggctcagaaataccagtggcacgtggaagatctcgtaccctggatagaggattgcaaggccaaaatgagtgagctcagggtcacccttgaccccgtgcagctcgagagctcactgcttaggtcgaaggccatgctgaacgaagttgagaagcggagatctctgcttgagatcttgaatagtgcagccgacattctgattaatagcagtgaagcggacgaagatgggatcagagatgagaaagctggtattaaccagaatatggatgccgtgacagaggaactccaggcgaagacagggtccctggaggagatgacacagcggttaagggagttccaagagtcgtttaagaatatcgagaagaaggtagaaggtgccaagcaccagctcgaaatcttcgacgctcttggatcacaagcttgttcaaacaagaatctcgagaaattacgggctcagcaggaagtgctccaagcactggagcctcaggtcgattacctccgcaactttacacagggcctggtcgaggacgcaccggatggttctgatgcctcccagttgctgcaccaagctgaagtggcccagcaggaattcctggaagtgaagcagcgcgtgaacagcgggtgtgttatgatggagaacaagctggaggggattgggcagttccattgccgggtgcgcgaaatgttctcccagttggccgacctggacgacgaactcgatggaatgggggccatcggcagagatacggattctctccagtctcagatagaggacgtcagactgtttttaaataagatccacgttcttaaattagacatcgaagcaagtgaggcagagtgtcgtcacatgctcgaagaggagggtactctcgacctccttggtctaaaaagagagctggaggccctgaataagcagtgcggcaaactgaccgagagagggaaagctcgccaagagcaacttgagcttacccttggccgggtagaggatttttaccggaagctgaaaggactgaatgacgccactactgctgccgaagaggctgaagccctccaatgggtggtcggcactgaggtagagattatcaatcagcagttggctgacttcaaaatgtttcagaaggagcaggtggatcctttgcaaatgaagctgcagcaagttaacggcctaggacaggggctcatccaatcagccggaaaagactgcgatgtccagggactagagcatgatatggaggagattaacgcaaggtggaacacactgaacaaaaaagtcgctcaaagaattgctcagttgcaggaggccttactgcactgcggcaagttccaggatgcactggagccgctgctgtcttggcttgctgacacagaggagctcatcgccaaccagaagcctccttccgctgagtacaaagtggtgaaggcgcagatccaggagcagaaactactccagcggctgttggacgacaggaaagctacagtcgacatgctgcaggccgagggcggcaggatcgcacaaagcgccgaactcgctgatcgagagaagattacaggtcagctcgaaagccttgagtcacggtggacagagctcctcagcaaggcagcggcccggcagaagcaacttgaagacatcctggtccttgcgaagcagtttcacgagaccgccgagccaatctccgactttttgagtgtgactgagaagaagctcgcaaacagcgaaccggtaggcacacagactgccaagatccagcagcagattattcgtcataaagcgcttgaagaggacatcgaaaaccatgctaccgatgttcaccaagctgtaaaaataggacagtctttatcaagcctgacctccccagctgaacagggagttttgtctgaaaagattgattcactccaggcgagatactcagaaatccaggatcgatgctgcagaaaagcagcactcctggatcaggcattaagcaacgcaaggctgttcggcgaggacgaagtggaagtgcttaattggctggccgaggtggaagataaattgtcatcagtgttcgtaaaagatttcaaacaggatgtcttgcacaggcagcacgcagaccacctggcactgaacgaggagatcgtcaacaggaagaaaaatgttgatcaggctatcaagaatgggcaggcactgctgaagcaaaccaccggtgaggaagtcctgctgattcaagagaaactggacggcatcaagacacggtacgccgacataacggtcacctccagtaaggccctgcgcaccttggaacaagcccgccagcttgcgacaaagttccagtcaacatatgaggaactgacagggtggctgcgcgaggtggaagaggagcttgccaccagtgggggccagagtccaaccggagaacagatcccccagtttcaacagagacagaaagagctgaagaaggaggtgatggagcaccggctggttctggataccgtcaacgaagtgtctagggctctgctggagctcgttccctggagggcacgcgaaggactagataaactggtctccgacgcaaatgagcagtacaaactagtcagcgacacaataggtcaaagggttgatgagattgatgccgctatccaacggtcccagcaatacgaacaggccgctgacgcagaattggcctgggtggctgaaaccaagcggaagctgatggccctagggcccatcagattggagcaggaccagacgaccgcccagttacaggttcaaaaagcgttctccattgacataatccgccataaagactccatggacgaactcttcagccatcgcagcgaaatcttcgggacttgtggtgaagaacagaagacggtgctgcaggagaagactgaatccctcatccaacagtacgaggccatatcgctgctaaactctgagaggtatgcccgtctggagagggcccaagtgcttgtaaaccaattctgggagacgtatgaggagctgtcaccatggatcgaggaaacccgggccttgatcgcccagctgccctctcccgccatcgatcacgagcagttaagacaacagcaggaagagatgcggcaactgcgcgagtctatagccgagcataaaccacacatcgacaaattgctaaagatagggcctcaactaaaagagttaaatcccgaggaaggggaaatggtggaagagaaatatcagaaggctgaaaacatgtacgcccaaattaaggaggaggtgcggcagcgcgccctggcattagatgaggccgttagccaaagcacccaggtcagccagttccatgacaagatcgagccaatgctcgaaaccttggaaaacctctcgtctcgcctcaggatgccacccttaatacctgccgaagtagacaaaattcgcgaatgtataagtgataataagagtgctacagtggagttggaaaagctccagccgagctttgaggcactcaaaaggcggggcgaggagcttataggccggagccagggagctgacaaggacctggccgccaaagaaatacaggacaaactggaccaaatggttttcttctgggaggacatcaaagcacgagcggaagaaagggagataaagtttctcgatgtactggagctcgctgaaaagttctggtacgacatggctgccctgctgacaaccataaaggacacacaggacatcgttcatgacctggagagtcctggaatagatccgagcattatcaaacagcaggtcgaggccgctgagaccataaaggaggagactgacgggctacatgaggagttggagttcatcagaatattgggcgctgatctaatcttcgcttgtggagagacagaaaagcccgaagtgcgtaagtctatcgacgagatgaacaatgcttgggagaacctgaataagacttggaaggaacggcttgagaaactagaagacgcaatgcaggccgctgtgcagtatcaggacacgcttcaggccatgtttgattggctggataacactgtcatcaagctctgcactatgccacctgtcggcactgacctcaacactgttaaggaccagttaaacgaaatgaaagagttcaaagtcgaagtgtatcaacagcagatcgaaatggagaaactcaatcaccagggggagctcatgctcaagaaggcgactgatgaaactgacagagatattatcagagagcctttgacagaactcaaacatctgtgggaaaatcttggagagaaaattgctcatcgacagcacaaactggagggagccctcctagctctgggtcaattccaacacgctctggaagagttgatgtcatggctgacgcatactgaagaacttctggacgctcagaggcccatatccggtgaccccaaggtgattgaggttgagctcgctaagcatcacgtactcaaaaatgacgtgttagcacaccaagcaacagttgagacagttaacaaggctgggaatgagctacttgagtcctctgctggagacgatgcgagctccttacgctctaggctagaagctatgaaccagtgttgggaatccgtcctccagaagacagaagaaagggagcagcagctacagagtaccttgcaacaggcccaaggttttcatagcgagattgaggattttttactggaattaacccgtatggaaagccaactttccgccagtaaaccaactggagggctgcctgaaaccgctcgagagcagctggatacccatatggaactgtactcccagcttaaggcgaaggaagaaacctacaatcagctgctggacaaggggagactgatgttgctcagccgggacgattctggatctggaagtaaaaccgaacagagtgtggcattgctagagcagaagtggcatgttgtctcatctaagatggaagaaaggaagtccaagctcgaggaagccctcaatctggccaccgagttccaaaactccctacaggagtttatcaactggctcactctggccgaacagtctctcaacatagcttccccaccatccctgatcctgaatactgttctgtcccagatcgaagagcataaggtctttgccaatgaggttaatgctcatcgcgatcagattattgagctcgaccaaaccggaaaccaattgaaattcttgtctcagaagcaagatgtcgtcctgataaagaatctgctggtaagcgtgcagagcaggtgggagaaggtggtgcagcggtcaatcgagagagggagatccctggatgacgcccgcaaaagggccaaacagttccacgaggcctggaagaaactgatagactggttagaagatgccgaatcacatctggattccgaattggagattagtaacgacccagataagattaaacttcagctgtccaaacacaaggaatttcagaagaccctgggggggaaacagcccgtgtacgatactacaatccggactggtcgggcgttgaaagaaaaaaccctgctgcccgaggactcccaaaagctggacaatttcctcggcgaggtgcgtgataagtgggataccgtatgtggcaaaagtgtcgaacgccagcacaagctggaagaggccctgttattctcagggcaattcatggatgctctccaggcacttgtggattggctgtataaagttgaacctcagctggccgaggatcaacctgtgcacggtgatctcgaccttgtgatgaatctaatggacgcccacaaagttttccagaaagaactgggcaagcggaccggcaccgtacaggtcctgaaaaggtctggaagggagttgatagaaaattctagggacgacacgacatgggtcaaggggcagctgcaggagctctcgaccaggtgggacacagtgtgcaagctttctgtgtccaaacagtctcgtctggagcaagccctcaaacaagctgaagttttccgggacactgttcacatgctgcttgagtggctgtctgaagccgaacagacactcaggtttcgtggagcgctgccagacgataccgaggcgctgcaatcacttatagatacacataaggagtttatgaaaaaggtggaggagaagagagtggacgtgaactctgctgtcgccatgggcgaagtgatacttgcggtatgtcacccagactgtatcaccaccataaaacactggataactatcatacgcgccaggttcgaagaagttctcacttgggccaagcaacatcagcaacgcctggagacagccctgtctgagttagtggccaatgcggagctcctcgaggaacttctcgcatggatccagtgggccgaaactaccctgatccaaagggatcaggagcctatcccgcaaaacattgatcgagtcaaggctctgatcgccgagcaccagacattcatggaggaaatgacgcggaagcagcccgacgtggatagggtaacaaagacctacaagcggaaaaacattgaaccaactcacgccccttttatcgaaaagtccagaagtggcggtcgcaagagtctttcacagccaacacctccgccaatgcccattttatcacagtctgaagccaaaaacccgagaatcaatcagctgtccgcacggtggcagcaggtgtggttgctagctttggagaggcagcgcaagctgaatgacgcactggaccgcttggaagaactaaaagagttcgcgaacttcgatttcgacgtctggcgcaaaaagtacatgagatggatgaaccacaagaagagtagagtcatggacttttttaggcggattgacaaagatcaagacgggaaaatcactagacaggagttcatcgacggcatccttgctagtaagtttccaacgactaaactcgagatgacagccgtggccgatatctttgaccgggacggagacgggtacatcgattattatgagttcgttgcagctctacatccgaataaagatgcctataggccaactactgatgctgataaaatcgaggacgaggtgacccgtcaggtagctcaatgtaagtgtgcgaagcggtttcaggtcgagcagattggagaaaacaagtaccgctttggcgattctcagcagctccgcctggtgcggatcctgagatcaaccgtaatggtgcgggtgggcgggggttggatggccctcgatgaattcctagtcaaaaacgacccatgtcgtgccagaggacgcaccaacatcgagctgcgcgaaaagtttatcctaccagagggtgcatctcagggaatgactccctttagatctcgaggcagacgtagtaaacctagctcacgtgcagcaagtccaactagatcttccagctctgcctcacaatcaaaccactcttgcactagtatgccatccagccccgcaacgcctgccagcggtactaaagtgatcccttcttccggatcaaaactcaagagacccacgcccacattccacagttcgaggacttctctggccggcgataccagcaattcaagcagcccagcttccactggcgctaagactaatagggctgacccaaagaaatctgctagcagacccggttcgagagcgggcagccgagccggatcgagagcctcatcgaggcgcggatcagacgccagcgacttcgacctgctggaaactcaatctgcttgttcagacacaagtgagtcgagtgccgccgggggtcagggcaattctcggcgggggctgaacaaacctagcaagattcctactatgtcaaagaagacgacaacagcctctcctcgtactcccggccccaagaggtag

SEQ ID NO: 124347 - DNA, 16293 bp, synthetic construct
  misc_feature 1..16293: note = Description of Artificial Sequence: Synthetic coding sequence
  source 1..16293: mol_type = other DNA
atgtcctctagcgacgaggaaaccctgtctgagcggagttgccgatccgaacgctcttgccgttcggagaggtcctataggtcagaacgttctggttcccttagtccttgcccacctggagacacactgccctggaacctgccacttcacgagcagaaaaagagaaaatcacaggacagtgtactggacccggctgaacgagccgtggtgagagtggctgacgaacgggatcgagtgcaaaaaaaaaccttcactaagtgggtgaacaaacatctgatgaaggtgcggaaacatatcaatgacctgtatgaagacctgagggacggtcataaccttattagcttgctggaagtccttagcgggattaagctgcctcgggagaagggacggatgagattccatcgcttgcagaacgtgcagattgcactggattttttaaaacagaggcaggttaaactcgtaaacatccggaatgacgacatcactgatggaaaccccaaactgacccttgggcttatctggaccatcatcctgcactttcaaatcagtgacatctacatttcaggagagtcaggggacatgtcagcgaaagagaaattactgctgtggacccaaaaagtaaccgctggctataccggcataaagtgtactaatttcagctcttgttggtcagatggtaagatgtttaacgcgcttattcacaggtacaggccggatcttgttgacatggaacgtgtgcagattcagtccaatagggaaaatctggaacaggcctttgaagtggcggaacgtcttggagtgacgcgcctgcttgatgccgaggatgtcgacgttcctagccccgatgagaagagtgtcatcacttacgtgtcaagtatctacgacgcgtttcctaaagttcccgaggggggagagggaatctcagcaaccgaagtcgactctcgatggcaggagtaccagtcaagagtggacagcctcattccctggattaagcagcatactatcctcatgtcagataagaccttcccccagaatccggtcgagttgaaagccctatataatcagtatatacactttaaggagactgagattctcgctaaagagagggaaaagggtagaatcgaggaactctataagctcttagaggtctggatcgaattcggccgcatcaagctgccccagggatatcacccaaacgatgttgaagaggaatggggaaaattgataatcgaaatgttagaaagagaaaaaagcctgaggcctgccgtagagaggctcgaattattgcttcagatcgccaacaagatccagaatggtgccctaaattgcgaagagaaacttaccctcgcaaagaatactctacaggccgacgcggcccacctggagagcggacagcctgttcagtgtgaatccgatgtgatcatgtacatccaggaatgcgaaggactcatcaggcagctacaggtggatctgcaaattttgagggacgagaactattaccaactagaagagctggcattcagagtgatgcggctgcaagacgagctggtgaccttgagactcgagtgcaccaacctatatcgaaaaggacactttacgtctctggagttggttcccccatcaacattgacaaccacccatcttaaagccgaaccactgacaaaggccacccacagtagtagcactagttggtttaggaaaccaatgacccgtgcagaactggtggcaatcagctcgtctgaggacgaaggaaacctgcgcttcgtgtacgaactcctttcctgggtggaggagatgcaaatgaaactggaacgcgccgagtgggggaatgacttgccctccgtggaacttcagttagagactcagcagcatatacatacttctgttgaggaactaggttcgtctgtaaaggaagctaggctgtacgaagggaagatgtcacagaactttcacacctcctatgcagagaccttgggcaagctggaaactcagtattgtaagctcaaggaaacaagcagctttcgcatgcgccatctgcagagcctccataagtttgtttcgcgagccaccgctgaactgatctggcttaatgaaaaggaagaggaagagttggcctacgactggtccgataacaactccaacatctcggcgaagcgaaattatttttctgaactcacaatggaactcgaggagaagcaggacgtgtttcggagcctacaggataccgccgaactacttagtctagagaatcacccagccaagcagactgtagaagcatatagcgccgccgtgcaatcccaattgcaatggatgaaacagttatgcctttgtgtggaacaacatgtgaaagaaaacacggcttatttccagtttttctccgatgcccgtgaactggaaagctttttaaggaacttgcaggacagtatcaagaggaagtactcttgtgatcacaacactagtctctcccgactagaagacctcctgcaggattccatggatgagaaagagcagctaattcagagtaagtcttctgtggccagcttagttgggcggtccaagacgatagtacagctgaagcccaggagtcccgaccacgttctcaagaacacaatttcagtcaaagcagtctgcgactataggcagatagaaatcactatatgcaaaaacgacgaatgcgttctcgaggacaactcccaaaggacaaagtggaaggtcataagtcctactggcaatgaagccatggtgcccagcgtctgctttctaatccctcctcctaacaaggacgccattgagatggcatcaagagtggaacagagctatcagaaagtgatggccttgtggcaccaactgcacgtgaacactaagagtctgataagttggaactatctccggaaagacttggatctggtccagacatggaacttggagaaactgaggtccagcgcgccaggcgagtgtcaccaaatcatgaaaaatttacaagcccactatgaggacttcctgcaggattcccgagattccgtcttattttctgtagccgatcggctgaggctcgaagaggaagtcgaggcttgtaaagcaagatttcagcatctcatgaaatccatggaaaatgaggacaaggaagagaccgtcgccaagatgtacatatctgagctgaagaacatccggctccgcttggaagagtacgaacagagagtcgtgaaaagaatccagtctttggccagcagccggacggaccgcgacgcctggcaggataacgccttacgcatcgcggaacaggagcacacccaggaggatttgcagcagctgcgctccgacctggacgccgtgtccatgaaatgcgactcttttttgcaccagagcccaagctctagctccgtgcccaccctccgctctgaattgaatctcctcgtggaaaaaatggaccatgtgtacgggctctccactgtctatctaaataagctcaagaccgttgatgtcatcgtgcgcagcatccaggacgcggaactactggtgaaggggtatgagatcaagctgagccaggaagaggtagtactggctgacctcagcgccctcgaagcccactggtccacactgcgacactggctaagcgacgttaaggacaagaacagtgtctttagtgtgctagacgaggaaatagccaaagccaaagttgtggcagagcagatgtcacgtctgacacctgagcggaatctggatctagagcggtaccaggagaaaggatcccagcttcaggagcgctggcatagagtcatcgcccagctcgagataagacagtctgaactagagtccatccaggaagtccttggtgattaccgagcttgccatggcaccctaatcaagtggattgaagaaactactgcacaacaggagatgatgaaaccagggcaagctgaagatagcagagtgctcagcgaacagctgtcacagcagaccgccctgttcgctgagattgagagaaatcagactaagctggaccagtgtcagaagttcagtcaacagtattcaacaatcgtgaaggattatgagctgcaactgatgacgtataaggctttcgtggagtcccaacagaaatctcccgggaaacgacgcagaatgctgtcatccagcgacgccattacgcaggagtttatggacctcagaactcgttacactgcactcgtcaccctgactacacagcacgtgaaatacatatccgatgcactgcggcgactggaggaggaggagaaggtggttgaagaagagaaacaagagcatgtcgagaaagttaaagaactcctgggttgggtgtctacactggcgcggaatacccagggaaaagctacctcatccgagaccaaagaaagtacagacatagagaaagccatattagagcaacaggttctgagcgaggagctgacaactaaaaaggagcaggtgagtgaggccataaagacgagccagatattcctggccaaacacggtcacaaactgagtgagaaagaaaaaaaacaaattagcgagcagctcaatgccctgaacaaagcttaccatgatctgtgtgatggaagcgccaaccagctgcagcagctgcagagccagctggcccatcagaccgaacaaaagacactgcagaaacagcagaacacctgccatcagcagctcgaagatttgtgttcttgggtggggcaggccgagcgagcattagcgggccaccagggtcgaaccacccagcaggatctgtccgcacttcagaaaaaccaatccgatcttaaggatctgcaggatgacatccaaaacagagcgacgagctttgctacggtcgtgaaggatattgagggctttatggaagaaaaccagacaaaattgagcccgagggagctcacggctctgcgagaaaagctccatcaggctaaagagcagtacgaagcactgcaggaggaaacccgggttgcacagaaagaactggaggaagccgtcacctcagctcttcagcaggaaaccgagaagagtaaagccgctaaggaactggcagagaataagaaaaagattgatgcacttctggattgggttacaagtgtaggtagctcaggaggccagttgctgaccaaccttccgggaatggaacagctttcaggcgcctcgctggaaaagggcgctttggacactacagacggatacatgggcgtaaaccaagctcccgagaaactggacaagcagtgtgaaatgatgaaggctcggcaccaggagttgctgtcacagcagcagaattttatcctagcaacccagtccgcccaggcatttttagaccagcatggtcacaatttgaccccggaggagcagcagatgcttcagcagaagctaggggagttgaaagaacaatactccaccagcctggcacagtctgaggccgaattaaagcaagtccagaccctccaagacgagctgcagaagtttttacaggatcataaggaatttgaatcctggctggagcgcagtgagaaagagctagagaacatgcataaaggagggtccagtccagaaaccctgccgtctctgctcaaaagacaaggcagctttagcgaagacgtcatttcacataagggcgacctgcggttcgtcaccataagtggccagaaggtgcttgacatggaaaacagttttaaggagggcaaggaaccgtctgagataggcaatctcgtgaaagacaagttaaaggacgccactgaaagatacacagccctgcattctaaatgcacgaggctggggagtcaccttaacatgctcctgggccagtaccaccagttccaaaacagtgccgacagtttacaagcgtggatgcaggcgtgtgaagctaatgtcgaaaaattgctgtcggataccgttgcctctgatcctggagttttgcaggaacagctggccacaactaaacagctgcaagaggaacttgccgagcaccaagtgcccgtggagaaattgcagaaggtggcacgcgacatcatggagatcgaaggcgagcctgccccggaccacagacacgtgcaagaaaccacggacagcatcctttcccactttcagtccctgtcttactccttagctgagcgttctagcttactgcagaaagctatcgctcagtcacagtccgtgcaagaatcactggagtctctgctgcaatcaataggtgaggttgagcagaacctggagggcaagcaggtatcttccctgtcttcaggcgtgattcaggaggcacttgccacaaatatgaaacttaagcaggacattgctcggcagaaaagttcactggaggccacaagggagatggtgacaaggtttatggagactgctgacagcacgaccgccgcagtactgcaaggcaaactcgctgaggtgagtcagaggttcgaacagttgtgtcttcaacagcaggagaaggagtcctcactgaagaaactgctcccccaggctgaaatgtttgaacacctgagtggaaagctccagcaattcatggagaataaaagccgtatgctggcctcagggaatcagcctgaccaggacataacacacttctttcagcagatacaggagctcaatctggaaatggaggaccaacaggaaaacttggacacacttgagcacctcgtgaccgagctctcctcctgtgggttcgccctggatctctgccagcaccaggatcgcgttcagaacctgaggaaagactttactgaactccagaagaccgtgaaggagagggagaaggatgccagcagttgtcaggagcagttggatgaatttcggaagctcgtccgtacattccagaaatggcttaaagaaaccgaaggatctattccccctacggagaccagcatgtccgccaaagaattggaaaagcaaattgagcacctgaaaagcctgctagatgactgggcgagcaaaggaaccctcgtggaggagatcaactgtaaaggaacttccctggagaatttaattatggagatcacagctcccgattcacaagggaagactgggtcaattctgccgagtgtggggagctctgtgggctccgtaaacggttatcacacttgtaaagacttaaccgagatccagtgtgatatgtccgatgtaaatttgaaatatgaaaaattgggtggggttctacatgagaggcaggaaagtctccaagccattctcaaccgaatggaggaggtgcacaaggaggcaaacagtgtgctgcagtggctggagagcaaggaggaagttctgaagtctatggacgcaatgtcttcaccaaccaaaactgaaacggtcaaggcccaagccgagtctaacaaggcctttctggccgaattagaacagaactcacctaagatccaaaaggtgaaggaggctctcgcgggcctgctcgtgacttatccaaattcccaggaggctgaaaattggaagaagattcaagaagaattaaacagcagatgggagagagctacggaggtgactgttgcccgccagaggcagctcgaggaaagcgcctcccacttggcatgtttccaggcagccgaatctcaactgagaccctggttgatggaaaaagaattgatgatgggcgtattggggcccctgtcaatcgacccaaacatgctgaatgcccaaaagcagcaggtacagtttatgctcaaggagtttgaggccaggcggcaacaacatgagcaactgaatgaggcagcccaggggatcctgactgggcccggagatgtttccctgtccactagccaggttcaaaaggaactgcagagcattaatcagaagtgggtggaacttaccgacaagttaaacagtaggtcttcccaaatcgaccaggccattgtgaaatcaacacagtaccaggagctgctccaagacctttccgaaaaggtgagagcggtgggccagcggttatcagttcagtctgccatctctactcagcctgaggcagtgaagcagcaacttgaggagacatctgaaatccggtccgacctggaacagctggaccatgaggtgaaggaagctcaaacactgtgcgacgaactgagcgtccttatcggcgagcaatatctgaaagatgagttgaagaagcggttagagacagtggctttaccgctccagggactcgaggatttggctgcagatcggatcaatcgtctccaagctgccctcgcttcaactcagcaattccagcagatgtttgacgagctcaggacctggttagacgacaagcagtcccaacaagcgaaaaactgccccattagtgctaaactggaacggcttcagtcacagctgcaggaaaatgaagagtttcagaaatcactgaatcagcattctggctcctacgaagtcattgtggcggagggcgagtccctcctgctgtccgtgcctcctggagaggagaagagaacactccagaaccagctggttgagttgaaaaatcactgggaggaactctctaagaagacagcagatcgccagtctcggctgaaagactgtatgcagaaagcacagaagtaccaatggcacgtcgaagacctcgttccatggatcgaagattgtaaggcgaagatgtccgagttgcgcgtaaccctggaccctgttcagctcgaatccagccttctccgctcaaaggctatgttgaacgaagtagagaagcgcagaagtttgttggaaatactgaactcagccgcagacatcctgatcaactcctcagaagctgacgaggacggcatccgcgacgaaaaagccgggattaatcaaaacatggacgcagtgaccgaggagttgcaggccaagacagggtcgctagaagagatgacacagcgcctaagggaattccaggaatccttcaagaacatagaaaagaaagtggagggagccaaacaccagctggagatttttgacgccctaggatcccaggcctgctcaaataaaaaccttgagaagctgcgcgcccagcaggaggtcctccaagcattagaaccgcaggtggactatctccgcaacttcacccaggggctggtggaagatgcccctgatgggtcggacgcaagccaattgctgcaccaggcagaggttgctcagcaggaatttctcgaagtgaagcagagggttaacagcggctgcgtgatgatggaaaacaagctggaggggatcggtcagttccattgtagggtgcgagaaatgttctctcagcttgccgatctggatgatgagctcgacggaatgggggcgattgggcgcgacacggattctctgcagagtcaaatcgaggatgttagactgttccttaacaaaatccatgtcctcaaactggacatagaggcctccgaagccgagtgcagacatatgctggaggaagaaggaaccttagatctactcggactgaagcgggagctcgaggcgttgaataagcagtgcggaaagctcactgaaagagggaaggccaggcaggagcaattagagctgactctgggccgtgttgaggatttctatagaaaacttaagggactgaatgacgcaactacagcagctgaagaggcagaggccctgcagtgggtggtgggcaccgaagtggagatcataaatcagcaactcgccgatttcaagatgttccaaaaagaacaggtagacccccttcagatgaaactgcagcaggtaaatggtctaggccagggactcatacagtccgccgggaaggattgtgatgttcagggactggaacatgacatggaggagatcaatgctaggtggaatactctgaataaaaaggtggcccagaggatcgcccaactgcaggaggcactcctgcattgcgggaaatttcaggacgccttagaaccactgttgtcctggctggccgataccgaagagctcatagccaaccagaaaccccccagtgcagaatacaaagtggtgaaagcccagatccaggaacagaagctgctccagaggttgttggatgaccgaaaggcaactgttgacatgctgcaggcagagggagggagaatcgcacaaagtgctgagctggcggaccgtgagaagattacggggcagctcgaatcattggagtcacggtggaccgagctactgtctaaagccgctgcaaggcaaaaacagcttgaggacatcctggtattagccaaacagtttcacgaaaccgctgaaccaatctctgattttctgtctgtgacagaaaagaagcttgctaatagtgagccagtgggaacccaaaccgcaaagattcagcagcagatcataaggcacaaagcactggaggaggatattgaaaaccacgcaaccgatgtccaccaggccgtcaagatcggacagagtctgagttccctgacaagcccagccgagcagggtgtcctgagtgaaaaaattgactctctccaggccagatactccgagatacaggatagatgctgtcgcaaggccgctctgttggatcaggccctgagtaacgcccgattattcggagaggatgaggttgaggtgctcaattggttagcggaagtcgaggacaagctgtcctccgtcttcgttaaagacttcaaacaggatgtcctccaccgacagcacgcagatcatctggctttgaacgaggaaatcgtcaaccggaaaaagaacgttgaccaggcaatcaaaaatggtcaagctctgctgaaacagaccacaggcgaggaggtattactcatccaggagaagctggatggcattaaaacccgatacgccgatattacagttacctccagtaaggcactaagaaccttagagcaggcccgtcagctggctacaaagtttcagagtacctatgaagagctgaccgggtggctgagggaggtagaagaagagctggctacatccgggggccaatctccaacaggggagcagatcccgcagtttcaacagagacaaaaagaactaaaaaaggaggttatggagcaccggttagtgctggatacagtaaacgaggttagcagggccttgctggaattagtgccttggcgcgcccgtgagggactagacaaattggtctctgatgccaacgaacaatacaagctagtctctgatacaataggacaacgggtggacgaaattgatgcagcgatccagcggtcgcaacagtatgagcaagccgctgatgcagagcttgcctgggtggcagaaaccaagcgaaagctgatggcacttggcccaattcgcctcgaacaagatcagacgactgcccaattacaggtgcagaaagccttctcaatcgacatcatcagacataaggatagcatggacgagcttttttcgcaccggtctgagatttttggcacttgcggcgaggaacagaaaacagtgctgcaggaaaagacagaatccttgatccagcaatatgaggctatctccctattgaattctgaacgctacgccagactggagagggcccaggtcttggtaaaccagttctgggaaacatatgaggaactttccccatggattgaagagacaagggctctaatcgcgcagcttccctctccggcgattgaccacgaacagcttagacagcagcaggaggagatgaggcagttgcgcgaaagcatcgctgagcataaacctcatatcgataagctcctcaagattggtcctcagttaaaggagctcaaccctgaggaaggcgagatggtggaggagaagtaccagaaggccgaaaacatgtatgcccagatcaaggaggaagtaagacagcgggctttggcattggacgaggcggtgtcccagtccacgcagattacagaattccacgacaagatcgaacccatgctcgagactctggaaaatctgagttcgagactccggatgccaccattaattccggctgaggtcgacaaaatcagagaatgcatatccgacaataaatctgccactgtcgagcttgagaaactgcagcctagttttgaggctttaaagaggagaggagaggagctgattggacggagtcagggggcagacaaggacctggctgcaaaagagatccaggataagctggatcagatggtgtttttttgggaagacatcaaagccagggcagaggagcgtgagatcaagttccttgacgttttggaattagctgagaaattctggtatgatatggcggcactcttgaccacaatcaaggatacccaggatattgtacatgacttagaatcccctggaattgacccctccattatcaaacaacaagtagaggccgccgagactatcaaggaagagactgacggcctccatgaggagctggagtttattcgaattttgggagccgacctgattttcgcgtgtggcgagaccgagaagccagaggtccgcaaatcaattgacgaaatgaataacgcctgggaaaacttaaacaagacatggaaggaacggctggaaaaactcgaggatgctatgcaggccgccgtgcaataccaggacaccctgcaagctatgtttgactggttggacaatacagtgatcaaactgtgtacgatgcccccggttgggacagatctaaatactgtgaaggaccagctgaatgaaatgaaagaatttaaggtcgaggtctaccagcaacagattgagatggagaaactgaaccaccagggagagctgatgctcaaaaaggcgacagacgagacagaccgagacattatccgcgaaccactgacagagctcaaacacctgtgggagaacctcggagagaaaattgcccacagacagcacaagctggaaggcgccctattagccctagggcagttccagcacgccctagaagaactcatgtcttggctgacgcacactgaggaattgctggacgcacagcggccaatttcaggagatcctaaagttatcgaggtggagcttgcaaaacaccacgtcctgaagaacgatgtgcttgcacaccaggccaccgtggagaccgttaacaaggcaggtaacgagctcctggaaagtagcgctggtgacgatgcgtcaagcctgcgatcccgcctggaggctatgaatcagtgctgggagtccgtactccagaaaaccgaggaacgggagcagcagctacagtctacccttcagcaggcccagggcttccattctgaaattgaggactttttgttagagctgacccggatggagtcccaattatctgcaagcaaaccaactggtggtttaccagaaaccgcgagggagcagctcgatactcacatggagctgtactctcagctcaaagccaaggaggaaacatataatcagctactggacaaaggacggctcatgcttctttctcgcgacgactcaggtagcgggagtaagacggagcagtccgtggccctgctggagcagaagtggcacgtcgtgagcagtaagatggaagaacgcaagtctaagctagaggaggccttgaatcttgcaaccgagttccagaatagccttcaggaatttattaactggcttacgctggccgagcaatctctcaatatagcctccccccctagcttgatcctcaacacggtgctcagccagatcgaggagcacaaggtgttcgccaacgaggtcaatgcacatcgggaccaaatcattgagttggaccagaccgggaaccaactaaagttcctctcacagaagcaggatgtggttctcattaaaaaccttctggtgtccgtacagagccgctgggagaaggtagtacagcggagcatcgaacgtgggcgctccttagatgatgcgcgtaagagagcgaagcaatttcacgaggcatggaaaaagctcatagattggctggaagacgccgagtctcatctggatagtgaattagagatcagcaatgatccagataaaattaaactccagctctcaaagcataaggagtttcagaagacactgggaggaaaacaacccgtttacgataccactatccgtaccggaagggccttaaaagagaagacgctcttgcctgaggactcacagaaacttgataactttctgggcgaagtgcgggacaagtgggacacagtctgcggcaagtccgtggagcgccaacataagttggaagaggctctgctctttagtggccagttcatggacgcactccaggcccttgtcgactggttgtataaagtcgagccgcagctcgccgaggaccaacctgttcatggcgacctggatctggttatgaatcttatggatgctcataaagtattccagaaggaacttggcaagcggaccggcaccgtgcaggtgcttaaacgttctggtcgtgagctgatagagaactccagagatgataccacttgggtgaagggccagttacaggaactgagtacacgctgggacaccgtgtgtaaattatcagtgtccaagcagtctcgcttggaacaggctttgaagcaggccgaggtcttcagggacacagtacacatgcttctcgaatggctgtctgaggcagaacagacactgagattccgcggagccttaccagatgacactgaggcattgcagtcactgattgatacgcacaaggagttcatgaagaaggtagaggagaaaagggtggacgtgaatagcgcggtcgctatgggggaggtgatattagccgtctgccaccccgattgcattactacaatcaagcattggatcactatcattcgggccagatttgaggaggtgctgacttgggcgaagcaacaccagcaaaggttggaaaccgctctttccgagttggtggccaatgccgagctgttggaggagctactggcgtggatccagtgggccgagacaaccttaatacaacgtgaccaggagcccattccccagaatatagatagggtgaaggctcttatcgctgaacaccagacctttatggaagaaatgacaagaaagcagcccgacgttgaccgcgtgaccaaaacatacaagagaaaaaatatcgaaccgacccacgccccgttcattgagaaatctagaagcgggggacgaaaatctctgtcccagcccactcccccaccaatgcctatcttgtcccagagtgaggccaagaatccacgcattaaccaattatctgctcggtggcaacaggtgtggctccttgccctggaacgacagaggaaactgaatgatgcactagacagattggaagaactgaaggaattcgctaacttcgatttcgacgtatggaggaagaagtacatgcggtggatgaaccacaagaagagcagggtcatggacttcttccgacgtatcgataaagaccaggatggcaagatcacccgacaagaatttatcgatggtattctggcctctaagttccctacgacaaagttagaaatgactgcagtggcagatatcttcgacagagacggcgacggatacatcgactattatgagtttgttgctgctttgcatcctaacaaagacgcatacaggccgaccaccgatgctgataagatcgaggacgaggtaacaaggcaggttgcacagtgcaagtgtgcaaagaggtttcaagtggaacagattggcgaaaacaagtaccgctttggtgactctcaacagctccgcctggtccggatacttcggtctacagtcatggtaagagtagggggcggctggatggccttggacgaattcttagttaagaacgacccatgtcgggctagaggtcgtactaacatagaacttagggaaaagtttatcctccccgagggagcatctcagggaatgacaccttttcgcagtagaggccgacgcagtaaaccctcatcccgagctgcttcaccaaccaggtcctcctctagtgcgtcacagtctaatcactcttgtaccagtatgccaagttccccagcaaccccagcctccggcactaaggtgatccccagctccggaagcaagcttaagagacccacccctacttttcattctagccggaccagcctcgccggagacacaagtaattcttcatccccagcctcaacaggagccaagacgaatcgggccgatccgaaaaaaagtgccagccgacccggatccagagctgggtccagagccgggagccgtgcctctagtcgcagaggctccgacgcatcggactttgaccttctggagacacaatctgcctgtagtgacacctccgaaagtagtgctgccggtggccagggtaactcccgtagaggactgaataagcccagcaagattccaaccatgtctaagaagaccacaactgcctccccccgcaccccaggtcccaagaggtag

SEQ ID NO: 124348 - DNA, 3189 bp, synthetic construct
  misc_feature 1..3189: note = Description of Artificial Sequence: Synthetic coding sequence
  source 1..3189: mol_type = other DNA
atgggtaatagcctaggctgctttaaggagcctaaagagtccattgcaataccggaaaaggcacccattagccccaagaagcgggtgcgcttcaagaggaggtggcgcggtaaaaagatcccgacaccagaggccagtcaccaggaggaaacttctgagggtaccggggtgattgaagagaccgagacactcaccaagctgacagaatcactacaaaaggaggatggagtcggcggagtagagcacacaccacctgacatactgctcccaggagacagcgcccctaattctagagtggtggaccgcggaatgattgtgcaggtgaaagagcgctttcagggggaggtgcagacagcgcacttgttactcgagaacgagtctagtgtagccgggggcgtgtgggacagcctggaagaggggatgaccgttatcgctcatttgctggacaaccctgctgaaagaaactgtgaaaagagcgtgtcccagctggtcgagtttcccagaactgctagttgtagcagtcgggcagttttgctcccactgcagggcgagactgctgtcgagaaggggaatatccagcgagggttccggagctgcgcactcccccgcactgactaccccacagataaaggcaatcaggagcagttttcagaagggtggtcagtggaggaggggaccaagagcgtgtcaggcgctccgcaaacggcctcctggatcatcgagtgttcagtgtcttccttactccttgatcagcccgggggccagcgccgcactgagccgtcccacgtcgggcaggtccccccgcaggattccaggttgcctacttcccaaagcgacctgtcaatatcaggtgtgaccgtttctatcctcccttcaagcagtggttacggaagcgatgggccccacatccacgggattcagcctaaggacaccgagcctgagaagtctagcaccagcttcagtgaggaagatggtacactctccttggaagccagccacactccctcatggggactcgaggagatttctgacatctatattagcggagagagcggagacatgtctgccaaagagaagctgctcttatggacgcagaaagtcacggccggatatactgggatcaagtgtacgaatttttctagctgttggtcagacggaaagatgttcaatgctttaatccaccggtacaggcccgacctggtggacatggaacgggtgcagatccagagtaaccgcgagaatcttgaacaggcgtttgaagttgcagagaggctcggggtgactagacttctcgacgctgaggacgtcgacgttcccagcccagacgagaagagtgtgatcacctacgtcagttccatctacgacgcgttcccaaaggtgcccgagggcggtgaaggaatttcagcaacagaagttgatagtaggtggcaggaatatcagagtcgagttgacagtctcataccttggattaaacaacacaccatactgatgtccgacaaaacctttcctcagaaccccgtggagttgaaagcactctacaaccagtacatccatttcaaagaaaccgagatcctggccaaggaacgggagaaaggaaggattgaggaactttataagcttctcgaggtgtggatcgagtttggacgcattaagctgccccagggttaccatcctaacgatgtcgaggaagaatgggggaaactcatcattgaaatgttagagagggaaaagtccctacgaccggccgtagagcgtttggagctgctcctgcagattgccaacaaaatccagaacggggcattaaattgtgaagagaagctcaccctcgccaagaatactctacaagctgacgccgcccatctggagtcaggtcagccagttcaatgtgagagcgatgttatcatgtatatccaggagtgcgaggggttgatccgtcagcttcaggttgatttacaaattctgcgtgatgaaaattactaccaacttgaggagctcgcctttagggttatgcgattgcaggatgaactggtcactcttcggctggaatgcaccaacctgtaccgtaaaggccattttacgtcactggaattagtcccgccatcaaccctcactaccactcatctcaaggctgagccgctcaccaaggccacacatagctcttctacctcttggtttcgcaaacccatgacccgagccgaactggtggccatctcctccagtgaggatgagggtaaccttagatttgtgtacgaactcctgagttgggtggaagaaatgcaaatgaagttggagagagccgaatgggggaacgaccttcctagcgtggaactacagctcgaaacgcaacaacatatccatactagcgtcgaagagctgggatcatccgtgaaggaagcccgcttgtatgaggggaagatgtcacagaactttcacacaagttatgcagagacccttggcaaactggaaacccagtactgcaagttgaaggagacatctagctttcggatgcggcacctgcagtctcttcataagtttgtgtctcgggctacagctgaactcatttggctaaatgagaaggaagaagaggagttagcatatgattggtccgataacaattccaacatttcagccaaaaggaattacttttccgagttgacaatggagctcgaggaaaaacaagatgtattcaggtccctccaggataccgcagaactacttagcctggagaaccaccccgctaaacagaccgtggaggcatactccgctgccgtccaaagccagctacagtggatgaagcagctgtgtttatgtgtagagcagcacgtgaaggagaatactgcatattttcagtttttttcggacgcacgggaactggagtcattcctccgcaacttgcaggactccattaaacgtaagtatagctgcgaccataacacatctctgtccaggctcgaggatttgcttcaggattccatgtttcaggacgaaaaagagcaattgatccagagcaagtcatcagtggcctcactggttggacgctctaaaaccattgtacagctcaagcctcgcagtccggatcatgtgttaaaaaatacgattagcgtgaaggcagtgtgtgactatagacaaattgaagggcggaccattttatccgagggatatggtcccttggcgagcgctgcttgttag

SEQ ID NO: 124349 - DNA, 22167 bp, synthetic construct
  misc_feature 1..22167: note = Description of Artificial Sequence: Synthetic coding sequence
  source 1..22167: mol_type = other DNA
atgtcaagttcggacgaggagacgctgtccgaacgttcctgtcgatcggagcggtcttgtcgtagtgagcgatcataccgtagcgagagatccgggagcctttctccctgcccccccggagataccttaccttggaacctccccttacacgagcagaaaaaacggaagtctcaagactctgtgcttgatcccgctgagcgagcagtggtcagagtggccgacgagagggacagagtgcagaaaaagacttttaccaagtgggttaacaaacatctcatgaaagtgcgtaaacatattaatgacctgtacgaggaccttcgcgacggtcataaccttatctcactcctggaagtcctgtctgggataaagctgccgcgagaaaagggacggatgcggttccacaggctgcagaacgttcaaatcgcccttgattttctaaaacagcgtcaggtgaagctggttaacattcgcaacgatgacattacagatggcaatcctaagttaacactgggcctcatctggactataattctgcacttccaaatctctgatatatacatctcgggcgaatctggggatatgtcagcaaaggaaaagctcctcctgtggactcagaaggtgaccgcgggatacacagggataaagtgtaccaacttctcgtcctgttggagtgatggtaagatgttcaacgccctgattcaccggtaccgaccggacctcgtggatatggagagggtccaaatccagagtaatcgggagaacctggaacaagctttcgaggtggcagagcgactgggagtgacacgtctcttggatgcagaagacgtagatgtgccctctccggacgaaaagtccgtcataacatacgtgtctagtatctatgacgctttcccgaaagtgccggaagggggcgaaggtatcagcgctaccgaggtggacagccggtggcaagaatatcagagtcgggtggattctttgatcccctggataaagcagcacaccatcctgatgtcagacaagacctttcctcagaacccggtggagttaaaagctctctataaccagtacattcacttcaaggagacagagattctggcaaaagaacgcgaaaagggaagaattgaagagctttataagctgcttgaagtatggattgaatttggccgaatcaaactcccgcaaggctatcacccgaacgacgttgaggaggaatggggcaaactgattatcgagatgctggaacgggagaagtccctgaggccagccgtggaaaggctcgagctgctcctgcagattgccaataagatccagaatggtgctctcaactgtgaggagaagttgactctcgccaagaatacattgcaggctgatgctgctcacctcgagtcaggccagcccgtgcagtgtgaatcagatgtcatcatgtacatacaagagtgcgaaggcctgattcggcagcttcaagttgatctgcagatcctgagagacgaaaactattaccaactggaagaacttgccttccgggtgatgcggctccaagacgaattggtcacattgaggctggagtgcacaaatctgtatcgtaagggccacttcacctctctggaattagtgcccccaagcacgttgactaccacccaccttaaggctgagcctctgactaaggcaacacacagcagctcaacatcgtggtttcgtaagcctatgaccagggctgaacttgtcgccatttcgagctctgaggacgaggggaatctaaggttcgtttacgagctcctgagctgggtcgaggaaatgcaaatgaagttggagcgagctgaatggggcaatgacctcccttctgtcgagctgcaattggaaactcagcagcatatccacacctccgtcgaagagctaggtagttccgtcaaagaggccagactgtacgaaggcaagatgtctcaaaattttcatacctcctacgccgagaccctgggtaagttagaaactcagtattgcaagctgaaggaaacttctagcttccgcatgcggcacttgcaaagtctgcacaagttcgtctcaagggcaacggccgagctgatttggctcaatgagaaggaggaggaggaactcgcgtatgactggtctgataacaactctaacattagcgcgaaacgtaactatttttccgagctgaccatggagcttgaggaaaaacaggatgttttccgcagtcttcaggatacggccgaactgctctctttggaaaaccatccagctaagcagactgtggaggcttactcagcggctgtgcaaagccagctgcagtggatgaaacaactgtgtctctgtgttgaacagcacgtgaaagagaacacagcatactttcagttcttctccgatgcccgagaactcgagagttttctccgaaatctccaggattccataaagcgaaagtattcctgcgaccacaacacctcgttgagtaggctagaagatctgctccaggattccatggatgaaaaagagcagctgattcagagcaaaagcagcgtcgctagcctagtgggcagaagcaaaactatcgtgcagctgaagccaaggagtcccgatcatgtgctgaaaaatacaatctctgtcaaggccgtctgtgattatcggcaaatagagattaccatttgcaagaacgacgaatgcgtactggaggataattctcagcgaacgaagtggaaagtgatcagccccactggaaatgaagcaatggttcctagtgtctgcttcctgattccaccccctaataaggatgccatcgagatggccagtagagtagaacaatcctatcagaaggtaatggctttatggcatcagcttcacgtaaataccaagtccctaatctcctggaattatcttaggaaggatctcgacctcgttcagacgtggaacctggaaaaactacgctcctcagctccaggagaatgtcatcagattatgaagaatctgcaggctcattatgaggactttctgcaggattcaagagattctgtgctattctccgtggccgaccggctgcggctggaagaggaggtagaggcctgcaaagctcgctttcaacatctcatgaaatccatggaaaatgaagacaaagaggagacggtggccaaaatgtacatttcagaattaaagaacatccgcttaagactggaggaatacgagcaaagagtggtgaagcgcatccagtctcttgccagtagcagaaccgaccgagacgcttggcaagataatgcactccggattgctgaacaagagcatacacaggaggatctgcaacaactaagatcggatcttgatgccgtctctatgaagtgcgatagttttctccaccagtcacccagctcttcctccgttcccacccttaggtccgagctgaacctgctggtggagaagatggatcacgtttacgggctgtctacggtgtacctcaataagttgaaaacggtggatgtgatcgtgagatcaatccaggatgcggaactgctggtcaaaggatatgaaatcaagctcagccaggaagaagtggtcctggccgacttgtccgctcttgaggcccactggtccacacttcggcactggctctcagacgtgaaagacaagaactccgtgttcagcgtcctggatgaggaaattgctaaggctaaagtcgtcgcagagcagatgagtcggttgactcccgagaggaatctcgacttggaacggtaccaagaaaagggctcccaacttcaggagaggtggcatagggtaatagcccagctggaaatccgtcagtctgaacttgagtccattcaggaagttttgggggattatagagcatgtcacgggaccttaatcaaatggatagaggagaccactgctcagcaggaaatgatgaaacctggccaagccgaagacagtagagtgctctctgaacagcttagtcagcagactgctctgtttgccgagatagaacgcaatcaaacaaaactggatcagtgccagaaattttcacagcagtatagcaccatagtaaaggactatgagttgcaattgatgacttacaaagccttcgtggagtcacagcagaaatctccaggcaagcgccgccgtatgctgagtagcagtgacgccattacccaagagttcatggatctgcgcacccgctatactgcccttgttaccttgacaacacagcatgttaagtacatatcagatgccttgcgaagacttgaggaggaagagaaggtggttgaggaggagaagcaggagcatgtcgaaaaagttaaggaactgttgggttgggtgagcaccctggcccggaacacccagggcaaggcaaccagtagtgaaacaaaagaaagcaccgacatcgagaaggcgatcctcgaacagcaggtgctgagcgaggagttgacaacgaagaaagagcaggtgagtgaggccatcaaaacatcccagatcttcctggccaagcacggccacaagctctctgagaaagagaagaagcaaatttcagaacagttaaacgcattaaataaggcataccatgatctgtgcgacggctctgcaaaccagctacagcagctgcagtctcaattggcacaccagacagagcagaaggagtgccgggcagtcgccggggttatcgatctggggactgtagagattttcccgatcttcaaggctatgcagaagggcctgttggaccaggacacggggcttgttctcctcgagagccaggtcatcatgtccggcctaatcgccccagagactggggagaatctctctctcgaagagggcatcgcacgcaacctgataaatccacaaatgtaccagcagctgagggagcttcaagatgccttggccctgatatccaggctgactgagagccgtggaccactttccgtggttgaggctatcgaaaaaaggattataagtgaaaccgttggtctgaagattctggaggcccatctcgctaccggaggcttctcgctttctcccagcgaaaattgcattaatcttgaggaggccttccatcaggggctcattagcgcatggctgcacagcgtgcttgagtcatatctgcgtacctcgaaaaacctcattgatccgaacactgctgaaaagattgggctgctggatcttatgcaaaggtgtattgttcaccaggagtcagggtttaagctccttccagttaagcagcttgccggggggatggtctctttaaagtccggaaggaaagtcagcatcttcagagccgtgcaggaggggctcatcgacaggcaggtgactgtacgactgttggaggcacagttgtttgcggggggcattgtggacccacggacaggtcatcgactcactgttgaggaggctgtgagacacaaccttatcgatcaggatatggcctgtgccatcttgatccgtcagctgcaaactgggggaattatcgacaccgtcacaggacagcggctgactatcgacgaagccgtgagtaacgacctggtagccgctaagattgctttagtgatccttgaatccctgtggagtttcatgggtctcctctggccagaatcaggggagatccttcccattaccgatgcgctcgaacagggtatcgtttcaacagagttggcccataaaattctttctaatcggcaacacattaaggcattgtttcttccagctaccacagagatcctatcctggaagaaagccatcgagtccgggattttggatagagacttagccaacaacttaaagagtatatgcattccggacgtgatgccgcacatgcaactggcggacagcgccgaacagaacataaatccaggcgccgccgtcctgccttgttccaaatctcaccctaaggccaccgcctctcagtccgagaatctcctgttccagcttatgacccattcctatatcaacgttcagaacgggcagcggcttctgttgttggacaaggagctcatggaaacacttacgagcagagacgaataccaaaccagccccccaaaagttgtggaaatcggtcaccagcggcagaaaacacccgaggggctgcaagaaagtgccaacgtgaaaatctccggcacgttttcatccggatggactgtaagactgcccgagttccaatttagcagccagaataaggagtaccccgatagggaggattgcaccaccgagaaggggaaaaaaaccaccgtcgagacagaggattccagtgtggagaatccggagcaagacctgtttgtcgagcagaaggagaggaatccgaatatcgatgccctcaaagtgattaacaaagtcaaactggaggtccagcgacagctgatcggaactcaacgggaagatcagaccgcggtgagcgtccgagagaacgcatcaagaggacacttactcaccatccctccagccgaagctgagggagtccctttggttgttgacaaagatgtattttccgtcgaaacccctaagaaagagcaccagcctttacgcaacacatcattcacttgtcagaacgagcaagctcatactctggaaaccgagtacattcatgatgagactggagggagtcatattaagccacagagcaaaaagctgcaggtccaggtgaagaaaaccctcggcattaagcttgagctcaagtccgagactgacggcaacgtgcacccacttgataaaaaggagatgctcaagaagacatttctggctaaggacgatcataaggagagccaggaagcgcagaacattgccggcgggtctatgatgatgagtgaaaagacggatgaggaagatagtggcagggagattttcctgagctgcagccaccccctggagctcctcgaggaagccactctgaacgtgctgtccgcccagctactcgacgggggcatattccatgaacagaccggtcagaagctgctgctgaacgaggcaatctctcgtgggatcgtcccgagccacacggctgttaaactcatggaaaagttgaatatgtttcagggtttcttcgactctcaaacatgcgaaagccttaccacagaggaggtgataaacgaagggttgatggatgagaagctgttacataacgtgttgatggctgataaggccatctctggcgtccttgaccccagaacacaaactctgtgttcagtgaaggacgctgtgaccgtcgggctgctcgataaagagactgccacccggatccttgagcgtcaggtggtgacaggagggattattgacttgaagagggggaaaaaagtgtccgtgactttagcgtccaccctgggattggtcgacgttgccgaccagcccgagctcatcaatctcgaaaaggccagcaagggccgcgatgcggagaaaaccgtccgagagaggctcatttcattgcaaatggaaactaccggcctcattgatcctgattcaaaggcccccttaacagtggtacaatctatcgacagggggctcctggagagagaggaagccgtcagactgcttaccaagcaggtggttgatggaggcattattcatcatattagtggcatgcggctgagcgttgataacgcctttcgccatggccttataggcgaggacttggctgaaaagcttaaaagagtggaaaacctgaacatccaccagatttttaacccagaaacaaaggaaaacatcagcctgcctaaggccatcaaactggatctgattacatcagacttaaagcgcgaaatacaggaagttcaggcatttactggcaattttgtggacctgattagtggacagaggttaaccctggctgaggctaaaaaggaaggcctgctgactaacgaagcagtacttagtccaggaatgatgcatggcattgttgatcccgaaaactgtcggatagtgccatactctgaattagttaagaagtgcaaaatagatattgagagcggccagaggtatttggaagtgatcccctttagtgatataaaggatggggtgagcgacaaggtgctgactctaagccaggccatccagcttgggaaagtagactttgcttctactctcaaagtgctggaggcccaggccaatacaggtgggatcattgatactgctacaggaaagaggttgactctggcctctgccctcgaggagaagttggtggatgagaatatggttcggattattgccagccaccaggtcctaaatggcggaatagtagatatatttagcgatcagagagtaacgctcgtggaagccatagagaaacgactgatcagtccagaactagccaacatgattcagattgactcttctgaattcagtgaccatcgtgcccaaatcgaaaaacaggaagggatcgaggtgtgcgccctacaaaatgagtttcttggtaaggacatgttgatcgcctgcaaccagacggctgagatgtcttgtaataaagtggaagaaagtgaacggcttttccaggtggagaatcagagcgcacaggagaaagttaaggttcgagtttcagacggcgagcaggccaaaaagagtcgtgaaattagccttaaggaatttggctgcaaggatcaacggaagcccagaatgagctctgatgccaaagagtttatcagtatcatcaatccccataatcttaaaggcaagtcgctgggacaagtgtctctgactcacccgtacagcgagtgtgacttcaagctcaaagaagttgcccgaaataacatggggaacgataccaacgaagaacaagaaaaggccgtaactaaaatagaaattattagtcacatgaagcagagcaccagctgtttagatagtgaggaaattagagagaaccagggggaggtgattctcgaggtccaggagacatattgtgagactagcggcaagctccccagcgagcaggtcctgcagcagcccatgaatgcccgggtgaagtccaaacgggaaaaacgagaagtgatcgtagaggagtcaattagaacatgcaagccagccttcctcagtgaagagaagctgtatcaggaaaccgctatacgcgacgaacatgattcccacatcaaatcacagccacgagaaatgacatcttctgagaagggaaaagaggccgacactgagatggggttctcaatcacctttaagatcgaagaatccagttcgcaagtcgttccccaggggatcagcgttaagcacctggacgcattgacactctttagctcgaagcaggccaacgagggaaaggtcaataatttgtctctctgcctgactttgaagcccgaggagaatctgtcacgagaaatcgcctgtggcgctcagagtgagccctttccttgtatgacacccagaccggaggggttgcattatcaagagtcagacgggaaggcccaagtgaccggaccaagccaaatttccaaaaccgacaagagcttccagggcaccaccaggcaagaaaccaattaccaggactcttgggttacgtctaaaactaaagagacaaaacaccagatatctagctccaacgagtgcaaagagaagtcctaccaggaagtgtccttcgaccctgctcggggcttgaaactggaggaaatcaccgtgtcgcgtcctgattccaaagaggtacggtatctagaatttagcgatagaaaggacttgcaccatcagggctcaaaatccgatgataaactgtgcggaaccttgaagagcgaaatcgcgactcaagagcttactggcgagaagttccttgaaatggccaaccctaatgtggcagggttggaggcaggatcaatagaagacattgtgacacagaggggcagtcgcgtacttgggtcgtttctcccggagaagcttttcaagggcgtgagtcagaaagaaaacactggtcagcagaatgccattatctcccccacggttttagagacttctgaagaaaagacggtcagcttaacggtgtgctctgcggtgaaaacagaaaaaaccccccaggaaaaactaagagagagtcccggttccgagcaaacgccgttcatgaccgctcccgaggggaaggggaatggcggagtgaaccctgagcccttccgggcaactcagaatgtgtttacgaggcaactatgtctagagcacgacgaaaagctggtttcatatctgtcactgttacggaacatcgaaatgcgcaccaagcagattcagccgctcgagctcaatcttgctgagctgcaagacctcttatgccaagcgaaggtcctggaacgggaactgaaagacttgactacccttgtgtcccaagagcttgagtgtgtgaaccagattattataagtcagccccaggaagtgccagcccagctcctgaaggcgttagagaaagatgccaaaaatctccagaagagcctaagcagcgtctcagacacgtggaattcaaggcttctccactttcagaatgctgtggagatcgagaaaaccaaggtactgaatcagcacacccaactggaagggcggctgcaggatctaagggcttgggtgggcaataagaatctgatcctgaattcaaagggttctaactccgaaattgatgtggattccctgaacctctgcctacagcaatatgaggacctgaagcagccaatggcagaaaggaaggctcaattggatgctttagcctttgacattcagtttttcatctctgaacatgcacaggatctaagtccccagcagaaccgccagatgctgaggctcctgaatgagctgcaaagatcgtttcaagacattctggagcagactgccgctcaggtggacgccctccagggtcatctgcagcagatggagcaggaggctttggtgaagactttgcagaagcagcagaacacctgccatcagcaactcgaagatttgtgtagttgggtggggcaagccgagcgcgccttggctggccatcagggaaggacgacccaacaagatctgagtgcccttcagaaaaaccagagtgacttaaaggacctgcaggatgacattcagaaccgtgcgactagcttcgctacagtggtcaaggacattgagggttttatggaggagaaccagaccaagctcagtcctcgggagctgactgcacttcgtgagaagctccaccaggctaaggaacaatatgaggcgctccaggaagaaactagggttgcgcagaaagagctggaggaggcagtgacgagcgctctgcaacaggagacagaaaagagtaaagctgcaaaggaactagccgaaaataaaaagaagattgacgctttgctggactgggtcacgtctgtgggaagtagcggtgggcagctgctgactaacttgcccgggatggaacagctcagcggggcctcactggaaaaaggcgcattggacactactgatggatacatgggtgtgaatcaggcgcccgaaaagctggataaacagtgcgagatgatgaaagctcgccatcaggagctgctgagtcagcagcagaacttcatactagctacacaatctgcacaagcattcctcgatcagcacggccataacctgacacctgaggagcagcaaatgctgcagcagaaactgggggagttgaaagaacagtattcaacaagcctggcacaatcagaggctgagctgaaacaggtgcagaccctgcaagatgagctccagaagttcctccaggatcacaaggagttcgagagttggctggagcgttccgagaaggagctggaaaatatgcacaaaggcggcagttctccggaaacactgcccagcttacttaaaagacaaggctcattctctgaagacgtgatcagtcacaaaggcgatctgaggtttgtgactatctctgggcagaaggtgttggatatggaaaactcctttaaagagggaaaggaacctagcgagatcgggaatttggtcaaagataagttgaaggacgccactgaacgatacaccgctcttcatagcaagtgtacgcgattaggttcccatctcaacatgcttctgggccagtaccaccaattccagaattcagccgactctttgcaagcttggatgcaggcctgcgaagctaatgtggagaagttgctctctgacactgttgcctcagacccaggtgtactccaggagcagcttgcaacaaccaaacaattacaggaagaactggccgaacaccaggtgccggtcgaaaaactccaaaaggtagccagagatatcatggagatcgagggcgagcctgcccccgatcaccggcacgtgcaggagacaaccgactccattctgtcccattttcagtccttgagttactccctggccgagcgcagctctctgctacagaaggccatcgcccagagtcagtctgtccaggagtcactagaaagtttgctgcaaagtatcggcgaagtcgagcagaatctcgaagggaagcaggtgtcttcgctctcttcaggagtaatacaagaggctctggccaccaacatgaaactaaaacaggatatagctcgccagaagtcctcgttagaggccaccagggaaatggtcaccagatttatggagaccgctgactcaacgaccgccgcagtgctgcaagggaaactggccgaagtctcccagagatttgagcagctatgcctccaacaacaggagaaggaaagttccttgaagaagctgctgcctcaggccgaaatgttcgagcacctgagcgggaaactgcagcagttcatggaaaacaaaagtcggatgctggcaagcggtaaccaaccggaccaagacatcacccacttcttccagcagattcaggagctgaaccttgagatggaagaccaacaggagaacctggacaccttggagcacctcgtaaccgagttgagctcctgcgggttcgccttggatttgtgccaacaccaggatagggtgcagaatctacggaaggattttaccgaactccagaaaaccgtaaaggagcgcgaaaaagacgctagctcctgccaagaacagctggacgagtttagaaaactagtgcgaacctttcagaaatggctgaaggagaccgagggctctattccccccaccgagacgtcaatgagcgctaaggagttagagaaacagattgaacaccttaagagcctcctggatgactgggcctctaaggggactttagtggaagaaatcaactgcaaggggacttctctggaaaatctgataatggagatcacagcgcccgattcacaggggaaaacgggcagcattctaccgagtgttgggtcaagcgtgggatccgttaatggatatcatacatgtaaagatctaaccgaaattcagtgtgacatgagcgacgtgaacctcaagtacgagaaactgggaggagtcctacatgagcgtcaggaatccctgcaggcaatcctaaataggatggaggaggtgcataaagaagccaacagcgtcctgcagtggttagaatctaaggaggaggttttaaaaagtatggatgccatgagtagccctactaagacggaaacagtgaaagcccaagcagaatctaataaggccttcttggccgagttggaacaaaatagccccaagatccagaaagtgaaagaggctctggcggggttgcttgtgacatatcccaactcacaggaagctgaaaactggaagaagattcaagaagagttgaattcacgttgggaaagagctacagaggtcacagtggcaaggcagcggcagctagaagagtcagcctctcacttggcatgcttccaggcagccgagagccagctcaggccctggctgatggagaaagaattgatgatgggcgtgctgggaccattaagtatcgatccaaacatgttaaacgcgcagaagcagcaggtgcagtttatgctcaaagaatttgaagccagaagacagcagcacgaacaactgaacgaggccgcccaaggaattcttaccgggccaggcgatgtctctctgtctacctcacaggtacagaaggagctgcaaagtatcaaccagaaatgggtggagctgaccgacaagctaaactcacgctccagtcagattgatcaagcaatcgtgaaaagcacacagtatcaagaactactgcaggatctgagcgaaaaggtacgtgccgtggggcagcggctgagtgtgcaaagcgcgatcagcacccagcccgaggcagtgaagcaacagctggaggagacgtcagagatacgctcggacctcgagcagctcgaccatgaggtcaaggaggcccagactctgtgcgatgaactctctgtgctgatcggcgagcagtacctgaaagatgagctgaaaaaacgactggagaccgttgccctgccccttcaggggcttgaagatctggcagcagaccgcataaaccggttacaggccgcgttagcctctacacaacaattccagcagatgttcgatgagttaagaacctggctggacgacaaacaaagtcagcaggccaaaaactgcccaatatctgctaagctagagaggctgcagagccaactgcaggaaaacgaggaattccaaaagtcactgaatcagcattcaggcagttatgaagtaattgtggctgaaggggagagcctcctgctgtccgtcccaccaggcgaagagaagcggacccttcaaaatcaattggttgagctaaagaatcactgggaagagctatctaagaagacagcagatcggcagagcagacttaaggactgcatgcagaaggcccagaaatatcaatggcacgtcgaggatctcgtgccttggattgaagattgtaaagccaagatgtccgagcttcgagtgacactcgacccggtgcagcttgaaagcagcctgctgaggtcgaaggctatgctcaatgaagttgagaagcgacggtccctgctggaaattctcaattctgcggctgatattctcatcaatagttctgaagccgacgaagacggcatcagggatgaaaaggcagggattaaccagaacatggacgccgtgactgaggagctccaggcgaagacggggtctctcgaagaaatgactcagcgcctgagggaatttcaggagtcgttcaaaaacattgagaagaaagtggaaggtgcaaaacatcagcttgagatctttgacgcattgggctctcaggcatgttcgaataagaatctcgagaagctgcgggctcagcaagaagtgttgcaggcccttgagccgcaggttgactacctccgaaattttacccagggccttgtagaggatgcccccgacggatcagacgcctctcagctgctccatcaggcggaggtggcccagcaggagttccttgaggttaaacaacgtgtcaattccggatgtgtgatgatggaaaataagctggaaggcatcggtcaatttcactgccgggtgcgtgagatgttcagccagctggccgacttggatgacgaactggatgggatgggggctatcgggcgtgatactgattcattgcaatcccaaatcgaggacgtgaggctgtttcttaataagatccatgtcttgaagctcgacatcgaggcctccgaagccgagtgtaggcacatgttggaggaggaagggaccctggatttgctgggcctgaagcgcgagcttgaggccttgaacaaacagtgtgggaagctaacagaacgtgggaaggcccgccaagaacagttggagttgaccttagggcgggttgaggacttctataggaagcttaagggccttaatgatgccaccaccgcagcagaggaagctgaagcactccagtgggtcgttgggacggaggtagagatcatcaaccagcagctcgctgactttaagatgttccaaaaggaacaggtggacccactacagatgaagctgcagcaggtaaatgggttaggacaggggctcatccagagcgctggcaaagactgcgatgtccagggattggagcacgacatggaggagatcaacgccaggtggaacactctaaataagaaggtcgctcagcgtatcgcacagctgcaagaagcacttctccactgtgggaagtttcaggatgccttagagcctctactctcgtggctagctgacacagaggaactgatagcaaaccagaagcctccttctgctgagtacaaagtggtcaaggcacaaatccaggagcagaagttactgcagagactgctagatgatcggaaagccaccgtggacatgcttcaggcggaaggaggtcgcatcgcccagagcgcggaactcgctgaccgcgagaagattacaggtcaactggagagcttggaatcccggtggacagagctgctgagtaaagccgctgctcgccagaagcagctggaggatattctggtccttgcaaagcagtttcacgagaccgctgagcccataagcgatttcctgtctgtcaccgagaaaaaactcgccaactcggagcctgtaggaactcaaactgccaaaatccaacagcagattatccgccataaggccctgaatgaggaaatagttaatcgcaaaaagaatgtcgatcaggctatcaagaacggacaggccctcctcaaacagactaccggtgaagaagttctcctcattcaggagaaactggatgggatcaagaccaggtacgcagacattacagttacttctagcaaggccctgaggacgctcgaacaagcgcggcagctggccacgaaatttcaatctacatacgaagagctcacgggctggctcagggaggttgaagaagagttagccacgtctggcgggcagtcgccaaccggagagcagattccacagtttcaacagcggcagaaagagttaaaaaaagaagttatggaacatagacttgtgctggacacagtcaatgaggtgtctcgcgccctcctcgagttggttccctggcgggccagggagggcctcgataaactggtatccgacgcaaatgaacagtacaagctggttagtgacacaattggccaaagagtcgatgaaatcgacgcggctatacagaggagccagcaatacgagcaagccgcagatgctgaactggcctgggtagctgaaacaaaaaggaagctgatggcattaggacctatcaggctggagcaggaccagacaacagcccagctgcaagtgcagaaggccttttccatcgatatcatcaggcacaaagactcgatggatgagttgttcagccaccgttcggagatttttggcacttgcggagaagagcagaaaacggtcctgcaggagaagacagagtctctcattcaacagtacgaagccatttcactcctgaacagcgaacgatacgctagactggagcgggcccaggttctggtgaatcagttttgggagacatacgaggaactttccccctggatcgaggagacaagggccctgatcgctcaactcccaagccctgctatcgaccatgaacaactaaggcagcagcaagaagaaatgaggcagctccgggagtctatagccgagcacaagcctcacattgacaagttactgaagattggcccacagctgaaagaactcaaccccgaggaaggcgagatggtggaagagaagtatcaaaaggccgaaaacatgtatgcccaaataaaggaagaggtcaggcagagagctttagctctggatgaggccgtgagtcaatcgactcagattacagagtttcacgacaaaatcgagcccatgctggagaccctggaaaatctaagcagcagactaaggatgcctccactcatccccgctgaggtggacaagatcagagaatgcatctctgataacaagtcagcaacagtcgaactcgagaagttacagccctcttttgaagctcttaaacgtcgcggagaggaactcatcggacgcagccagggagcagacaaggacctcgccgcaaaagaaatccaggataaactagaccagatggtttttttttgggaggacatcaaggcacgggcagaggagagagaaattaagttcctagacgttctggaactggccgaaaaattctggtacgacatggccgcactactcactacaatcaaagacacacaagacatcgtgcacgacctagagagtcctggtatagacccttcaatcattaagcagcaggtagaagctgctgaaactattaaggaggaaacagacgggttgcacgaggagctggaattcattagaatactcggagccgacctgatcttcgcctgcggtgagacagaaaagccagaggttcgcaagtccattgacgaaatgaacaacgcctgggaaaacttgaacaaaacttggaaggaacgcctggagaaattagaagatgccatgcaggccgccgtgcagtaccaggataccctccaggcgatgtttgactggctggacaacaccgtgatcaaactatgtaccatgcctccagtagggaccgacttgaacacggtgaaggatcagcttaacgaaatgaaggagtttaaggtggaggtataccagcagcagatcgaaatggaaaagctcaaccaccaaggcgagctgatgctgaaaaaagctacagacgaaaccgaccgggacattattcgggagccactcaccgagctcaagcacctgtgggagaatctcggcgaaaaaattgcccatagacagcataagttggagggcgcactgctggctctcggccagttccaacatgctttggaagaactcatgtcatggttaacgcatactgaagagcttcttgatgcccagcggcctatttcaggtgatcctaaggtgatagaagtggagttggccaagcatcatgtgttgaagaatgatgtgctggcccatcaagccaccgttgagactgtcaataaagcaggcaacgagctgctcgagtcttccgcgggagacgacgccagtagcttgcgctcccggcttgaggccatgaaccagtgttgggaaagtgtgctccaaaaaacagaggagcgagaacaacagctgcagagtaccttgcaacaagctcagggttttcactccgaaatcgaagatttcctgctggaactgacccggatggaatctcagttgtcggcttcgaaacctaccggcgggcttccagaaacagccagagaacaattagacacccatatggagctgtattctcagctgaaagcaaaggaggagacttacaaccagctgctggataaggggcgtctcatgttgctgtctagagatgactcaggatcaggctcgaaaaccgaacagagtgtggccctgctcgaacagaaatggcatgtggtgtcgtctaagatggaggaaaggaagtctaaactcgaagaagctttgaatcttgccactgaattccagaactcattacaagagttcatcaattggctgaccttggcggagcagagccttaatatcgcaagccctcccagtctcattctgaacaccgtcctgagccagatagaggagcataaggtgtttgccaatgaggtcaacgcccatcgagatcagataatcgagctggaccagactgggaatcagctcaagttcctgagtcagaagcaagacgtagtcctgattaaaaatctgctcgtttccgtccagtcccgatgggagaaggtagtgcaacggtccatcgaacggggccgctctctggatgatgcccgcaaacgcgcaaaacaattccacgaggcctggaagaaacttatcgactggctagaagacgccgaatcccacttggactccgaactggaaatctccaacgatcccgacaagatcaaactacagctttcaaaacacaaggaatttcagaaaaccctcggcggaaaacagcctgtatatgataccacgatccgcaccggcagagcccttaaagagaagacacttctcccagaggacagccaaaagctcgacaactttcttggagaggtccgagataagtgggataccgtgtgcggaaaatctgtggaaaggcaacataaattggaagaagcgctcctctttagtggacagttcatggacgccttacaggctctggtggattggctctacaaggttgaaccacagctggcggaagatcagcctgtgcatggagatttggacctggtgatgaatctgatggacgctcataaggtgttccagaaggagctcggtaaaaggaccggtacagtgcaggtgctgaagcgttccggacgcgagttaatcgagaacagcagggacgatacaacctgggtgaagggacaactgcaggagctctccactcgctgggatactgtgtgcaagttatcagtcagcaaacagtcacgccttgagcaggctcttaaacaagctgaagtttttagggacactgtccacatgttactggagtggttatcggaagccgagcagacactgcggtttaggggcgcactgccagacgatacagaggccttgcagagcctgattgacacacacaaagaatttatgaagaaagtagaggagaagagagtggatgttaattccgctgtggcgatgggggaagtgattctcgccgtgtgtcacccagattgcatcactactatcaaacattggatcacgattatccgcgctagatttgaggaagtcctgacgtgggcaaagcagcaccagcagcggctcgaaacagctttgagcgaactggttgccaacgcagagcttctcgaagaactgctggcttggatccaatgggcagagactaccctaatacaaagggaccaagagccaatcccccagaacatagacagggtgaaggccctcatagccgagcatcagaccttcatggaggaaatgaccagaaagcaacctgacgtggatagggtgactaagacctacaaaaggaaaaatatcgaacccacccacgcccccttcatcgagaagagccggagcgggggccggaaaagtctgtcacaaccgacccctcccccaatgcctattctatcccagagtgaggccaaaaatcctcgcattaaccagctatctgcccgttggcagcaagtgtggctattggctctagaaagacaacggaagctaaacgatgctctcgatcgcctggaggagctgaaggagttcgctaacttcgactttgacgtgtggaggaaaaagtacatgcgttggatgaaccacaaaaaatcaagagtgatggacttctttcgtagaattgacaaggatcaggatgggaagataacgaggcaagagtttatcgatggcattttagcttccaagttcccaacaaccaaactggagatgaccgcagtggccgatatattcgacagagatggtgacggctatattgattactatgaatttgtggctgcgttgcacccaaacaaagatgcctacaggcctactacggatgccgacaagatagaggacgaagtgacccgccaggtagcccagtgtaaatgtgctaaaaggttccaggtcgagcagatcggcgaaaacaaataccgatttggcgacagccagcagctacggctagtgcggattctgaggtcgaccgtcatggtgagagtgggaggtggttggatggcactcgatgagtttctggtcaagaacgatccatgccgagcccggggtcggaccaacattgaactgcgcgagaagttcatcctccctgagggcgcctcacagggaatgacacctttcagatctaggggaagaaggtctaagccgtccagtagggcggccagccccaccagatcatccagtagtgccagccagagcaaccacagctgtacctcaatgccaagctctcccgctaccccagccagcgggactaaggtgatccctagctctggctcaaaactgaagcgtcctaccccaacattccatagctctcgtacctccctagcaggtgatacctcaaattcctcgagtcctgcctcaaccggagctaaaactaaccgagcagatcccaaaaagtcagcctcccggcccggtagccgtgcgggctctagggcaggatctagggcctcttcaagacgtggatcagatgcgtccgacttcgatctcctcgaaacgcaaagcgcctgttcagatacttctgagtcctccgccgcaggcggtcaggggaatagcaggcggggcttgaataaaccaagtaagattcccaccatgtctaagaaaacaacaaccgcatcaccaagaacccctggaccaaagcggtag

SEQ ID NO: 124350 - DNA, 1155 bp, synthetic construct
  misc_feature 1..1155: note = Description of Artificial Sequence: Synthetic coding sequence
  source 1..1155: mol_type = other DNA
atcacatctccctgggcccctcgtcctagctgttcttcaccatgggccatgtcaagcagcgacgaggagactctgagtgagcgttcttgtcgctctgaaagatcctgccgctcagagagatcctatcggtctgagcggagcggaagcctctccccatgtcccccaggagacacactgccttggaatcttcctctgcatgaacagaagaagcggaaaagtcaggattccgtcctggatccggccgagagagctgttgtgagggtagcagatgagagggatagggtccagaaaaagacattcaccaaatgggtgaacaagcacctcatgaaggtacgcaagcacatcaacgacctgtacgaggacttgagggacggccacaacttgatttccctcctcgaggtgctttccgggatcaaactgccaagagaaaaaggtagaatgcggtttcacagactacagaacgtgcagattgcattggactttctgaagcagaggcaggtgaaacttgtcaatattcggaacgacgacatcactgatggaaacccaaaactgaccctcggactgatctggaccattatcctacattttcagatttcagatatttatatctccggggagtccggcgacatgtccgccaaggagaagctgcttttgtggacccagaaggtgactgctggttacacaggcattaagtgcacgaatttctctagctgttggtctgatggaaagatgttcaatgcccttatacaccggtacagacccgatctcgtggatatggagcgagtgcagattcaatccaaccgggaaaatctcgagcaggccttcgaagtggccgagaggctcggagtgacccggctgctggacgccgaagatgtggacgtgcccagcccagatgagaaatctgtaattacctacgtgtcatccatttatgacgcatttcccaaagtgcccgagggcggagagggaatctcggctaccgaggtcgactctcggtggcaggagtatcagtcccgggtggactctctgatcccttggatcaaacagcacaccattttgatgtctgataagacttttccccaaaacccagttgaattaaaagcactctacaaccagtacatacatttcaaggagacagaaattttggccaaggagtag

SEQ ID NO: 124351 - DNA, 603 bp, synthetic construct
  misc_feature 1..603: note = Description of Artificial Sequence: Synthetic coding sequence
  source 1..603: mol_type = other DNA
atgcctctcctcgactcctcctacttgccacccaccatctttattctcacacacgtgctgggagtggccggcgtgctgtactggaagcggcatgcccgggggagggcagacgagagggatcgggtccagaagaaaacgtttactaaatgggtcaacaagcacctcatgaaggtgcgtaagcatatcaatgatctatatgaagatctgagggatggccacaacctcatttccctgctggaggtcctgtctggcattaagctgccaagagaaaagggccggatgagatttcacaggcttcaaaacgtgcagattgccctggattttttaaaacagagacaagttaagcttgtcaacattcgcaatgatgatattactgatggaaaccctaaactgaccctgggattaatctggaccattatactgcattttcaaatcagcgatatctatatttccggtgagagtggagatatgtctgcaaaggaaaagttgctgctgtggacacagaaggtcacagcgggatacactggcattaaatgcaccaacttcagtagttgctggtctgatgggaagatgttcaacgccttgatacaccggtatagatag

SEQ ID NO: 124352 - DNA, 15903 bp, synthetic construct
  misc_feature 1..15903: note = Description of Artificial Sequence: Synthetic coding sequence
  source 1..15903: mol_type = other DNA
atgtcaagcagcgacgaagaaaccctcagtgagagatcttgcagaagtgagaggagctgtcgtagcgagaggtcctaccgctccgagcgttccggtagcttaagtccatgtccaccaggagataccctgccttggaacctgccgctgcacgagcagaaaaagagaaaatctcaggactctgtgttggatcctgccgaacgcgcggtcgtgagggtagccgacgaaagagatcgggtgcagaagaagacgtttaccaaatgggtcaataagcacctgatgaaagtccggaaacatatcaacgatctgtatgaggaccttcgcgacggacacaatctcatctccttgctggaggtcctatctggaattaaacttcctcgcgaaaagggaagaatgcgattccacaggctccaaaacgtgcagatcgccctggactttctaaaacagagacaggtcaagctcgtgaatattcgcaacgatgacatcaccgacggcaaccccaaattgactctgggcctcatatggaccataatactgcactttcagatatctgacatctatatctcgggagaaagcggagatatgagtgcaaaagagaagcttctcttatggacgcagaaagtaactgcgggctatactggaatcaaatgcaccaatttcagttcgtgttggtctgatggaaagatgtttaacgcgctgatacaccggtaccggcccgatctggttgacatggaacgtgtgcagatccagagcaatcgggagaacctggagcaggcgttcgaagtggctgagcgcctcggagttacacgactgctggacgctgaagatgtggacgtacccagccctgatgagaaaagcgtgatcacatatgtcagctcaatttatgatgcctttccgaaagtgcccgaaggcggagaaggcattagcgcaaccgaggtggatagtcggtggcaggagtaccaatccagagtggattctctgattccgtggattaagcaacacaccatcctgatgtctgacaaaacgttcccccagaatcccgttgagctcaaggccctgtataaccagtacatccacttcaaagaaacagaaatcctcgcaaaggaaagggagaaaggcagaatagaagaattgtacaagttactggaagtctggattgaatttggaaggatcaagctgcctcagggatatcaccctaacgacgtcgaggaagaatggggcaagctgatcatcgaaatgctagaacgcgaaaaatccttacgaccagctgtagagagactggaattgctgctgcaaatcgccaataagattcaaaacggcgctcttaactgtgaagagaagctgaccttggcaaaaaacacattacaggccgacgcggcacacctcgaaagcggccagcccgtgcagtgcgagtctgacgttattatgtatatacaggagtgtgagggcctgatccgacagctccaggttgacctgcagatcctgcgtgatgagaactactatcagttggaggagctggcattccgagtcatgcggcttcaggatgagctagtgaccctgcggttggagtgtacaaatctctataggaagggacactttaccagtctcgagctggtcccaccgtctacactaacaactacccatcttaaggccgagccactcaccaaggccacccattcttcaagcacctcgtggttcagaaagcctatgacccgcgccgagctcgtggccatttcatcctctgaggacgaaggaaacttgagattcgtctatgaacttctaagctgggtggaggagatgcaaatgaagcttgagcgtgctgagtggggcaatgatctcccgtcagtggaattgcagcttgagactcaacagcatatccatacgagtgtggaggaattagggtccagcgtgaaagaagccagactctatgagggcaaaatgagccaaaacttccacacctcctatgccgagacactggggaaactagagacccaatattgcaagttgaaagaaacttcttcattcaggatgcgacatttacagagtttgcacaaatttgtgtcacgcgcaacggctgagctcatttggctcaatgaaaaggaagaggaggaactggcttacgactggtccgataacaacagcaacatcagcgctaagcgaaattatttctctgagctgacaatggagttagaagaaaaacaggacgtgttccgctctctccaggacacagcagagctcctgagtctggagaatcatccagcgaagcagactgttgaagcatactcagcggctgtgcagagtcaacttcaatggatgaagcagctctgtctgtgtgtcgagcagcacgtgaaggaaaatacggcttatttccaatttttctcggacgctcgagaactcgaatcttttctacggaaccttcaggactctatcaagcgaaagtactcatgcgatcataacacctctctgtcacgactggaggatctcctgcaggactctatggatgagaaggagcagctaatacagagtaagagttcggtagcgagcttggtgggccgaagcaaaaccatcgtccagctgaagccacgctccccagatcatgttctgaaaaataccattagtgttaaagccgtctgcgactacaggcaaattgaaattactatctgtaaaaacgatgagtgcgttctagaggataacagtcagcgcacaaagtggaaggtgatatctccaaccggaaatgaggccatggttcctagtgtgtgtttcttgatcccgccgccgaataaagatgccatcgagatggcatcacgagtagaacagtcctatcagaaggtgatggctctgtggcatcagttgcacgtaaatacgaagagcttaatttcctggaactatctgcgaaaggatctggatctggtccagacatggaatttggagaagctgaggtcctcagccccgggagaatgccaccaaattatgaaaaatctgcaagcccattacgaggattttcttcaggattcccgggacagcgtcctgttctccgtggcagatcgcttaaggctggaggaggaggttgaagcctgcaaagccaggttccagcacctaatgaaatcaatggaaaatgaggacaaggaggaaaccgtggctaaaatgtatatctcagaactaaagaatattcgcctgagacttgaagagtacgagcagcgcgttgttaagaggatccagagcctcgcctccagccggactgatcgcgacgcctggcaggacaacgcactgcgaatcgctgagcaagagcacactcaggaagatttacagcaacttcgaagtgatctcgatgccgtaagcatgaagtgcgactccttcctgcatcagagcccgtcttcgtcaagtgtccctactttacgaagtgaattaaatcttctggtcgaaaagatggaccacgtgtatggactttcgacagtctatctgaacaagcttaaaactgtggacgtcatcgttagaagcatacaggatgcggaactcctggtcaaaggatatgagattaaattgtcccaggaggaggtggtactggcggatctgagtgccctcgaagctcactggtcgactctgcgtcactggctctctgacgtcaaagacaagaattccgtgttcagtgtgctcgacgaggagattgccaaggctaaagtggtggccgagcagatgtcaaggctgacacccgaaagaaacctagacctcgagcggtaccaggaaaaagggtctcagctccaggaaaggtggcatcgagtcattgcccagctggagatacgtcagtcagaactggagtcaatccaggaggtgctgggggactaccgcgcctgccatggtacattaataaaatggattgaggaaactacagcccagcaggaaatgatgaagccaggacaggccgaagatagtcgcgtgctgtctgagcaactctcacaacaaaccgctcttttcgccgagattgaaagaaaccagactaaactggaccagtgtcagaagttcagtcaacaatattctacgatcgtgaaagactacgaattgcagctgatgacttataaggcgtttgttgagagtcagcagaaaagccccggtaagaggcgaaggatgcttagtagcagtgacgccatcacacaggagttcatggacttgaggactcgttatacggctctggtgactctgactacgcagcatgtgaaatacatttccgatgcattacgccgcttagaagaggaggaaaaggttgtcgaagaggagaagcaggagcatgtggagaaggtgaaagagctattaggatgggtttccacacttgcgagaaatacacaagggaaagctacatcctcagaaaccaaagagagcacagacatagagaaagctatactcgagcaacaggtgctgtcggaggaattgactacgaaaaaggagcaggtgtctgaggccattaagacctctcagatcttcctagccaagcacggacacaaactctccgagaaggagaagaagcaaatcagtgaacaacttaacgctttaaataaggcttatcacgacttgtgtgacggtagcgccaaccagctgcagcaactccagagccagttagctcaccagactgaacagaagaccctgcaaaagcaacagaatacttgtcaccagcagctcgaagacttgtgtagttgggtgggtcaggcagagagagcgctggccggccaccagggtcggaccacacaacaggacctgagtgctctccaaaagaaccaatccgatctgaaggacctgcaggatgatatccaaaacagggccacgtctttcgctaccgtcgtcaaagacatcgaaggtttcatggaggaaaatcagactaagctctcccctcgggaactgaccgctctccgcgaaaaactgcaccaggctaaggagcagtacgaggcccttcaggaagagacaagggtggctcagaaggagctggaagaagccgtcactagcgcccttcagcaagagactgagaaaagcaaggcggccaaggagcttgccgaaaataagaaaaagattgacgctcttctggattgggtcacctccgtcgggagcagcggcggtcaactgctcaccaacttgcctggaatggagcagcttagcggtgcaagtcttgagaagggcgccttagacaccaccgatggctatatgggtgtaaaccaggcccccgaaaaactcgataagcagtgcgaaatgatgaaagcccggcatcaggagctactctcccagcagcagaatttcatccttgccacgcagagtgcccaggctttcctggatcagcacggccataacctgacaccagaggaacaacagatgcttcaacaaaaactgggcgaactgaaggagcagtatagtactagtctagcacaaagcgaggcggagctgaagcaggttcagaccctgcaagatgaattgcaaaagtttcttcaggaccataaggagttcgagtcatggctggagcgatccgagaaagagctagagaatatgcataagggcggctcctcgcctgagacactgccaagcctattaaagaggcagggctctttttccgaggacgttatatcccacaagggagacctccggtttgtgacaatatccggccagaaagttctggacatggaaaactcattcaaagagggcaaggaaccctctgagatcgggaacctggtcaaggacaagttgaaagatgctaccgagcgctacaccgcactgcattccaaatgtacaaggcttggtagccacctgaacatgcttctgggtcaataccaccagtttcagaacagcgctgacagcctgcaggcgtggatgcaggcatgtgaagcgaacgtcgaaaaactcctgtcagacaccgtggcaagtgaccctggcgttcttcaggaacagctggcgaccacaaaacagctacaggaagagttggctgagcaccaggtgccagtcgagaaactccaaaaggtggcacgtgatattatggagatcgaaggtgaacccgctcccgatcaccgacatgttcaggagaccactgacagcattttgagtcattttcagtcattaagctactctttagctgaacgctcttccctcctgcagaaagcgattgcccaaagccaatctgtgcaggagagcttagaatcactactgcaatcaattggagaggtcgaacagaatctggaaggcaagcaagtctcatctctttcttccggggtcatacaggaggccctcgctactaacatgaagctgaagcaggatattgcacggcagaagtctagtctggaggcaacgcgcgagatggtgacaagatttatggagactgcagacagtacgacagcagctgtcctgcaaggaaagctggccgaggtcagccaaaggtttgagcagttatgcctgcagcagcaggagaaggagtcctcgctcaagaaactactgccccaggccgagatgttcgagcatctgtccgggaaactccagcagtttatggaaaataaaagtcgcatgttggcaagtggaaaccaaccggaccaggacatcactcacttcttccagcagattcaagagttgaatctcgagatggaggaccagcaggagaatcttgataccctggagcatctggtcactgaattgtcatcctgcgggtttgcactggacctgtgccagcaccaggatagggttcaaaacctgaggaaggacttcacggagctgcaaaaaacagtcaaagagagggaaaaagacgcctcctcttgtcaagaacagctagacgagtttcgcaaactcgtgcgcaccttccaaaaatggctgaaggaaacagaaggctcaattccaccaaccgagaccagcatgtctgccaaagaactggaaaaacagatcgagcatcttaaatcccttctcgatgattgggcctccaagggcaccctggtggaggaaatcaactgtaagggcacatccttagaaaatttgatcatggagataactgcccccgattcccaaggcaagaccgacctgacagaaatccagtgtgatatgagcgatgtgaacttgaaatatgaaaagcttgggggggtccttcacgaaagacaggagtcgttgcaggccattctcaatcgtatggaggaggtccacaaagaggccaacagcgtgctgcaatggttggaatctaaggaagaggtactcaagtccatggacgccatgagttcccctaccaaaactgagacggtgaaagcccaggctgaatcaaacaaggcattcttggctgagcttgaacaaaacagtcctaagatccaaaaggtgaaggaggccctcgcaggtctcctggtgacctaccccaatagtcaagaagctgagaactggaaaaagatccaagaagagttgaactctaggtgggagagagccacagaagtgacagtcgcgcggcaaaggcaactcgaggaatccgccagccacctcgcatgttttcaggccgcagagagccagctcagaccttggctcatggaaaaagagcttatgatgggggttctggggccactgtccattgacccaaacatgttgaatgcacagaagcagcaggtccagttcatgctcaaagagttcgaggccagaaggcaacagcatgagcaactgaacgaagctgcccagggcatcctcactgggccaggggatgtttctctcagcaccagtcaagtacagaaggagttacagtcaatcaatcagaagtgggtggaattaacagacaaactcaactctcgcagttcccagatagaccaagctatcgtgaaaagcactcaatatcaggagctgttgcaagacctctcagagaaagttagagcggtgggacaaaggctgagcgtgcaatctgccatatcaacccagcccgaagccgtgaagcagcagctcgaggagacatccgagatacgttccgatctcgagcaacttgaccacgaagttaaagaagcccagacactatgtgacgagctgtctgtactgataggagaacaatatctgaaggacgagttaaagaaaaggctggaaacggtcgcactacctctgcaagggctggaagatcttgcagccgaccgaataaatagactacaagcagcactggccagcactcaacagttccaacagatgtttgacgagttgagaacttggctcgatgataagcagtctcagcaggcgaaaaactgccctatctcagccaagctagagcgcctgcagtcccaactgcaagagaacgaagagttccagaaatctctgaaccagcacagcggcagttacgaggtgattgtggcagagggagaatccctactgctgagtgttcctcccggggaggaaaaaaggacacttcagaaccagctggtggagctgaagaatcactgggaagaactgagcaagaagactgccgacagacagagccgactgaaagactgcatgcagaaggcccagaagtatcaatggcacgtggaggatcttgtgccttggatcgaagattgcaaagctaaaatgtctgagctgcgcgttactctggaccccgttcagctggagtcgtcactcctgcgcagcaaggctatgctgaatgaagtagagaaacggaggtccctgctggaaatcctgaattctgcggccgacattctgataaattctagtgaagctgatgaagatggtattcgcgatgagaaggcaggtataaaccagaatatggatgccgtcacagaagaactgcaggccaagacaggctctttggaggagatgacacaaaggctgcgcgagttccaagagagtttcaagaatatagagaagaaagtggagggcgccaagcaccagctggagatttttgatgctcttggatctcaggcgtgttcaaataagaaccttgagaagctacgcgcacagcaggaagtgctgcaggccctcgagccacaggtggactaccttcgcaactttacacaggggctcgtggaggatgctcccgacgggtcagacgcttcccagctgttgcatcaggccgaggtggcacagcaagaattcctggaggttaagcagcgagtgaattctggctgtgtgatgatggagaataaactggagggcattgggcagttccactgccgggttagggaaatgttttctcaactcgcagacttagacgacgagcttgacggtatgggggctatcggcagggacaccgattcactgcagagccagattgaggacgttcggctctttctgaataaaatccacgttttaaagctagacattgaggcttctgaggctgagtgcagacacatgctggaggaagagggaactttggatctcctgggcctgaagagagaactggaagccctcaacaaacaatgcggtaagcttacggaacgggggaaagcccgccaggagcagttggagctgaccctgggtcgggtggaagacttttaccgcaagcttaagggactcaacgacgctacgacagcagcggaagaggccgaagctctgcagtgggtggtaggaactgaagtggaaattatcaatcaacagctggccgacttcaagatgtttcagaaagagcaggttgaccctctgcagatgaagctgcagcaggtcaatgggttaggccagggactcattcagtccgcaggaaaggactgcgatgttcaggggctagagcatgacatggaagaaataaatgctcgatggaacacgctaaacaaaaaggtggcccagcgcatcgcccagctgcaggaggcccttctgcattgcggcaaatttcaagacgctcttgaacctttgctgtcctggctggcagacaccgaggaactcattgctaatcagaagccccctagcgccgagtacaaagttgtaaaagcccaaatccaagagcagaaactgttacaacgactcctcgatgatcgcaaggccaccgtggacatgctacaggcggaaggcggccggattgctcagtccgccgaacttgcagatagggaaaaaattaccggacagttggaatctctggagtcccggtggaccgagctgctgtctaaagctgctgccaggcaaaagcaactcgaagacatacttgttctggccaagcagttccacgagaccgccgaaccaatctcagattttctctcggtgacggagaagaagctcgcaaatagtgagccggtcgggacacagaccgcgaagatccaacagcaaataatccggcacaaggccctgaatgaggaaatcgttaaccgtaagaaaaacgtggatcaggctattaaaaatgggcaggcccttctcaaacagactacaggtgaagaggtgttgctgatacaggaaaagctcgatggcatcaaaactagatatgctgatattaccgtcacctcttccaaagctctgaggaccttggagcaggcccgccagctcgctaccaagttccagtcaacttacgaggagctgaccggatggctaagggaagtggaggaggagctggcgacaagcggcggacagagtcccaccggtgagcagatcccccagttccagcagcgacagaaggagctaaagaaagaggtaatggagcaccgactagtgctcgacacggtaaacgaagtgtcacgggcactgttagagctggttccatggcgcgcacgtgaggggttagacaagctggtctctgacgcaaacgagcagtacaagttggtgtccgacacaattggacagagggtggacgagatcgatgcagcgatccaacgctctcaacagtacgaacaggcagccgacgccgagctagcctgggttgctgaaactaagcgcaaactcatggccctcggtccaattagactcgagcaggaccaaaccacagctcaattgcaggtccagaaggccttctcgattgacattatacgacataaagacagcatggacgagttgttttctcacaggtcagagatcttcgggacctgcggggaggagcagaagaccgtgctgcaggaaaagaccgagtccctaattcagcagtacgaggccatctccctgctgaactcggagaggtatgcccgactcgagcgcgcccaggtcctcgttaaccaattttgggaaacatatgaagaattgtcgccttggatcgaggagacaagagccctgattgcccagctgccctcaccggctattgatcacgagcagctgcgccagcaacaggaggagatgcgacagctgcgtgagtctatcgccgagcataaaccccatatagacaagttgctgaaaattggcccccaactaaaggagttgaaccccgaggaaggggagatggtggaagagaaatatcagaaggctgaaaacatgtatgctcaaatcaaggaagaggtgcgccagcgcgctctggccttggatgaagccgtgtcccagagcactcaagtttcccagttccacgacaaaatcgaacccatgcttgagacacttgaaaatctgtcaagcagactgcggatgccgcctctgattcctgcggaagtggacaagatcagagagtgtatttctgataataagtccgcgaccgttgaactggagaagttacagccaagcttcgaagctctgaaacggagaggagaggagctaatcggcagatcccagggagcagacaaagatttggccgccaaagagatccaggacaaattggatcagatggtctttttctgggaggatattaaagccagggccgaagaacgggagattaagtttcttgatgttctggaactcgccgaaaaattctggtacgacatggccgccctccttacaaccattaaagacacacaggacattgtgcacgacttggaatcaccaggcattgatccttctattattaagcagcaagtggaagctgcggaaacaattaaggaagaaaccgacggccttcatgaggagctggagttcataaggatcttgggggcagacctcatcttcgcttgcggagaaacagagaagcccgaggtgaggaagtccatcgatgaaatgaacaatgcatgggaaaacctcaacaagacttggaaagagcggttggagaagctggaagacgcgatgcaggctgctgtgcagtatcaagatacacttcaagccatgttcgactggttggacaacaccgtcattaaactgtgcactatgcccccagtgggtacagaccttaacaccgtgaaggaccaactgaatgagatgaaagagttcaaagtggaagtgtatcaacagcagatcgagatggagaagttgaatcaccagggagagctgatgctgaaaaaggccacagatgaaacagacagagacataattagggaacccttaacggagctcaaacatctgtgggaaaacctcggtgaaaagatcgcccacaggcagcataaactggagggtgcactgctggccctagggcagttccagcacgcccttgaagagctgatgagctggctgacccatactgaggaactactggacgctcagcgcccgataagcggggaccccaaagttatcgaggtcgaacttgctaagcatcacgtcttgaaaaatgatgtgctcgcgcaccaagccaccgtcgaaaccgtgaacaaggccgggaacgaattgctggagagctcagccggtgacgacgccagctccctgagatctcggctagaagctatgaatcagtgctgggagagcgtcctccagaaaactgaagaacgggagcagcagctccaatcaacactgcagcaagcccagggcttccactctgagatagaggatttcctcctggagttaacccgcatggagtctcaactgtcagcgtctaaacctacaggaggactgccagaaacagcaagagaacaactggatacgcacatggagctgtacagccagcttaaggctaaagaggagacttacaatcagttgttagataagggccgcctcatgttactgagcagggacgattctgggtctgggtcaaaaacagaacagtcagtggcgctgctggagcagaagtggcacgtggtgtccagcaagatggaggaacggaagtccaagctcgaggaggcactcaacctcgctaccgaattccaaaacagcctgcaggaattcatcaactggctgacccttgctgaacagtctctcaatatcgcctccccaccaagtctcatactgaatacagtgctgtcccagattgaggaacacaaggtgtttgctaatgaggtcaacgctcaccgcgaccagatcatcgagctggaccagaccgggaaccaattgaagttcttaagccagaagcaggacgtcgtcctgatcaagaatctgctggtcagcgtacagtcccgctgggagaaagtagtacagcggtccattgaacggggacgcagtttggacgatgcacggaaacgagccaaacagttccatgaggcctggaaaaaactgattgattggctcgaggatgctgagagtcatctagacagtgagctcgaaatttcgaatgatccagataagataaagctgcaattaagcaagcacaaggaattccagaagacacttgggggaaagcagccggtctacgataccacaattcgaacaggcagagcccttaaggagaagaccttacttccagaagattcgcagaaattggataacttcttaggggaagttcgcgataaatgggataccgtgtgcggaaagagcgtagagaggcaacacaagctggaggaagcccttcttttttccggccaattcatggatgcgctccaggctctcgtagactggctatacaaggtcgaaccacagttagctgaagatcagcccgtccatggtgacttggacctggttatgaacctgatggacgcacacaaagtgtttcagaaggaactcggcaaaaggaccggcacagtacaggtcctgaaacgctccgggcgtgaactcattgagaatagcagagacgacacaacatgggtcaagggacagctacaagagctctctactcggtgggataccgtttgcaagctctccgtttctaagcagtcccgcttagaacaggcgttgaaacaagccgaagtgtttcgagacacagtgcacatgttgctcgaatggctctctgaggccgaacaaacattacgctttcggggagccctgccggacgataccgaagctctgcagtccctgattgacacccacaaggaattcatgaaaaaggtggaggaaaagagagtggacgtgaatagcgccgttgcaatgggcgaagttattttggcagtgtgccaccccgattgtatcacaaccatcaaacattggatcacgattattcgagctcgcttcgaggaagtgctcacatgggccaaacagcatcagcagagattagaaactgctctcagcgagcttgttgcgaacgcagagctacttgaggagttgcttgcctggattcaatgggcagaaaccacactcatccagcgagaccaggaaccaattcctcaaaacatagacagggtgaaggccctgatcgccgaacatcagacttttatggaagaaatgactaggaagcagccggatgtggatcgcgtgaccaaaacatataagcgtaaaaatatcgagcccacgcatgctcccttcattgaaaagagtagaagtggaggtcgaaagagcctcagccagccaactcccccaccgatgcctatcttgtctcaaagcgaggccaaaaatcctcggattaaccagttgagcgcccgatggcagcaggtttggttgcttgccctggagcgccagcggaagcttaatgatgctcttgacagactggaagagctaaaagaattcgccaattttgattttgacgtctggcgaaaaaagtacatgcgatggatgaatcacaaaaaatcgcgcgttatggattttttcaggcgaatcgataaggatcaggatgggaaaataacaaggcaggaatttatcgatggtattttagcgagtaaatttcctaccaccaagcttgaaatgactgctgtggcagacatattcgatagggacggagacgggtacattgactattatgagttcgtagctgcactgcaccccaacaaagatgcctatcggccaaccactgacgcagacaaaatcgaggacgaggtaactaggcaggtagcccagtgtaagtgtgcaaagagatttcaggtggagcagatcggtgagaataaatatagattcggcgattctcaacagttgaggctcgtccgaatacttaggagcacagttatggtaagagtgggaggcggctggatggccctggatgagttccttgttaaaaacgacccatgcagggcccggggacgcactaacatagaactgagggagaaatttattctccctgagggcgcctctcaaggcatgacccctttccgtagccgtggtcgccggtcgaaacccagttctcgagcagcaagcccaacgaggtcttccagcagcgcgtctcaaagtaatcactcctgcacttccatgcctagtagtcccgctacacctgcctctgggacgaaggtcataccttcatctggctcaaaactcaagcgccctacaccaacattccacagtagcaggaccagcttggccggtgatacaagtaattcttcctcgccagcctcaacgggcgccaaaacaaatcgcgcagaccccaagaaatccgcctcccggcccggctctagggcagggtctagagccggctctcgtgctagcagtcgtcgcggcagcgacgcatccgacttcgacctcctggaaacccagagtgcttgctccgatacttccgaaagttcagccgctggggggcagggaaattcccggcggggtttaaataaaccatcaaagatcccaaccatgagcaaaaagaccaccaccgcgagcccgagaacccccggcccaaaaaggtag

SEQ ID NO: 124353 - DNA, 1035 bp, synthetic construct
  misc_feature 1..1035: note = Description of Artificial Sequence: Synthetic coding sequence
  source 1..1035: mol_type = other DNA
atgacagccgtcgcagacatttttgatagggacggcgacggctacatcgactactacgagttcgtcgctgccctccaccccaacaaggacgcctacaggccaacgacggatgctgataagatcgaagatgaagtcacccgacaagtcgctcagtgcaaatgtgcaaagcgattccaggtagagcaaatcggggagaataagtatagattcggggatagccagcagttgagactggttagaatactgcggtcaaccgtgatggtgagagtggggggagggtggatggcactcgacgagtttctggtgaagaatgatccttgtagggcacgaggcaggaccaacattgagctcagggagaaatttattttacccgaaggggcttctcaggggatgaccccatttagaagcagagggcggcgcagcaagcctagtagtcgcgctgctagccccaccagatcaagtagttcggcttctcagtctaaccatagctgtacatccatgccaagcagtccagccacgcccgcatccgggaccaaaacttcactgcagttctctcggtgctatgataaaccctggttagtcaactcaaaagcagggacccctatccgcgactctcacagtcccgatctacagctgcccaccccagaggtcatcccaagcagcggcagtaagctgaagcggcccaccccgacatttcacagctccagaaccagcttggcaggggatacgagcaatagctcatcgcctgcctcaactggcgccaaaactaatcgcgccgatcccaaaaaatcggccagccggcctggtagccgcgcagggtcccgagccggttcgcgtgcatcatctcggagagggagcgacgcgagcgatttcgatctgctggaaacccaatcagcttgcagcgataccagcgaaagctcggccgcgggcggacagggtaacagtagacgggggctgaataaaccatctaaaattcccacaatgagcaaaaaaacaaccaccgcctcccccagaactcccggccccaagcgatag

SEQ ID NO: 124354 - DNA, 16293 bp, synthetic construct
  misc_feature 1..16293: note = Description of Artificial Sequence: Synthetic coding sequence
  source 1..16293: mol_type = other DNA
atgagttctagcgatgaggaaaccctgagtgaacggagttgccgaagcgaacgctcctgccgctccgagcggtcataccgatcagagcgttctggctcattgtccccctgtcccccgggcgatacactcccatggaatttacccctgcatgagcagaaaaaaaggaagagtcaggactccgttctcgatcctgcagagcgggccgtagttagagtcgccgacgaaagagatcgggtgcagaagaagacattcaccaagtgggtcaataagcatctgatgaaggtaagaaagcatataaatgatttgtacgaggacctgagggatggacataacctcattagcctgctggaggttcttagcggcattaaactgcctcgggaaaagggcaggatgcggttccacaggctccagaacgtacagattgcccttgattttctcaaacagagacaggtaaaactggtcaatataaggaatgacgacattaccgacggcaatccaaagctcacactcggcctgatttggaccatcatccttcatttccaaataagtgacatctacatctccggcgagagcggcgacatgagcgccaaggaaaaactattgttatggactcagaaagtcactgcaggttacaccggaatcaaatgtactaacttcagttcttgctggtccgacggaaaaatgtttaacgcactcatacaccgatacagacccgaccttgtcgacatggagagggtgcagattcagtctaaccgggaaaatctggaacaggcctttgaagtcgctgagcggctcggggtcactcgtttactcgatgctgaggacgtggacgtgccatccccagacgaaaaaagcgttatcacttacgttagtagcatctatgacgcttttccgaaagtccccgagggcggcgagggcatctccgccacagaggtcgactcacgctggcaggagtaccagtcgcgagtagattccctgatcccatggatcaagcagcacacaatactgatgagtgacaagaccttcccccaaaatcccgtcgagctgaaggccctctataatcaatatatacactttaaggaaaccgaaatacttgctaaggagcgcgaaaaaggacgcattgaggagctgtataaattactcgaggtatggatcgaatttggacggatcaagttgccccaggggtaccatccaaacgatgtggaagaggaatggggaaaattgatcatagaaatgctcgaacgtgaaaaaagcctgagaccggctgttgaacgccttgaattgctccttcagatcgccaacaaaatccagaacggagccctgaactgcgaggaaaaactgaccttggccaagaacaccctccaggccgatgccgcccacttggagtccggacagccagttcagtgcgagagcgatgtcattatgtacatacaggagtgcgaggggctcattcggcagctccaggtggatcttcagattctgagggacgagaattactatcaactagaggaactggcatttcgggtaatgagacttcaggatgaactcgtgaccctgaggctcgagtgcacaaacctgtaccgcaaggggcatttcacatctctggagttagttccaccatctacccttacgacaacacatctgaaagctgagcccctaactaaggctacccattctagttcgacttcttggtttcgcaaaccgatgacacgggccgaactcgtggctatctctagctccgaggacgagggcaacttgagatttgtctacgaactattgtcatgggtggaagaaatgcagatgaagctggaacgcgcagagtggggcaatgatctcccgagtgtggaactgcagctggagacccagcaacacatccacactagtgtagaagaactgggaagttccgtaaaggaggcccggctctacgagggcaagatgtcccagaacttccacacctcttacgccgagacacttgggaaactggagactcagtattgcaagctcaaggaaacatcgagctttcggatgcgccacttacagagcctgcacaagttcgtcagtcgtgcgaccgccgagttgatttggctcaacgagaaagaagaggaggaactggcgtatgattggagcgataacaactcgaatatttccgcaaagcgtaactacttttctgaacttaccatggaactggaagagaaacaagacgtttttcggagcctgcaggacactgccgagctactgagccttgagaatcaccccgcgaagcagacagttgaggcatactccgcagctgttcagagccagctgcagtggatgaagcaactgtgtttgtgcgttgagcagcacgtgaaagagaacacagcttactttcagttcttctccgatgcgagagaactggaatccttcttgcgcaatttgcaggactcgattaaacggaagtactcctgtgaccacaacacctcgctctcccgcttagaggatctattacaggatagcatggacgaaaaagaacagctgattcaatccaagtcatcagttgcatctctggtgggccgcagcaagacaatagtgcaacttaagccacgcagccccgatcacgtcttgaaaaacacaattagcgtgaaggcagtttgcgactatagacagatcgaaataaccatctgtaaaaacgatgaatgcgtcctggaagacaatagccagaggaccaaatggaaggtgatcagcccaacaggtaatgaggccatggtcccaagtgtgtgcttcctgatcccgcccccgaacaaggatgctattgaaatggcatcccgggtcgagcagtcataccagaaggtgatggctttatggcaccaactgcacgtgaatactaagagtctgatttcctggaactacttgaggaaggatctggatttagtgcaaacatggaatttggaaaagttgcgcagcagcgccccaggagaatgtcaccagattatgaaaaacctgcaagcgcactatgaggactttctccaggactcccgagattcagttctcttctcggttgcagataggcttagactggaggaggaggttgaggcctgtaaggccaggttccaacatctcatgaagtccatggagaatgaggacaaggaggagaccgtggcaaaaatgtacataagcgaactgaagaatatccggctccggctggaagaatacgagcagagggtggtcaagcggatccaaagtctggctagctcaagaacagatcgggatgcctggcaggataacgcactgaggattgccgagcaagaacacacccaggaagacctgcagcagctcagatcggacttagacgctgtgtctatgaaatgcgattcctttctgcaccagagtcctagtagctcttcggtgcccacccttcggtcagaattgaatttgctggtggaaaaaatggaccacgtgtacgggttgtcgaccgtgtacctcaataaactgaagaccgtagacgtgatcgtccgaagtatccaggacgccgagctgctggtgaaggggtatgaaatcaaactgtctcaggaagaagtcgtgctggccgatttatcagccctggaagcccactggagtacactgcggcactggcttagtgatgtgaaagacaagaattctgtgttctctgttctggatgaagagatagctaaggctaaggttgttgccgaacaaatgagccggttaacacctgagagaaacctggatctcgagcggtatcaggaaaaggggagccagctacaggagaggtggcatcgagtgattgcccagctcgagatcagacagagtgagctggagtcaatccaggaagttctgggcgactatagagcctgtcacggtaccttaattaagtggatagaggaaacaaccgctcagcaggagatgatgaaaccaggtcaggccgaggattccagggtgctgtctgagcagctaagccagcagacagccctgttcgctgagattgagaggaatcagacaaaactggatcaatgccagaaattctcgcaacaatacagtacaatcgtgaaagattatgagctgcagctgatgacatataaggccttcgtggaatcccagcagaagagcccgggcaaaaggagacggatgctgtcttcttcagacgctatcacacaggagtttatggacttgaggacaaggtatacagctctggtgactttaaccacccagcacgtgaaatacatctctgatgccctgaggagattggaggaagaggaaaaagtggtcgaagaggagaagcaggaacacgtggaaaaagtaaaggagctgttgggttgggtgtccacactggcacgcaatacccaaggcaaggcaaccagttctgagactaaagaaagcacagacatcgagaaagccatcctagaacagcaagtgctgagtgaggagcttacaactaagaaagagcaagtgtctgaggctattaagaccagtcagatctttctcgccaaacacggacataagctgagcgaaaaagagaagaagcagatctccgagcagctgaatgccctgaacaaggcgtaccacgacctgtgcgacggctccgcaaatcagctgcagcaactacagtcgcaactcgcccaccaaactgaacagaaaacactgcaaaaacagcaaaacacatgccatcagcagctcgaagatctttgctcatgggtgggacaggccgagagagcattggcgggacaccagggcagaaccacccagcaggacctgtccgccttgcaaaagaaccagagtgacctgaaagatctgcaggatgacattcagaatagagccacctccttcgccacagtggtcaaggatatagaaggcttcatggaggagaaccaaacaaaactttcgcccagagagctgacagcccttcgggagaaactgcatcaggcaaaagagcaatatgaggcccttcaggaggagacccgagtcgcacagaaggagctggaagaggctgttacatctgcccttcagcaggagactgagaaaagtaaggcagctaaggagctggctgaaaataaaaaaaaaatcgacgcattgctggattgggtcacaagcgtggggagttcaggggggcagctcctgacaaatctgccagggatggaacagctttccggggcctccttagagaaaggcgctctggatacgactgatggctacatgggtgtcaatcaggcacctgaaaagctcgataaacagtgtgagatgatgaaggccagacaccaagagctgttgagtcaacagcagaattttatcctggccacgcaatccgctcaggctttcctggatcagcatggacacaatttaacacctgaggagcaacaaatgctgcagcagaagttaggtgaactaaaggaacagtatagtacaagtcttgcccagagcgaggccgagcttaaacaagtgcagaccttgcaggatgagctccaaaagttcttgcaggatcataaggaattcgaatcctggctcgagagaagcgagaaggagctcgagaacatgcataaaggcggaagtagccctgaaaccttgccctccttgctcaaacggcaaggatcattctcggaggatgtgatcagccacaagggagacctgaggttcgttacaatcagtggtcaaaaagtgctggacatggaaaatagttttaaagaggggaaggaacccagcgaaattggtaatttagtcaaagacaagctgaaggacgctaccgagagatatacagcactccactccaagtgcaccaggctaggttctcacctgaatatgctgttgggccaatatcaccagtttcagaattccgctgactccctgcaggcctggatgcaggcgtgtgaggcaaacgtcgagaagttgctgagcgatacagtggcgtccgaccctggcgtgctccaggagcagctggctaccacaaaacagctgcaggaggagctggccgagcatcaggtgccggtggaaaaactccagaaggtggcaagagacatcatggaaatcgagggtgagcctgcccccgaccaccggcacgtacaggaaaccaccgactcaattctgtcccactttcagtcactgagctactcattggccgaaagatcttccctgctgcaaaaggccattgcacagagtcaaagcgttcaagagtccctggagtcccttttgcagtccattggtgaagtcgaacagaatctagaagggaaacaagtgtcgtctcttagttccggcgttattcaggaggccttggctaccaacatgaaactgaaacaggatatcgcccgccagaagagctcactcgaggctacacgcgaaatggtcactcgctttatggagaccgccgactctactaccgccgcagtgctgcaaggaaaactcgctgaggtcagccaaagatttgagcagctttgtctccagcagcaggaaaaagaatcctcacttaagaaactgctgccccaggccgagatgttcgaacacctgagcggcaaattacagcagttcatggagaataaaagccgcatgcttgcctctggaaaccagcctgaccaggatatcacacacttcttccagcagatccaggagcttaacttagagatggaagaccagcaggaaaatctggatacgctggaacacctcgtcacggaactgtccagttgtggctttgctttggatttatgccagcatcaggatagagtgcagaacttgagaaaggactttacagagctgcagaagacagtaaaggagcgcgaaaaagatgcttcctcctgtcaggagcagctggacgaattcaggaagctggttcgaacctttcagaagtggctgaaagagactgaagggagcattcctcccactgagactagcatgtcagccaaagagctcgagaagcaaatcgaacatctcaaaagtctcctagatgactgggcttccaaagggacactggtcgaagaaataaactgtaaaggcacatccctcgagaacttgataatggagatcacggcccccgattctcaggggaaaacaggctccatactccctagtgttggaagtagcgtgggaagcgtgaatggatatcacacctgcaaggatctgaccgaaatccaatgcgacatgtcagatgtgaatcttaagtacgaaaagctaggcggcgtgttgcacgaacgccaggagagccttcaggccatcctgaacagaatggaagaagttcacaaggaggctaattcagtgttacagtggctggaatccaaagaggaggttttaaagtccatggacgccatgtctagtcccaccaaaactgaaaccgtcaaagcccaggcagaatccaataaggccttcctggccgaactcgaacaaaactcgcctaagatccagaaagtgaaagaagcactagccgggctccttgtaacttacccgaatagtcaggaggctgaaaactggaaaaagattcaggaagagttaaacagcagatgggaaagggctacagaggtgaccgttgcccgccagagacaattggaagaaagtgcatctcacttggcctgtttccaagcagcagagagtcagctgcggccatggttaatggaaaaagaattgatgatgggcgttctaggaccattgtcaatagacccaaacatgctgaacgcacagaaacagcaggtccagttcatgttgaaggaatttgaggcaagacgtcagcaacatgaacagctcaacgaggctgctcaagggatcctgacgggaccaggggacgtctccctgtctacatcgcaggtgcaaaaggaactccagagtatcaatcagaaatgggtagagctcactgataagttaaactcccggtcatcccagattgaccaggccatcgtgaagtccacccagtaccaagaactgctccaagatctctccgaaaaggttagggccgttgggcagcgcctctctgtgcagtccgcaattagtactcagcctgaagccgtcaagcagcaactagaagaaactagcgagatccggtcagatctagagcagctggaccatgaggtaaaggaggcccagacgctgtgcgacgaactttcagtcctaattggggaacaatatctcaaagacgagctcaaaaaaaggttagagaccgtggctctcccattgcagggtttagaagatctggccgccgaccgtataaatcgcctgcaagcagctctcgcctctacccaacaatttcagcagatgttcgatgagttgcggacatggttagatgacaagcagtcccagcaggccaaaaactgccctatctctgctaagctagaaaggctccaaagccaactgcaggagaacgaggagttccagaaaagtctgaaccagcatagcggctcctatgaggtgatcgtggcagagggagagagcctcttgctaagcgtgccgcctggcgaagagaaaagaaccctgcagaaccagctggtggagctgaagaatcactgggaagaactgagcaagaaaaccgcggaccgccagtcaaggttaaaggactgtatgcagaaagcccagaaatatcaatggcacgtcgaggatttagtgccctggattgaggactgtaaggcaaagatgagcgaactgagagttacactggatccggtccagctggaaagctccttgctgcggagtaaggcaatgttgaacgaggtggagaagaggagatctctgctggaaattctgaacagcgcggctgatattctgattaacagtagcgaggctgacgaggatggaattagggatgaaaaagctggcattaatcagaacatggacgccgtcactgaagaattgcaagccaagacaggcagcctggaggaaatgacacagcggctgcgcgagttccaggaaagcttcaaaaacatcgagaaaaaggttgagggcgcaaaacatcagctcgagatatttgacgcactgggtagtcaggcatgctctaacaagaatctggagaaactgagagctcagcaggaagttttacaggctctggaaccccaggttgactatctccgtaattttacccagggcttggtggaggatgccccagacgggtctgacgcgtcccaactgttacatcaggcggaggtggcgcagcaggagtttctcgaagtgaagcagcgagtgaatagcggatgtgtgatgatggagaacaaactggagggcataggacaatttcactgcagggtccgggagatgttctcacagttagctgatcttgatgatgagctagacgggatgggggcgattggccgggacacagacagtctgcagagtcagatagaggacgtacgactgttcttgaataagatccatgtcctgaaacttgacatagaggcttccgaggccgagtgtcggcacatgctggaggaggagggaactctggacttattagggctgaagcgagagctggaggccctgaacaaacagtgcggaaaactcacggaacgcggtaaggctcggcaggagcagctggagctgactctaggcagggtagaggacttctaccgcaagcttaaaggtctgaacgacgctaccacagccgctgaagaagccgaggctctacagtgggtggtgggcaccgaagtggagataattaaccagcagctggcagacttcaagatgtttcaaaaggaacaggtggaccctctacaaatgaagttgcagcaggtgaacggcctgggccaaggactcattcagagcgccggaaaagactgtgacgtgcaggggctggagcatgacatggaggagataaacgctcggtggaatacgcttaataaaaaagtcgctcagaggatcgcacagttgcaagaggccttgctccactgcgggaagtttcaggatgcactcgaacccttacttagctggctcgctgacaccgaggagctcatcgcgaaccaaaaaccacctagcgccgagtacaaggtggtgaaggctcagattcaggagcaaaagcttctgcaaaggcttttggacgatcgaaaagcgacggttgacatgctccaggctgaaggtggccgcatagcccagtctgccgagttggccgaccgcgaaaaaattaccggtcagctcgaatctctggaatcccggtggacagagctgttgagtaaggcagctgccagacagaagcagctggaagacatactcgtgttggccaagcaattccatgagactgccgagcctatctcggattttctatcagtgacagaaaagaagctggccaactcagaaccagtgggtacccagaccgcgaagattcagcaacagatcattagacacaaggccttggaagaggacatcgaaaaccatgccaccgacgtacaccaggcggttaaaattggccagtccctgtcctcactgaccagcccagccgaacagggagtgctctctgagaaaatcgactctctgcaggcccgctattccgaaattcaggaccggtgctgcaggaaggccgccttactggaccaagctctgtctaatgcccgattattcggggaggacgaggtggaagtgctcaattggctggccgaagttgaggacaagctctcctctgtgtttgttaaagacttcaagcaggacgtgttacaccgacagcatgccgatcacctcgcgctgaacgaagagatcgttaaccgcaagaagaacgtagatcaggcaatcaagaatggccaggccctcctcaagcagacaacaggggaagaggtgctactgatacaggagaagctggacgggattaaaacccggtacgcagatattacagtgacaagttccaaagctctgagaactcttgagcaggccaggcaattggcgaccaagttccagtccacttacgaggaattgacaggatggcttagagaagtggaggaagagctggccacctcaggaggccagagccccacaggggagcagattccacagttccagcagcgtcagaaagagctgaaaaaagaggtgatggaacatagactggtcctggataccgttaatgaagtctcaagggccctcctggagctggtgccttggcgcgcaagggagggactggacaaactcgtgtccgacgcaaacgaacaatacaaattagtaagtgatacaataggccagcgggtcgacgaaattgatgccgctattcagcgttcacagcagtacgagcaggccgcggatgccgaactggcctgggttgctgaaactaagcggaaactgatggctctgggcccaatccggctggaacaggaccaaaccactgctcagctgcaggttcaaaaggcctttagtattgatataattaggcacaaagacagtatggatgagctgttttcacatagatccgaaatctttgggacgtgtggagaggagcagaagactgtgctccaggaaaagacagaatcactgattcaacaatatgaggctatttctctgctgaacagtgagcggtacgcacgcctcgagagagcccaggtactggtcaatcagttttgggagacctatgaggaactctccccatggatcgaggaaacacgggcactgatcgcccagttgccctcccccgccatcgaccacgaacagctcagacagcaacaggaggagatgagacagctgagagaatcaatcgccgagcataagcctcatattgacaaattgttgaagatcggccctcaactgaaggagttgaacccagaggaaggggaaatggttgaggagaagtatcaaaaagccgagaatatgtacgcacaaatcaaagaggaggttcgacagcgcgcattggctcttgacgaagccgtatctcagtctacccagatcaccgaattccacgacaagatcgaaccaatgctggagactcttgaaaatctgagctcccgtctccgtatgcctccgctcatccctgcggaggttgataagattcgcgaatgcatcagcgataacaagtctgcaaccgtggagcttgaaaaacttcagccaagctttgaggccttgaagaggcgaggggaggagctgatcggccgctctcaaggggccgataaggatctggctgccaaggaaatccaagacaagcttgatcagatggtcttcttctgggaggacataaaagctcgggcagaagaaagagaaataaaattcctggacgtgttggagctggcagagaaattctggtatgacatggcagccttgctcaccactatcaaggatacacaggacatcgtacacgatctggaatcccccggtattgaccccagtatcattaaacagcaggtagaagccgctgaaaccattaaggaagaaactgatggtcttcatgaagagctggaattcatcagaatcctgggagcagacctcatctttgcatgcggggagacagagaagccagaggtgaggaagtctatcgatgaaatgaataacgcttgggaaaatctaaataagacgtggaaggaaaggctcgaaaaattggaagacgccatgcaggctgccgtacaatatcaggatacgctgcaagcaatgtttgattggctggacaacaccgttatcaagttatgcaccatgcccccagtgggtaccgatttaaacacagtgaaggaccaactaaacgagatgaaagagttcaaagtggaagtttatcagcagcagatcgaaatggagaagcttaaccaccaaggggagctgatgttgaagaaggctaccgacgaaactgatagggatatcattcgtgagccccttaccgagttaaagcacctttgggaaaatctgggcgaaaaaattgcccatcgccaacataaactcgagggagcactgttggcgctcggtcagttccagcatgcactggaggagttgatgagctggctaactcacacagaagagctgttggacgcccaaaggcctatatctggcgatcccaaagtgattgaagtagagctggcaaagcatcacgtcctgaaaaacgatgttttggctcatcaagccacagtggaaactgtgaacaaagctgggaatgagctgctggaatccagtgccggtgacgacgcctcctcactgaggtcaaggcttgaggccatgaaccaatgttgggaatcagttcttcagaagaccgaagagcgtgagcagcagctgcaatccacactccaacaggcccagggcttccattctgagatcgaagacttcctgttggaactgacacggatggagtcacaactatcagccagtaaaccaaccgggggccttcctgaaacagcccgagagcagttggatacccatatggagctatactcccagctgaaagccaaagaggagacctataatcagctacttgacaagggcagattgatgctcctctcaagggacgactctggatctggcagtaagaccgagcagtccgtggcactcctggagcagaagtggcacgtcgtctcctctaagatggaggagcggaaatccaaactcgaagaggcactgaatctggccactgaatttcagaactcattacaagaattcatcaactggctgacgttggctgaacagtcgctcaatattgcttcacccccaagcctgatcctgaatactgtgttgtctcagattgaggaacacaaggtattcgcaaacgaggtaaatgcacaccgggatcaaatcattgagttagaccagactggcaatcaacttaaatttctgagccaaaagcaagatgtcgtgttgatcaaaaacctgctagtctccgtgcagagtagatgggagaaggtggtgcagcgtagcattgagagaggccgctccttagatgacgctaggaaaagggcaaagcagttccatgaagcatggaaaaagctgattgattggctggaggatgccgagagccaccttgactccgagctggagatttcaaacgatccggacaagatcaagctgcagctgagcaagcacaaggagtttcaaaaaactttgggggggaaacagccagtgtacgatacgactatccgaacggggagggctctaaaagagaaaaccctgctcccagaggacagtcagaagctagacaatttcctaggcgaagtgcgcgataagtgggacacagtttgtggcaaatccgtcgaacgccagcacaaactcgaggaggctctgcttttctctgggcagtttatggatgcgctgcaggccctcgtcgactggctgtataaggtcgaacctcagttagcagaggatcaaccagtacacggcgatttagatctagtcatgaacctaatggacgctcacaaagtgttccaaaaggagctgggcaaaaggactggcactgtgcaggtgttaaagcgcagcggccgcgagcttatcgagaacagtagggatgacaccacgtgggtcaagggccagctgcaggagctgagtactcgctgggacaccgtgtgcaagctgtcagtgtcaaagcaatctaggttggagcaggcactgaaacaggcggaggtgtttagggacaccgttcatatgctgctggaatggttgagcgaggccgaacagaccctcaggttcagaggtgccctgcctgatgacacagaagcactccaaagtctgatcgatacgcacaaagagttcatgaagaaggtggaagagaaaagggtggacgtcaattctgcagttgccatgggggaggttatcctggcagtgtgtcatcccgactgtatcacaactatcaagcactggatcactatcatacgtgctagattcgaagaagtgttgacctgggccaagcagcaccagcaacgcctggaaacggctctgagcgaattggtcgctaatgcggaactcctcgaggagctcctggcctggatccagtgggctgaaacaactttgatccaacgggaccaggagcctatcccccagaacatcgatagagtcaaggctcttatcgcagagcaccagacctttatggaggaaatgacgcggaagcagcccgatgttgatcgcgtgacaaagacctacaagagaaagaacatcgagcctacgcatgccccatttattgagaagagcagaagtggtgggaggaagagcctgtctcagcccaccccaccgccaatgcccatcctcagccagtccgaggcaaagaatcctaggatcaatcagctctctgctcggtggcagcaagtgtggttgctcgccctcgaaaggcagcggaaactgaacgacgcgctcgatcgactcgaagaactgaaggagtttgcaaactttgatttcgacgtgtggcgcaagaaatatatgcgctggatgaaccacaaaaagagtagagtgatggacttctttagaaggatagacaaggaccaggatggtaagataactcgacaagaattcatcgacggtatcctggcaagcaagttccccactacaaaactggagatgaccgccgtcgccgacattttcgatcgagatggggacggatacatagattactatgagtttgtggctgcactccacccaaacaaggacgcctaccggccgactactgacgcggacaagatcgaagacgaagtgacgcgacaggttgcacagtgtaaatgcgccaagcgcttccaagtggaacagattggggagaacaagtacagatttggggacagtcagcagttgcgtctcgttcgcattcttcggtccactgtcatggtgagagtgggagggggctggatggcattagacgagtttctggtgaaaaacgacccgtgtcgcgccaggggtcggacaaatatcgagctccgagagaagttcatactcccagaaggagcctctcagggcatgaccccttttcggtctcgaggccgccgctctaagccatcttctcgggcggcttcaccgactcggagcagttccagcgcatcacaatctaatcatagttgtacttccatgccatctagcccggcaactcctgcctccgggactaaagtcatccccagttcaggatctaagctgaaacgcccaacacctacctttcactccagccgaaccagtttggccggcgataccagcaacagttcatcccctgcttccactggcgccaagacgaatagagctgacccaaaaaagagtgcttctaggccgggaagcagggcaggctcgcgggccgggagtcgggcttctagcaggcgtggcagtgacgccagtgattttgatctgttggaaactcagtctgcctgctctgatacatcagagtcatctgcagccggcggccagggaaacagtagaagagggcttaacaaacccagcaagattccaaccatgtcgaaaaaaacgacaactgcatctccacggacccccggccctaagagatag

SEQ ID NO: 124355 - DNA, 8412 bp, synthetic construct
  misc_feature 1..8412: note = Description of Artificial Sequence: Synthetic coding sequence
  source 1..8412: mol_type = other DNA
atggacggcgtggcagagttctctgaatacgttagcgaaactgtggacgtaccttcacccttcgatctgctcgagcctcccacaagcgggggatttctgaaactttctaagccatgctgctatattttccctggaggacgtggggacagtgccctttttgcagtgaatggcttcaatatattagtggatggaggctcggaccgcaaatcgtgtttctggaaactggtaaggcacttagatcggattgactccgtcctgctgactcatatcggagccgataacctgcccggaataaatgggctgctgcaaaggaaagtggcagagctggaagaggagcaatctcaggggagctcttcctacagcgattgggtgaaaaacctgatcagccccgaacttggggtagtattcttcaacgtgcccgagaagctccggctccctgatgcctctcggaaggctaagagatcgatcgaggaagcatgcctgacactccagcaccttaacaggttgggcatccaggccgagccattgtacagggtggtgtccaataccatcgagcccttgaccctatttcacaagatgggagtcggccggctagatatgtatgtgctgaaccctgtcaaggacagtaaggaaatgcagtttttaatgcagaaatgggccgggaattccaaggccaagactggaatcgtccttccaaacggcaaggaagctgaaattagcgtcccctatcttacaagtattactgccctggtcgtctggctgcctgcaaacccaacagagaagatagtacgtgtgctgttccctggaaacgcccctcagaacaagatccttgagggactcgaaaagctgcggcatctggactttctgagataccccgtggcgactcagaaagatctcgccagtggggctgtccccaccaatttgaaaccttccaagataaaacagcgggccgactcaaaagagtccctgaaagcaacgaccaaaacggcagtctccaagctggcaaaaagagaggaggtggtggaggagggcgctaaggaggccaggtctgaactggccaaagagctggctaaaacagagaagaaagccaaagaatcttctgagaaaccaccggagaagccagcaaagcctgaacgcgtcaagaccgagtcgtcagaggccctgaaagccgagaagcggaagctcataaaggacaaggttgggaaaaagcacttgaaggaaaagatcagcaagctggaggaaaagaaagataaagagaaaaaggagatcaagaaagagaggaaggagctgaagaaagacgagggacggaaggaggaaaaaaaggatgctaagaaagaagagaaacgcaaagatacaaagcccgagcttaagaagatcagcaaacctgatctaaagccattcacacctgaggtaagaaagactctttacaaggctaaagtcccgggcagggtgaaaatcgacaggagcagggccattcgtggggagaaggagctgagttccgagccccagactcctccagcccagaaagggaccgtccctctgccaacaatctcaggacacagagagctagtgctctccagtcccgaggatctcacccaggatttcgaggagatgaagcgggaggagcgggcgctcctggccgagcagcgtgacactgggctcggcgacaaacctttcccacttgatacggcagaagaggggccccccagcaccgccattcagggaactcctccctcagttccaggacttggtcaagaagagcacgtcatgaaagaaaaagaactcgtccctgaagtgcctgaagagcaggggagtaaagaccgaggactagattcaggggccgaaacagaggaagaaaaggacacatgggaggaaaagaagcagcgggaggccgagaggctgcccgataggacagaagccagagaggagagcgagcctgaggtcaaggaagatgtaattgagaaggcagagctggaggaaatggaggaggtccacccatcagacgaggaggaagaggacgcaaccaaagcggaaggcttttatcagaaacacatgcaagaacctctcaaggtgacacccaggagcagggaggcattcggtggacgagagcttgggcttcaggggaaggcaccagagaaggagacttctctattcctctcgagcctcactactcctgcaggagccacagaacacgtatcatatatccaggacgagacaattccaggatatagtgagacggaacagaccataagcgatgaagagattcacgatgagcccgaggagaggccagcccctccacgctttcacactagcacatacgatctacccggcccagagggggctggcccctttgaggcaagtcaaccagccgatagtgccgtgccagccaccagcggtaaagtgtatggcacgcctgagaccgagctcacttacccgaccaacatagtcgctgctccactggccgaggaagagcacgtttcatcagccacttccatcactgagtgcgataagctcagctctttcgctacttccgtagccgaagaccagtcagtggccagtcttactgccccccagacagaagagactggcaagtcatcactgctccttgacacggtgacgagtattccatcttcacggactgaggctactcagggcctggattacgtccccagtgcaggcacgatcagtcctacatcctcactcgaggaagataaaggttttaagagtcccccctgcgaggatttctctgtgacaggcgaatccgagaaaagaggcgagattatagggaagggacttagtggagaacgtgccgtcgaagaggaggaggaagagaccgccaacgtggaaatgtcagagaagttatgttcacagtatgggaccccggttttttccgccccaggacatgctctgcaccccggcgaaccggcattgggtgaagcggaggagagatgtttgagcccggatgatagcacggtgaaaatggcatcaccacccccctccggcccaccctcagcaacacacaccccattccaccagtctccggtggaggaaaagtccgaaccgcaggactttcaggaggccgacagctggggggatacgaaaagaactcctggtgttggaaaagaagacgccgcggaagagaccgtcaagcctggccctgaagagggtacactagaaaaggaggaaaaggtgccacctccgcggagcccacaggcgcaggaggcccccgtgaacatcgacgaaggattgaccgggtgcactatccaactgttgccggcccaagacaaagcaatcgtgttcgaaattatggaggctggcgagcctacaggaccaattcttggcgcggaagctctgccggggggcctgcggactctgccccaggaacctggtaagccgcaaaaagacgaagtcctgcgatatcccgaccggtccttatcccccgaagacgccgagtccctgtctgtgctttccgtgccaagcccagacactgccaaccaggagccaaccccaaaatccccttgtggactgacagaacagtacttgcacaaggacagatggccagaggtcagtcctgaggatacacagagccttagcttgagcgaggagagtcctagcaaagagaccagcctagacgtaagcagcaaacagctctcaccagaaagtctaggcactctgcaattcggcgagctgaatctgggaaaggaggaaatgggtcacctcatgcaggccgaagacacgagtcaccacactgcgccaatgtctgtgccagagccccacgctgctacagctagccccccaaccgatggtaccacaaggtattctgcccagacagatatcaccgatgattccttggataggaagtcaccagccagcagtttctcccattccaccccatctggcaatgggaagtacctccccggagctatcaccagccctgacgagcacattttgactcctgactccagctttagcaagagcccggaatccttaccaggcccagcacttgaggacattgccatcaagtgggaggacaaggttcccggactaaaggatagaacctcggagcagaagaaggagcctgagcctaaagacgaagtgcttcaacagaaggacaagacccttgaacataaggaggtggtggaaccaaaagataccgctatctaccagaaggatgaagccctgcatgtaaagaatgaagctgtgaaacagcaagacaaagccctggaacagaaaggtagagatcttgagcagaaggataccgccctggaacaaaaagataaggcactggaacccaaggacaaggatctagaggagaaagacaaggcactcgagcagaaagacaagattccagaagagaaggacaaggccctggaacagaaagatacggcactcgagcagaaagataaagccctggaaccaaaagataaagacctggagcagaaagaccgtgtgttagaacagaaagaaaagatccctgaagagaaagataaggccctcgaccagaaggtaaggagtgtggagcataaggctcccgaggacactgttgccgagatgaaagatcgagacctggaacagaccgataaagcccctgagcagaagcaccaagcacaggaacagaaggataaagtctccgagaagaaggaccaagctcttgagcagaagtactgggcgctgggtcaaaaagatgaggcattggaacaaaacatccaggcattggaggaaaaccaccagacccaggaacaggagagcctggtccaggaggacaaaactagaaaacctaagatgctggaggagaaaagtcccgaaaaagtcaaagcaatggaggagaaactggaggccttattggagaaaaccaaggcactcggtttggaagagtccctcgtgcaggaggggagagccagggagcaagaggagaagtactggcgcggccaggatgtggtacaagaatggcaggaaacgagccctacacgagaagaacctgcaggcgagcagaaggaattggcccctgcctgggaggacacttctcccgaacaggataatcgttactggcggggacgagaagacgttgcactggagcaggacacctactggcgggaactgtcttgcgaaaggaaggtttggtttccgcatgagctggacggccaaggcgcccgcccacattacactgaggaacgagagtctacttttctggacgaagggcccgatgatgaacaagaagtcccactacgggagcatgcaacacggtcaccttgggcgagcgatttcaaggattttcaggaatcctccccacagaagggactggaggtggaacggtggttagctgagtcgcccgtggggctgccccctgaggaagaggataagctcactagaagcccttttgagataatttcccctcccgcatcgccccccgagatggtgggacaacgcgtgcctagcgcgcctggacaggagtccccaattccagatcctaaactgatgccccatatgaagaatgagccgacaacaccatcctggctggcggacatacccccctgggtaccaaaggaccggccactgccccctgcgcctctgagccccgcccctgggccccctaccccggcacccgaaagtcacacacccgcaccttttagttggggtacggcagagtacgactcagtggtggccgccgtgcaggagggggctgccgaattggaaggtggaccctattctcctctgggaaaggactacagaaaggctgaaggggagagggaggaagaaggtagggccgaggcacccgacaagtctagtcatagtagcaaggtcccagaggctagcaaatctcacgctactaccgaacccgaacagacggagcccgagcagagggaacccaccccttaccctgacgaacggtccttccaatatgcagacatatacgagcagatgatgctaacaggactgggacctgcctgtcctacaagggaaccacccctcggcgctgccggcgactggccgccctgcttgagcactaaagaggctgcggctggtcgcaacacaagcgccgagaaagagctctcctctcccatttcacctaaaagcctccagtcagacacacctacctttagttacgcagccctcgccgggccaaccgttccaccccggcctgaacctggccctagtatggagcccagccttacacctcccgctgtcccccccagggctcctatcctttctaaaggccctagtccaccacttaacggcaacatactttcttgttcaccagatcgacggagtccctcacctaaagaaagtggcagatcacattgggacgactccacatccgattctgaattggaaaaaggtgcaagagaacagcctgaaaaagaggcccagtctcccagcccaccacatccaatacccatgggcagcccgactttgtggcccgaaactgaggcacacgtgagccctccgttggactcccatctgggacccgcccgcccctccttggatttccctgctagcgccttcggcttctcctctttacagcccgcccctccccagttacctagtcctgccgagccccgctctgcgccctgcggttcattagcctttagcggggaccgggcattggcccttgcacccgggcctccaactcgtactcgccatgacgagtacctggaggtcaccaaggcaccctcccttgactcctctctgccccagctgccctctcctagctctcccggggctccactgctcagcaacctgcccagaccagctagccctgctctgtccgagggctctagctcagaggccactacccctgttatatcctcagtggccgagcggttctcccctagtcttgaggccgccgagcaggagagtggagagctcgatcccggtatggaacctgcggcccattccctgtgggacctcacacccctgtcacccgctccacccgccagtctggacctggcacttgccccagccccttccttacccggcgacatgggcgacgggattctaccgtgccatctggaatgctcggaagccgctacagagaagccatctcctttccaggtgccatccgaagactgcgctgccaatgggcctacagaaaccagccccaacccccccggcccagcccccgctaaggctgagaacgaggaggccgccgcctgtccagcgtgggagagaggggcatggcctgagggggcagagcgttcttcgaggccagacacactgctatcccctgagcagccagtgtgccctgccggcgggagtggcggccctccttcaagcgcctcacccgaggtagaggctggccctcagggttgcgcgaccgaacctcggcctcacaggggcgaactttcaccgagtttcctgaaccctccactgccaccctccatcgatgaccgagacctgagcaccgaagaggtccgactggtggggcgaggaggacgacgacgagtcggcgggccgggaacaaccgggggcccctgccccgtgaccgacgagacaccccctacttcggcgagtgatagcggttctagtcagtccgactctgatgttcctcccgagactgaggagtgtccttcaattacagccgaggcagctctagactcggacgaggacggtgattttttacctgtcgacaaagccgggggcgtcagtggcactcaccatcctcgccctgggcacgacccaccccccctgccccagccagatccccggccatctccaccgcgcccagatgtgtgcatggctgacccagagggtctgagctctgaaagtggtcgggtcgaacgactgagagagaaggaaaaagtccaaggccgggttggccggcgggcaccaggtaaggcaaaacccgcttccccggctcgcaggctggatcttcggggcaaacgcagccccactcccgggaaaggcccagccgatagggccagccgggcgcctccccggcccagatccactacgtctcaggtgaccccagctgaggagaaagacggacatagcccaatgtcgaaaggcctggtgaacgggttgaaggctggccccatggcgctctcctctaagggcagcagtggggcccctgtgtacgtcgatctggcttatattccaaaccattgcagcggcaagaccgccgatctggatttctttcgtcgagtccgcgctagttactatgtggtcagcggtaacgaccccgcaaacggcgagccctcaagggctgttttagacgccctgctggaagggaaggcccagtggggcgagaatctgcaagttacactgattccaactcacgacacagaagtcacaagagagtggtaccagcagactcacgaacagcagcagcagctcaatgttctagttttggcctccagttcgactgtggtcatgcaggatgaaagcttccctgcctgtaaaatcgaattttag

SEQ ID NO: 124356 - DNA, 9126 bp, synthetic construct
  misc_feature 1..9126: note = Description of Artificial Sequence: Synthetic coding sequence
  source 1..9126: mol_type = other DNA
atggagacagaggcggagcctgctcgaccgcatggcgtggcgatggaaacgacgccaggtctgggtcttcgctcacccggtgcccccctggcccagaatcctgcagaactgctgtgtgaagcgggcgccgcagtggctgctgctagatgggatctccagaaacacagtctcttgattgtgatcggtgacataggcaccgagtcccagttacgggccgttcgggctcacctggagcaaggaatactcagctggaacatcgatttgtcttccttcgacctcaaccagcagctgagactgttcatcactcggcatttggctcacttcagctcagaggtgaaggggcagaggacgctatgtcaccagagtgaaattctagagaccatcatcctggtaaacccatctgctgattcaatttcctccgaagtgcatcatctcctttcctcttccagcgcctataagctcctcattctttctggtcaaagccttgagccaggaggagacctgatcctgcagtccggtacctactcctacgaaaactttgcacaggtgctgcataaccctgaaataagtcaactgctaagcaaccgtgaccctgggatacaggcctttctgacagtgtcatgcctcggcgagggcgattggagccacctgggtctctcctcgagccaggaaaccttgcacttaagactcaaccccgagccaacacttcccaccatggacggagtggccgagttctctgagtatgtgtctgaaacagtggacgtgcccagtcctttcgatttactagaaccccctacatcaggtggattcttaaagctaagcaaaccttgctgctacattttcccaggggggagaggggactctgccttgtttgccgtgaacggctttaacattctcgtggatgggggctccgatcggaagtcttgtttttggaaacttgtcaggcaccttgacaggattgactctgtcttactgactcacattggagccgacaaccttcccggcattaacggattgctgcaacgcaaggtggcagagttggaggaagagcagtcgcagggcagtagctcctacagtgattgggtgaaaaatctcataagtccggagcttggcgtcgtttttttcaacgtgcccgagaagcttcgactgccagacgcttcaagaaaagccaaacgcagtattgaagaagcctgcttaaccctgcagcaccttaaccggttgggcatccaggccgagcccttgtacagggttgtatctaatacaattgaaccactaacattgttccacaaaatgggggtgggtaggctcgacatgtacgttttgaacccagttaaggattccaaggaaatgcagttcttgatgcaaaagtgggccggaaatagcaaagccaagacaggaatcgtacttcccaacggcaaggaagcagagatttcagtgccctacctcacatccattacagccctcgtggtctggctgccggcaaatccaactgaaaaaattgtgagggtactgttcccagggaatgcaccccagaataaaatattggagggcttggaaaaattaaggcacctggacttccttaggtatcccgtggctacccagaaggaccttgcctccggcgctgttcccacaaacctcaagccgtctaagattaaacaaagagcagatagcaaagaatcccttaaagcaaccaccaagacagccgtttccaagctggcgaaacgcgaagaggtggtggaggaaggtgccaaggaggctagaagcgaactggcaaaggaacttgctaagaccgaaaaaaaggcaaaggagtcctcagagaagccccctgagaagcccgctaagcccgaaagggtcaagaccgaatcctctgaggcgctcaaggctgaaaaacgaaagctgatcaaggacaaagtcggcaagaaacatctcaaggaaaagattagcaagctggaagaaaaaaaagataaggagaagaaagagatcaagaaggagcgcaaggaattgaagaaagatgaaggcaggaaagaagagaagaaggatgctaaaaaggaggagaagaggaaagacaccaaacctgaactaaaaaagatcagcaagccggacctaaagcctttcacccccgaggtgcgcaaaaccttgtacaaagcaaaggttcccggccgagtgaagattgatagatcacgcgccatcaggggggaaaaagaactgagtagtgagccccagacccctccagctcagaaaggcaccgtcccattgccgaccatcagtggccaccgcgaactcgtcctgtcttctcccgaagacctcacccaggacttcgaggaaatgaagcgagaggaacgggctctcctggctgaacagcgggatacaggcctgggcgataagcccttcccactggatacagcagaagagggccctccaagtaccgccattcaggggacgccaccatccgttccaggattgggccaggaggagcacgtaatgaaggagaaagagctcgtgccagaggtgcccgaagagcagggtagcaaggacaggggactggactccggtgccgaaaccgaggaggaaaaagatacttgggaggagaagaagcagagagaggccgagaggcttccggatcggaccgaggctcgcgaagaaagcgaacccgaggtgaaggaggacgtgatcgaaaaggccgaactggaggagatggaagaagtccacccatccgacgaagaggaggaggacgcaaccaaagcggaggggttttatcagaagcatatgcaggagccactgaaggtcacacccaggtccagggaagcatttgggggacgagagctgggcttgcagggtaaggccccggagaaagagacttctctgttcctcagctccctgacaacccccgccggcgccaccgagcacgtgagctacatccaggacgagacaattcccgggtactcagagacggagcagacgattagcgatgaggagattcatgatgagccggaggagcgtccagctccccctagattccacactagtacctatgatctgccaggtccagagggggccggtcccttcgaggcgagccaacccgccgatagtgcggttccggccaccagcggaaaggtgtacgggaccccagagacggagctcacttaccctacaaacatcgttgcagccccactggcggaagaggaacatgttagcagcgcgacttccattactgaatgtgataaactcagctcgttcgcaacttcggttgctgaggaccagtcggtggcaagtcttactgcaccgcagaccgaagagacgggtaagtctagcctgctattggatacagtcacgagcatcccgagcagtcggacggaggccactcaaggactggattacgtaccaagtgccggtacaatcagcccaaccagcagcctcgaggaggacaagggctttaagtccccaccctgcgaggacttctctgtcacgggggagtccgaaaagaggggggagatcattggcaagggcctctccggagaacgcgccgtggaggaggaggaagaagagacagctaacgttgagatgagcgaaaagctctgctctcaatacggaacccctgtgttcagcgcccccggccatgccctgcatccaggagagcccgccctcggcgaagcggaagaacgatgcctgtccccagacgattcgacagtcaagatggcatctcctcccccctccggccccccttctgccacgcacaccccttttcatcagtcacccgttgaagagaaatccgaaccccaagatttccaggaagccgactcatggggtgatacgaagcggaccccaggagtcggcaaggaggacgccgcagaggagaccgttaaaccaggacccgaggaaggtaccctggagaaagaagagaaagtgcccccgccaagatcaccccaggcccaggaggctccggtcaacatagacgagggactgacgggctgtacaatacagctcctgcccgcgcaggacaaagccattgtgtttgaaattatggaggcaggtgaacctactgggccaattctgggagcagaggccctacccggggggttgagaacactgccccaggagccaggcaagccccagaaagacgaggtactgcgctacccagatcgaagcttatctcccgaagacgcggagagcctttcggtgctgtcagtgccaagtccggatacagcaaaccaggaaccaacacctaagtctccatgtggactgacagagcagtatttacacaaagaccggtggcctgaggtgtcgcctgaagacacacagtcactgtctctgagcgaggagagcccgtctaaagagaccagccttgacgtaagtagtaaacagctgtctccagagtccctgggaaccttacagttcggagaactgaacctgggcaaggaggagatgggccatctgatgcaggccgaagacacctcccatcatactgccccaatgtcagtgccagaaccacatgccgccaccgcatcccccccaaccgacggaacaactagatactctgctcagacagacatcacggatgactctctggatcgaaagtcacctgcctcctccttttcccacagcacgccaagtggtaacggcaagtatcttcctggggctatcactagcccagatgaacatattctgactcctgattcctccttttcgaaaagtcctgagtccctacccgggcccgctttagaggatatcgccatcaaatgggaagataaagtgcccgggctgaaggacaggacctcagagcagaagaaggagcctgagcccaaagacgaggtgctgcagcaaaaagataaaacacttgagcataaggaagtagttgagcccaaagacaccgcgatctatcaaaaagacgaggccttgcacgtcaagaacgaggccgtgaaacagcaagataaagccctcgagcagaaggggagggacttagaacaaaaggataccgccctggaacagaaagataaggccctcgagcccaaggataaggacctggaagaaaaggataaagccctcgaacagaaagacaaaatcccagaggagaaggacaaggcccttgaacaaaaagatacagcgctggaacagaaggacaaagcccttgagcccaaagataaagatctcgagcagaaagatagagtactggagcagaaagaaaaaatccccgaggaaaaagataaggcattggaccagaaagtgcgctcagtcgaacataaggcaccagaggataccgtggcggaaatgaaagaccgggaccttgagcaaaccgacaaggcaccagagcaaaaacaccaggcacaggagcagaaggacaaggttagcgaaaagaaagatcaagcacttgaacagaagtattgggccctgggacagaaggatgaggcccttgaacaaaatattcaggcgctggaggagaaccatcagacgcaggagcaagaatctctagtgcaagaagacaagacgaggaagcctaagatgctggaggagaaaagccctgaaaaggtcaaggctatggaggaaaaattagaggccctcctggaaaagactaaggctttaggcctcgaggagagtcttgtccaggagggccgggcaagggagcaggaagagaagtactggcggggtcaggacgttgtccaagaatggcaggaaacttcacctactcgcgaagaaccagcaggtgagcagaaagagctcgcaccagcctgggaggatacgtctcccgaacaagacaatcgttattggagaggccgggaggacgtcgccttggaacaggacacatattggagggagctcagctgtgaaagaaaagtgtggttcccccacgagcttgatggacagggagctcggccccattacacagaggaaagagagagcacttttttggatgagggccctgatgacgagcaggaagttcctctcagagagcacgccacgcgcagcccctgggcttctgatttcaaggatttccaggagagcagcccacagaaagggctcgaggtggaacggtggctggctgaatcccccgttggcttgccccctgaggaagaagataagcttacgaggagtccttttgaaattatcagtccccccgcctcccctcccgagatggtgggccaacgggtgccctctgccccaggccaggagtctcccataccagacccaaaactgatgccacatatgaaaaacgagccaaccactccttcttggctggccgatataccgccatgggtacctaaagaccgccctcttccccccgcccctctaagcccggctccaggcccccctacacccgcccctgagtcccatacccctgcgccatttagttggggcaccgccgagtacgactcagtggttgcagctgtacaggagggagccgccgaactggagggcgggccttattcccctctcgggaaagactacagaaaggccgagggggaaagagaggaagaaggccgtgctgaagcccctgacaaatcctcccacagcagcaaggtgccggaagccagtaagtcacatgccaccaccgaaccagaacaaactgagcctgagcaacgggagccgactccttaccccgacgaacgatcatttcagtatgcggatatttacgaacagatgatgctaacagggctgggcccagcctgtcctaccagggaaccgcccctcggcgccgccggcgactggcccccatgcctctctacaaaggaggccgctgcaggccgcaacactagtgctgagaaagaactgagctcccctatttcccctaaaagcctgcaaagtgacactccaacgtttagttacgcagcactggctggaccaactgtgccccctagacccgagccaggaccctctatggaaccctcactgacaccacccgctgttccccctagggctcctatcctctctaaaggccccagccctcccttgaacggaaatattctcagttgtagtccagatagaagatccccctcaccgaaagaatcgggaagatctcattgggacgactcaacttctgacagcgaactggagaagggagcccgtgagcagcccgagaaagaggctcaatctccttctccaccacaccctatccctatgggcagccctactctgtggccagagacagaggcacatgtgtctccccctctagattctcatcttggacctgccaggcccagcttagatttccctgcctccgcttttgggttctctagtctgcaacctgcccctcctcagttacctagccccgctgagcctaggagtgctccctgcggcagccttgctttttccggtgatcgggccttggcgctggcaccaggaccccctacccggacacgccacgacgagtacctcgaagttacaaaagcaccctctctggatagcagcctcccgcagctcccttccccttcttcacccggagctccactgctttccaatctcccacgccctgctagcccggctctctcagagggcagcagctccgaggccacaacacctgtcatatcttctgtcgccgaaaggttctcgccaagtctggaagctgcagaacaggaatccggagaactggatcccggtatggagccagcagctcattctttatgggatctaacacctctcagcccggccccgcccgcatcccttgatctcgccctggcccctgccccctctttgcccggggacatgggcgacggtatcttaccttgccatctggagtgctccgaggcagctacagagaagccatcccccttccaggttccaagtgaggattgtgctgccaatgggcccaccgagacctccccaaaccctcccgggcctgccccagccaaggccgagaacgaagaagctgccgcgtgccctgcatgggaaaggggagcttggccagaaggcgccgagcggagctcccgtcctgataccctcctcagcccggagcagccagtatgccctgcaggaggatctggggggccaccctcgtcagccagccccgaggtggaagccggaccccaaggttgtgcaaccgaacccagacctcaccgcggagagctgtccccaagctttctcaaccctccactgcccccctcaatcgatgatagggatctctctacagaggaagtgcggctcgtgggtagaggcgggcgcagaagggtgggcggtcccggaactaccgggggcccttgtccagttaccgacgagacacccccgacctcagccagcgattccggctcctcccagtcagacagcgatgtccctcctgaaacagaggagtgtccctccattacagctgaagctgccctagactcagatgaagacggcgactttctcccagttgataaagcagggggagtgagcgggactcaccatccgcgcccaggtcatgatccaccaccccttccccagcccgacccaaggccatcaccccctaggccagatgtgtgtatggcagaccccgaggggctatcttccgagtctggccgcgttgaaaggctcagagagaaagagaaagtgcagggacgcgttggccgcagagccccaggtaaagcaaagccagccagcccagccaggaggcttgatttgcgcggtaagagaagccccacacccggaaagggtccagctgatcgcgcgagtcgcgcacccccacgcccacgttctaccacctcccaagtgacaccggccgaagagaaggatggacactcaccaatgtccaagggcctggtgaacgggttgaaggccgggccaatggcactgagctcaaaaggatcctcaggtgctcctgtatatgtcgacctagcttatatccctaaccactgtagcggcaagacagctgacttggattttttcaggcgtgtgcgggcatcatactacgttgtaagcggcaacgatccagcaaacggcgagcctagccgtgcggttttagacgcccttctggaaggcaaggcacagtggggcgagaatctgcaagtaacactcattcctacgcatgacaccgaagtgacccgagaatggtaccaacaaacgcatgagcaacagcaacaacttaatgtgctcgtgcttgcaagtagctctacagttgtcatgcaggacgaatcttttccagcatgtaagatcgagttttag

SEQ ID NO: 124357 - DNA, 8418 bp, synthetic construct
  misc_feature 1..8418: note = Description of Artificial Sequence: Synthetic coding sequence
  source 1..8418: mol_type = other DNA
atggacggcgtcgccgaattctctgaatatgttagtgaaacggtcgacgttccaagtcctttcgatcttctggagccgcccacatctgggggttttctgaaactgagcaaaccgtgctgctatattttccccggaggtagaggcgattccgcgctgttcgccgtgaacggatttaatattctagtggatggcgggagcgatcggaagtcttgtttttggaaactcgtccggcacctcgaccggatcgattccgtcttgctcacccacatcggagcagacaatctccccggtattaacggattgctgcagcgtaaagtggccgaattggaagaagaacagtcacaggggtcttcctcttacagtgactgggttaaaaatctcatttccccggaactgggagtggtcttcttcaatgtacccgagaagcttagactgccagatgcaagccgcaaggctaagagaagcatcgaggaggcgtgcttgacactccaacacctgaaccgtttgggcatacaagcagagcctttgtatcgtgtagtgtccaacacgattgagcccttaactctgtttcacaagatgggcgtggggaggctcgatatgtacgtactcaacccagtgaaggattcaaaggagatgcagttcctaatgcagaaatgggcgggcaattctaaggctaaaaccgggattgtgctgcccaatgggaaagaagccgagatttctgtaccctacctaacatctattacggcactggtcgtctggcttcccgctaatccaaccgagaagatcgtccgggtgctctttccaggcaacgcgccccagaacaagatactagagggtctggagaagctccgacacttagattttctgcgttatccagtggccactcagaaagacctcgccagcggggccgtgcctactaatctcaagcccagcaagatcaagcagagggcggactcaaaggaatctctgaaggcaacaaccaagaccgccgtgagcaagctcgccaagagagaggaagtcgtggaagagggcgctaaagaagccaggtctgagcttgctaaagaactcgccaaaacagaaaaaaaggcgaaagaatcttctgagaaaccccccgaaaagccagctaaacctgagagagttaagacggaatcttcagaggccctgaaagctgagaaaagaaagctcatcaaagacaaagtgggaaaaaaacacctgaaagagaaaatctccaaacttgaggagaaaaaggataaggagaaaaaggaaattaagaaagagcggaaagaactgaagaaggacgaaggcaggaaagaagagaagaaagacgcaaaaaaggaagaaaagcgtaaggacaccaaacccgagcttaagaagataagcaagccggacttgaaaccattcacaccagaggttagaaaaaccctttataaggccaaggttccgggcagggtcaaaattgataggagcagagccatccgtggggagaaagagttgagcagtgagccacaaacaccccctgctcaaaagggaacagttcccctgcctactatcagtggtcatcgcgaactggtgctttcctctcctgaggacctgacccaggactttgaggagatgaaaagagaggagagggcactcttggccgagcagcgtgataccggtttgggagacaaacccttcccacttgacactgccgaagagggacctccaagtacggccattcaggggactcccccgagcgtgcccggcctcggccaggaagaacatgtgatgaaagagaaggagctcgtgcctgaggttccggaagagcagggaagcaaggacaggggcctggacagtggagccgaaaccgaggaggaaaaggacacctgggaagagaaaaagcagagggaagcagagcgacttccagaccggacagaggcccgggaggagtctgagcccgaggttaaggaggatgttatagagaaagctgagctggaggagatggaagaggtacacccgtccgacgaggaggaggaggacgcaaccaaagcggagggtttttatcaaaaacacatgcaggagccactgaaggtgactccgcgaagtagagaggcattcgggggaagggagttgggacttcagggcaaagctccagagaaggagacgtctctctttctgtcttccctgactactcccgccggagccactgaacatgtctcctacatccaggatgagacgatccctggctacagtgaaacggagcaaacaatttccgatgaggagatccacgatgagccagaagagcgtcctgccccccctaggtttcacacctctacctacgacctgccgggccctgaaggggcaggccctttcgaggcctcccaacccgccgatagtgccgtccccgccactagtggtaaggtctacggcacgcccgagacagagctgacttacccgacaaatatcgtggccgccccactggcggaagaggaacatgtttcttctgctactagtattaccgagtgcgataagctgagtagttttgcaacttccgtggctgaggatcaatcggtagccagtctaaccgcccctcagacagaagagacaggcaaaagttctctgcttcttgataccgtgaccagcattccctccagcaggaccgaagcaacacaaggcctggattatgtccccagcgccgggactatttcaccgacctctagtctggaggaggataagggcttcaaatctcccccctgcgaagacttcagtgtgactggcgagtccgaaaagcgaggcgaaataataggcaaaggtctgtccggcgaacgcgctgtggaggaggaggaggaagagacggcgaacgtggaaatgtcagagaaactgtgtagccagtatggcactcctgttttttctgctcctggacacgcccttcatccaggtgagcctgcgctgggcgaggctgaggagagatgtctgtctcccgacgattccaccgttaagatggccagtcctccaccctctggtcctccctcggccacccacaccccattccaccagtcaccagtagaggagaaaagcgagccccaagatttccaagaggccgactcatggggggacacaaagcggaccccaggggtaggcaaggaagacgcagccgaagaaaccgttaaacccgggcccgaggagggtaccctcgagaaggaagagaaggtgcccccacctagatctccacaggctcaagaagctccagttaacatagacgaggggctcacgggctgtacgattcagctgctacctgctcaggacaaagcaatcgtgtttgagattatggaagctggggaacctacaggtcccatactgggggcggaggccctgcccggcggcctgaggaccctccctcaggaaccggggaagccccagaaggacgaggtcctgcggtaccccgacagatctctctctcccgaagacgccgagtccctgtctgttctctcagttccctcccctgatacagccaaccaggagcctacccccaagtcaccgtgtggcttgacagagcagtatttgcacaaagaccgatggcctgaggtgtctcccgaggatactcagtctttgtctctctctgaggaaagcccttccaaagagacatctttggacgtaagctccaaacagttatctccagagagcctgggcactctgcagtttggggaattaaacctgggtaaagaagagatggggcacctgatgcaggctgaagacacaagtcaccacacagctcccatgagcgttcctgagcctcatgcggccaccgctagcccacctaccgacgggaccacaaggtattcagctcagacagacattactgacgacagcctggatcgcaaatcccccgcctcttccttcagtcatagcactccgtcaggcaacggcaagtatctccccggggcaatcacatctcccgatgagcatatactgaccccagatagctccttttctaagagccctgagtccctccccggcccagcccttgaagatattgcaatcaagtgggaggataaggtgcctggcttgaaggacagaactagcgagcagaaaaaagagcccgagccaaaagatgaagtcctgcagcagaaagacaagacattggagcataaagaagtggtcgagccaaaagatacagccatttaccaaaaggatgaagcactgcatgtgaagaatgaagccgtgaaacagcaggacaaagcattggagcagaaaggccgggatctcgagcagaaagacacagctctggaacaaaaggataaagctctcgagcccaaggataaggacctcgaggaaaaggacaaagctctggagcagaaagataaaatcccagaggaaaaagacaaagcccttgaacagaaggacacagccctcgaacaaaaggacaaagctctcgagcccaaggacaaagacctggaacagaaggatagggttcttgagcagaaggaaaaaatccctgaagagaaagacaaggcgttggatcagaaagttagaagcgtggagcacaaggcgcctgaggacacagttgccgagatgaaggatcgcgatcttgaacagactgacaaagcccctgaacaaaaacaccaagcacaagagcagaaagataaggtgtccgagaaaaaagaccaggcacttgagcagaaatactgggcactgggccagaaagacgaggccctggagcaaaacatccaggcgttggaagagaatcatcagacacaggagcaagagagcctcgttcaggaagataagacccgcaagcccaagatgctggaggaaaaaagccctgaaaaagttaaagcaatggaggagaaacttgaggctctgctggagaagacaaaagcactgggccttgaggaaagtctggtccaggagggtcgggctcgggagcaggaagaaaaatattggcgcggtcaggatgtggtccaggagtggcaggagacctcacctacgcgggaagaacccgcaggggaacaaaaagagctggcacccgcctgggaggacacctctcctgaacaagataacaggtactggcgggggagggaggacgtggcactcgaacaggacacttactggagagagttatcctgtgagagaaaagtttggtttccacatgaactcgatgggcagggggcaagaccccactacaccgaagagcgagagagcacgttcctcgacgagggccccgatgacgagcaggaagtcccattgagagagcacgccaccaggagcccgtgggcctcagactttaaggatttccaggagtctagtccccaaaaggggttggaagtagagaggtggctcgctgaaagcccggtgggattgccccctgaggaggaggataaactcacaagatcgccgtttgaaattatctccccacctgcctccccgcctgagatggttgggcagcgcgttcctagcgcacctgggcaggaatccccgatacccgatcccaagctgatgccccatatgaagaacgagccaaccactccatcctggctcgctgacatcccaccttgggtgccaaaggacagacccctcccccctgccccattgtcgcccgcaccaggaccacccacccctgcgccagaatctcatacaccggcgcccttctcatggggcactgcagaatatgatagtgtcgtcgctgcagtccaagaaggagccgcagagctggagggtggcccatactctccgttaggaaaggactacaggaaagccgaaggagagagggaggaggagggtcgcgccgaagcacctgacaagtcaagccacagttcaaaggtgccagaggcttctaagagtcatgctaccacagagccagaacagacagagcccgaacagcgcgaacctacaccataccctgacgaacggagctttcagtatgccgacatctacgaacaaatgatgctgaccgggctgggtcctgcgtgtcctaccagagaacctccgttgggcgccgccggggattggccaccgtgtctatctacaaaagaggcagccgctggcagaaatacttctgcagagaaagaactctcttcccctatatcaccaaaaagccttcagagcgatacacccacattcagctatgcggcactggccggacctactgtgcctccaaggcctgagcctggaccttccatggagccctccctgacccctccagccgtcccaccacgcgcccctatcctatctaagggaccaagcccgcccctgaacggaaacattctttcatgctcccccgacagacgaagtccttcgccgaaagagagcgggcgctctcattgggacgatagcacgtccgactctgaactggaaaaaggcgcccgcgagcagcctgagaaggaggctcagagtccttcacccccacatccaattccaatgggaagtcccaccctttggccagagacggaagcacatgtcagcccccctctcgactcacacctcggaccggctagacccagcctagacttccccgcatcagctttcggcttctcctctctgcagcccgcgcctccacagcttccgtcgcccgccgagcctagaagcgccccttgcggctcactggcatttagcggggacagagcattggctctggctccaggaccacccacccgtacccggcacgatgagtaccttgaggtgacaaaggccccgagcttggacagtagtctgcctcaactccccagccccagcagcccgggcgccccactattgagcaacctgccacgccccgctagtcccgcccttagcgaaggaagctctagcgaagcaacaacccctgtgatcagctccgtggccgagagattttccccatcactcgaggcggcagagcaagaatccggggaacttgatcctggaatggagcctgccgctcactccctttgggatttaaccccactttcccctgcgccccctgcctctttagacctcgcactcgcccctgcacctagcctgcctggcgatatgggggatggcatcctgccatgtcatttagagtgcagtgaggctgcaaccgagaagccttctccatttcaagtgcccagcgaggactgcgcggctaatggtcccactgaaacctcacctaaccctcccgggcctgctcctgccaaggccgaaaacgaggaggcagcggcttgtcctgcatgggagcggggggcctggcctgaaggtgctgagcgttcttcacgtccagacacacttctgtctccggagcagccagtgtgcccagccggagggtccggcggccccccatcgtctgcatcccccgaagtggaggctggtccacagggttgcgctacagagcccagaccccatcgcggcgagctcagccccagcttcttaaacccacctctacctcccagtattgacgatcgggacctctctactgaagaagtgcgcttggtcgggcggggcggcagaaggagagtgggtggacccgggacaacaggcggaccgtgccctgttactgacgaaacaccacccacctccgcatccgatagcggttcttctcagagtgattccgacgtcccacctgaaactgaagaatgcccttccatcactgcagaggctgcccttgacagtgatgaggatggagactttcttccggtggacaaagcaggtggagtcagtggtacccatcatccgagaccgggtcatgatccccctccattaccccaaccagacccgcgcccttcccccccccggccagatgtctgcatggccgatccagaaggtctgtcatcagaatccggcagagtggagcgcttaagggagaaggagaaggtccagggcagagttggaagacgtgcgcccgggaaggcaaagcctgcatccccagcccggaggctcgatctacgggggaaacgctcccccacacctgggaaaggaccagccgacagggcaagcagagccccccctcgtcctagatcaaccacgagccaggtaacgcctgccgaggagaaggacggacactccccgatgtcgaagggacttgttaatggactcaaggctggacctatggcactgtccagcaagggaagttccggcgccccagtttacgtggaccttgcatatatccccaaccattgcagcggcaaaacggctgacctggattttttcaggagggtccgggcatcctactatgtggtaagtggcaatgatcccgccaacggagaaccttcaagggccgttctagatgcattgcttgagggaaaagcacaatggggcgaaaacctgcaagttagcgtcacactgatcccaactcacgatacagaggtgaccagggaatggtatcagcagacgcacgaacagcagcaacaactgaatgtgctagttcttgcttcgtcctccactgtggtcatgcaagatgagagctttccagcctgcaagatcgagttttag

SEQ ID NO: 124358 - DNA, 1884 bp, synthetic construct
  misc_feature 1..1884: note = Description of Artificial Sequence: Synthetic coding sequence
  source 1..1884: mol_type = other DNA
atggatggcgtcgcggaattcagtgaatatgtgtctgagactgtagatgtccctagcccctttgacttgcttgagcctcccacctccggcggattcctcaagctctctaagccgtgttgttacattttcccgggcggacgcggggactccgctctgttcgcggtgaacggctttaacattctcgtagacggggggagcgataggaaaagctgtttttggaaactcgtcagacacctcgataggatcgattctgtcctgttgactcatatcggcgcagataatctccctggcattaatggactgctgcagcggaaagtcgctgagctggaggaagaacaaagccagggttcttcttcttacagcgattgggtgaaaaatctgataagcccagagctgggggttgtgttctttaacgttccggagaaattaagactgcctgatgccagccgcaaggctaagcgctccattgaagaggcctgcctgacattgcagcaccttaaccgactggggatccaggcagagcctctctacagagtcgtgtccaacacaattgagccactgacgctgttccacaagatgggggttgggcggcttgatatgtacgtgctaaaccctgtgaaggactcaaaggaaatgcagtttttgatgcaaaagtgggccggcaactctaaggcaaaaacaggaattgtcctgcctaacggcaaagaagccgagatttcggttccctaccttacctccataaccgcattagttgtttggcttccagctaacccgactgagaaaatcgtgagagtgttgtttcctggcaatgctccacaaaacaaaatcctcgaaggactggaaaagttacgccacctggactttctgcgctatccagtggccacgcaaaaagatctggcaagtggtgccgtgcccacgaacctgaagccatccaaaatcaagcagcgcgctgattctaaagaatctttgaaggcgaccactaagacagcagtgagcaagttggctaagcgggaagaagtggttgaggagggcgcaaaggaagctaggtcagagctagccaaggagctcgcgaaaacggaaaagaaggctaaggaaagttcagagaagccccccgaaaagccggccaagcctgaaagggtgaaaaccgagtcgtccgaggctttaaaggctgaaaagcgaaaactgattaaggacaaggtcggaaaaaaacatctcaaggaaaagataagcaaattggaggaaaaaaaagataaggagaaaaaagagatcaagaaagaacggaaggagctgaaaaaggatgagggcagaaaagaagagaagaaagatgctaagaaggaggaaaaacgcaaggacacaaagcctgaactcaagaagattagcaaaccagatctaaagcctttcacccccgaagtgcggaaaaccctatataaggctaaggtgcccggcagggtgaaaatcgatcggagcagagctataagaggagagaaagagctttcatctgaaccccagacccctcctgcccagaagggcacagtgcccctcccaacaatctctgggcacagagagctggttctgagctcccccgaagatctgacgcaagattttgaggagatgaagcgagaagagagagcattactggcagagcagagggacaccgggctgggggataagcccttccccttggacacggcagaggaaggacccccttcgacagcgattcagggtacccctccttcagtaccaggcctgggacaggaagagcacgtaatgaaagaaaaggagctcgtccccgaggtgccagaagaacaaggaagtaaagatcgtgggctcgacagcggagccgaaacagaggagaagaagaagaaaaagaaaaaaaaaaagtag

SEQ ID NO: 124359 - DNA, 1680 bp, synthetic construct
  misc_feature 1..1680: note = Description of Artificial Sequence: Synthetic coding sequence
  source 1..1680: mol_type = other DNA
atggcagacgaacgaaaagatgaagctaaggcccctcattggacttctgcccctctgaccgaggcctctgcacacagccatccccccgagatcaaggatcaaggaggagctggagagggtctggtcagatctgcgaatggctttccatatagagaagacgaggagggggcatttggcgagcacgggagccagggcacctatagcaatactaaagagaatggaataaacggcgaattaacgagtgccgatagggagaccgccgaagaggtcagcgcgaggattgtccaggtcgtcacagccgaggcagtggcagtacttaaaggcgagcaggagaaagaggcccagcataaagatcagaccgctgccttgcccctggccgctgaggagacagccaatctcccaccgtctcctcctccgtcccccgcatccgagcagacggttacagtggaagaagcggctggaggcgaatccgccttggcccccagcgttttcaagcaggccaaagacaaagtaagtaactctaccttatctaagatccctgcccttcagggatcaaccaaatccccacgttattccagcgcatgccctagtactacaaagcgggccacatttagcgactcccttcttattcagccgacatctgccggttcgacagacagactgccttactccaaatctggaaacaaggacggtgtcactaagtccccagaaaaacgtagctcgctgcccaggccctcctccattctgcccccaagacgaggagtgtctggagacagagatgaaaattcgttttccctcaacagtagcatctcaagcagcgcccgacgcaccacacggagcgaacccatccgacgcgctggcaagagcggaacttccacccccacaactcccggtagcaccgccattaccccgggaacaccaccttcttactcgtcaaggacacctgggacaccagggactccaagctatccccgcacaccccacaccccggggaccccgaagtctgcaatcttggtgccaagtgaaaagaaggttgctatcatccgcacacctccgaagagccccgcaacacccaaacagttgaggctgataaaccagcctctgcctgatctgaaaaacgtcaagtcaaagattggcagtaccgacaacataaaataccagcccaagggcggacaggtccggatcctcaacaagaagatcgacttttctaaggtccagagccgctgcggatccaaagacaatatcaagcactctgctggcggggggaacgtgcagatcgtgaccaaaaagattgacctatcacatgttaccagcaagtgcggaagtctgaagaacatccgacatcggcccgggggcggtagggtgaagatcgagtcggtcaaattggacttcaaggagaaagcccaagccaaggtaggcagtctcgacaatgcacaccacgtgcccggtggcggaaacgtgaagatcgactcgcagaagctgaactttagggagcacgccaaggcacgggtggatcatggcgcagaaattatcactcaatcccctggccgtagctccgtcgctagccctaggaggctgtccaacgtcagctcatcaggatcgatcaacttgctggagtccccacaactcgccacccttgcagaagacgttacagctgcccttgccaaacagggcttatag

SEQ ID NO: 124360 - DNA, 5484 bp, synthetic construct
  misc_feature 1..5484: note = Description of Artificial Sequence: Synthetic coding sequence
  source 1..5484: mol_type = other DNA
atggcggacgaacgcaaggatgaggcaaaagccccccattggacctccgcccccctcactgaggcctctgcccactctcacccacccgagattaaggatcagggcggagctggggaagggctcgtgcgtagcgccaacggcttcccctatagggaggatgaagaaggggccttcggtgagcatggttcccaggggacatattctaatacaaaggaaaacggcattaacggggaacttacctctgccgaccgcgaaaccgcagaagaggtctcagcccgcattgtgcaagtcgtcacggcagaagccgtggccgtgttgaagggggaacaagagaaggaagcccagcataaagatcagactgccgcgctgcctctggcagccgaggagaccgcaaatctgcctccgagcccccccccatctcctgccagcgagcagacagttaccgttgaggaagacttgctcaccgccagtaagatggagttccacgaccagcaggagctgaccccctccacagctgaaccaagtgatcagaaagaaaaggagtctgagaagcagtccaagccaggcgaggatctgaagcacgctgcgttggtgagccagccagaaacaactaaaacctaccctgacaaaaaagatatgcagggtaccgaagaagaaaaggctcctttggcactctttggccacacgctcgtagcctctctggaggacatgaaacagaagacagagccatctctggtggtacctggtatagaccttcccaaagaacctcccacgcccaaggaacagaaggattggtttatcgagatgcctacagaagcaaagaaggacgaatggggtcttgtagctcctatttcgcctggtccattaacccccatgagagaaaaggatgtgttcgatgatattccaaagtgggaaggaaagcagttcgattcacccatgccttctccatttcagggcgggtcctttacccttcctctcgatgttatgaaaaatgagattgtgaccgaaacttctcccttcgcacctgcattcttacagccagacgacaagaaatcactccagcagaccagcgggcctgcgacggcaaaggacagctttaaaattgaagaaccccatgaggctaagccggacaaaatggccgaggccccgcctagtgaagcaatgaccctgccaaaggacgcgcatataccagtggtcgaggagcatgtcatgggcaaggttctggaagaggaaaaagaagcaatcaatcaagagactgtacagcagcgggacactttcactccttctgggcaggaacccatcttgactgagaaggagaccgaactgaaactggaggagaagacgacaatttccgataaagaggccgttccaaaagaatctaagcccccaaaacccgccgacgaagagatcgggatcattcaaacctcgacagaacacaccttttccgaacagaaagaccaggaaccaaccactgacatgttaaagcaggatagctttccagtgtcactcgagcaggctgtcacagattccgccatgacatctaagacgttagagaaagccatgaccgagccttcggccctgattgaaaaatcttcaatccaggagctcttcgaaatgagggtcgatgataaagacaaaattgaaggtgtcggagccgctactagcgcggaactcgacatgcccttttatgaggataagtccggcatgagcaagtacttcgagacatctgctttgaaggaggaggcaacaaaatccatcgaaccgggtagcgactactatgagctctcggatacaagggagtctgtacacgagtcgatcgatacaatgagccctatgcacaaaaacggagataaggaattccagaccggaaaggagagtcagccctcaccacctgcacaagaggctggctactctacacttgcacagagctacccttcagatctaccagaagaaccaagctctccccaggagcgtatgttcaccattgaccccaaggtctacggcgagaagcgtgacctccattccaagaacaaggacgacctaacgttatctaggtccctgggattgggcgggcgtagcgctattgagcaacgctcgatgagcataaatctcccgatgagctgcctcgactcgatcgccctgggcttcaacttcggccgcggacacgatctctcacctcttgcaagcgatatcctgacaaacacctctgggagtatggatgaaggagacgactatctgccagccacaacaccagcactggagaaggctccatgtttcccggtggaatctaaggaagaggagcagatagagaaggttaaggctaccggcgaagagagtacgcaagccgagatttcctgcgagtcccccttcttggcaaaagacttctataagaatggcaccgtgatggctcccgatctcccagagatgctagacctagcgggcactcggtccagattagcctcagtctccgctgatgcagaggtggcccggaggaaatcagttccgtctgaaaccgtggttgaggattctcggaccggtctgccacccgtgacagatgagaaccatgtcattgtcaaaactgactcacaactagaagatctggggtactgtgttttcaacaagtacaccgtccccctcccaagcccagtacaggattctgagaatctgagtggtgagagcggaacattttatgagggcacagacgacaaggtgcggagggatctcgccaccgacctttctcttatcgaggtgaagcttgcagccgccggtcgagttaaagatgaattttcagtagacaaagaggcatccgcccacattagcggagacaaatcaggcctgagtaaagaatttgatcaggaaaagaaggcaaacgacaggttggacaccgtcttggagaagtctgaagaacacgccgactcaaaagagcatgctaaaaagacggaagaggctggagacgaaatcgaaacgttcgggcttggggtgacctacgaacaggcccttgccaaggatctgagcatcccaactgatgcaagctcagagaaggcagagaagggtctcagttccgttcccgaaattgccgaagtcgagccttctaaaaaggtggagcagggattagatttcgccgtgcagggccagctagatgtgaagatcagcgattttgggcagatggctagtggtctcaatatagatgacagaagagctaccgagctgaagttagaggctacccaggacatgaccccgtcaagcaaggctccacaggaggctgatgcctttatgggcgtggaatctggacatatgaaggagggcacgaaagtctccgaaactgaggtaaaagagaaggtggcaaagccagatttggtccatcaggaagccgtggataaggaggaatcctacgaatctagtggagagcacgagagtctgacaatggagtcacttaaggcagacgagggtaagaaggagacgtctcccgaaagttccttgattcaagatgagatagccgtgaagctttcagtcgagattccctgtccaccagccgtctctgaggccgatctggccacggacgaaagggcagatgtacagatggagttcattcagggccctaaggaggagagtaaggagacacctgatatttctattacccccagtgacgtagcagaaccgctacacgagacaatcgtgagcgagcccgctgagatccagagcgaagaagaggagatcgaggcacaaggcgagtatgacaagctgctgttcaggtctgatacacttcagatcaccgatctgggcgttagcggcgctagggaagagttcgtggaaacgtgtccttccgaacacaagggggtgattgagtctgttgtcacgatcgaagacgatttcatcaccgtggtgcaaacaaccacagatgagggagaaagtggatcacattcagttaggttcgccgccctcgaacagcccgaagtcgaaagaaggcccagtccacatgacgaggaagaattcgaagtagaggaggctgccgaggctcaggccgaacccaaggatggttcacctgaagcaccagcttcccccgagagagaggaagtcgcactaagtgagtacaagaccgagacgtacgatgattacaaagatgagacaaccatcgatgacagcattatggacgccgactccctctgggtggacacacaggatgacgatagatccatcatgaccgagcaactcgaaactattcctaaagaagagaaagcggaaaaggaagctagaagatcgagtctagagaagcataggaaggagaagccttttaaaacaggaagagggcggatcagcactcctgagcgtaaggttgctaaaaaggaacccagcaccgtgtcaagagacgaagtgcgccgcaaaaaagccgtttataagaaagccgaactcgccaaaaaaacagaagtgcaggctcacagcccatctaggaaattcatattgaaacctgcaattaagtacaccaggcctacacatctcagctgcgtgaagaggaaaacaactgcagcgggcggtgagtccgccttagctcccagcgttttcaaacaggctaaggacaaggtgagcgacggggtaaccaagtcaccggagaagcgcagctccctgccacgccccagttccattctgccacccaggaggggagtttcaggcgatcgggacgaaaattctttttccctgaactccagtattagttccagtgcaagacggaccacccggtctgagcctatccgcagagcaggcaagtctggaacctctactcctaccactcctggatccacggccataacccccggcactcctccttcatattctagccgaacacccgggacgcctgggacaccttcataccccagaaccccccatacccctgggacccctaagtctgccatactagtgcctagtgagaaaaaggtggctatcattcgcacacctcctaagagtcctgccacccccaagcaactccgcctgatcaaccagccactgcctgaccttaaaaatgttaagagtaagatcgggtccacagataatattaagtaccagcctaaggggggccaagtgcagatcgtgactaaaaagatagatttgtcacatgtgacttcaaagtgcggtagcctgaaaaacatccgccatagacccggaggtgggcgcgtaaagatcgagtctgtgaagctcgatttcaaagaaaaggcccaggccaaggtgggcagcctcgacaatgcccatcacgtgcccggcggcggaaatgtcaagattgatagccagaaactcaactttcgtgaacacgcaaaggcccgcgttgaccatggtgccgagatcatcacccagtccccgggtaggtcctccgtggcttcaccccgtcgcctgagtaacgtctctagttcaggctccatcaatctcctcgaatccccacagctcgctaccctagctgaagatgtcacagctgctttggctaagcaggggctttag

SEQ ID NO: 124361 - DNA, 1416 bp, synthetic construct
  misc_feature 1..1416: note = Description of Artificial Sequence: Synthetic coding sequence
  source 1..1416: mol_type = other DNA
atggctgacgagcgcaaggacgaggcaaaggcacctcactggacctccgctcccctgaccgaggcctcggcccacagccaccctccagaaataaaggatcagggtggagccggagaagggcttgtccgctcagcaaacggctttccctatcgggaagatgaggagggggctttcggcgaacatggcagccaggggacttactctaacacaaaggagaatggcataaacggcgagctgacttcggcagatcgcgaaacagccgaagaggtgtcagctaggatagtacaggtcgtgaccgcagaggccgtggccgtactaaaaggagaacaggagaaggaggctcagcacaaggatcagacggctgccctgccattggccgccgaggaaacggctaacttgcccccaagccctccaccaagccctgcaagtgagcaaactgtgacagtcgaggaggccgctgggggcgaatcagcgctggcaccctctgtgtttaagcaggctaaagacaaggttagcgacggggtgactaagagccccgagaaacggagctcccttccacgcccctcctcaattctgcccccaagacggggagtgtctggggaccgagacgaaaactccttctccctgaatagcagcattagttcgtctgcgcggcggaccactagaagtgaaccaatccggagggcagggaagtcgggcacctctacgcccactactcccggctctaccgccatcactcctggcactccccccagttacagctctcgcacgcctgggacaccaggaacaccatcttatccacggactccacatacccccgggactccaaagtcagccatcttagttccctccgagaagaaggtcgcaatcatccggacgccccccaagagcccagcaacgcccaaacaacttcggcttattaaccagcctttaccagatttgaagaacgtgaaatctaaaattggatccacagataacattaagtaccaacccaagggcggtcaggtccagatcgtcacaaagaaaatcgacctgagccatgttacaagcaagtgtgggtccctcaaaaatatcagacaccgaccagggggcgggcgtgttaaaattgaatcggtgaaactggactttaaggagaaggctcaggctaaagtcggcagcctagacaacgctcaccacgtccccgggggcggcaatgtgaagattgattctcagaagctgaattttcgagaacacgctaaggcccgcgtagatcacggcgcggaaattatcacccagtcacccgggcgcagctccgtggcctcccccagaagactatccaacgtctccagctctggatccatcaatctgctggaatctcctcaactcgctacattggccgaggatgttacagcggctcttgctaaacaggggctttag

SEQ ID NO: 124362 - DNA, 321 bp, synthetic construct
  misc_feature 1..321: note = Description of Artificial Sequence: Synthetic coding sequence
  source 1..321: mol_type = other DNA
atggctgacgaacgtaaagacgaagccaaggctcctcattggacgagcgcccctttgaccgaggccagtgcgcattcccacccaccggagattaaagaccaggggggcgctggcgaaggactcgtgcggagtgccaatggtttcccgtaccgcgaggacgaggagggggcatttggcgagcatggctctcaaggcacatacagtaacaccaaggagaacggtattaatggcgagctgacttccgctgaccgggagaccgccgaggaagtgtccgcgaggatcgtgcaagtggtgaccgcagaagctgttgccgtgctgtag

SEQ ID NO: 124363 - DNA, 1416 bp, synthetic construct
  misc_feature 1..1416: note = Description of Artificial Sequence: Synthetic coding sequence
  source 1..1416: mol_type = other DNA
atggctgacgagaggaaagatgaggcgaaggcgcctcactggacgagcgcccccctcacagaggctagcgcgcattcgcaccccccagagatcaaggaccaaggcggggctggcgaggggctcgtaaggagtgccaatggtttcccataccgtgaggacgaagagggggctttcggagagcatgggagtcagggcacctacagcaacacaaaggagaatggcattaacggagaactgaccagcgctgaccgtgagactgcagaggaggtgagtgcccggattgtgcaagtggtgacagcggaagctgtggcggtgttaaagggcgaacaggaaaaggaagcgcaacataaggaccaaaccgcagcacttccccttgccgcagaggagaccgctaacttgccaccaagtccacctccctcacctgccagcgaacagacagtcaccgtcgaggaggccgctggcggagaaagcgccctggccccgtccgtgttcaagcaagccaaggacaaagtttcggatggggtgacaaagagcccagagaagcgtagcagcctccctcgccccagttcaattctcccgcctagaaggggcgtgagcggagatcgggatgaaaactccttctcactcaactccagcatctcatcgtcagcccggagaacaacacgatctgaacccatcaggcgagcaggtaagagtggcaccagtacccctacaacacctgggtctactgccatcactcctggcacccctccctcctactcatctcggacacctgggacccccggcaccccaagttacccacgtacccctcacacacctggaacacctaagagcgccattcttgtccccagcgagaaaaaggtagccattataaggacgcccccaaaaagccctgccactcctaaacagctgagacttatcaatcagccattgcccgaccttaaaaatgtaaaatcaaaaataggcagtaccgacaatatcaaataccagcctaaaggaggccaggttcaaatcgtgacaaaaaagatagatctttctcatgtgaccagcaagtgcggctctttaaagaacattcggcaccgacccggcggcggccgcgtgaagattgaatctgttaagctcgacttcaaagaaaaagctcaggccaaagtcggaagtctcgataatgctcatcacgtgccaggcggagggaacgtgaagatagatagccagaaactgaattttcgggaacacgccaaggcccgggtcgaccacggagcagagattatcactcagtctccaggcagaagctctgttgcctccccgaggaggctttctaatgtttcatcatctgggagtatcaatctgctggagagccctcagttggccacgctcgccgaggacgtcaccgccgcgctagctaagcaagggttgtag

SEQ ID NO: 124364 - DNA, 5472 bp, synthetic construct
  misc_feature 1..5472: note = Description of Artificial Sequence: Synthetic coding sequence
  source 1..5472: mol_type = other DNA
atggctgacgaacgaaaggacgaggctaaggccccacattggaccagtgcgccgttgactgaggcctcagctcactctcaccccccagaaattaaagatcagggcggcgcgggtgagggcctggttaggtccgcgaatggatttccgtacagggaagacgaggagggggcatttggagagcatgggtcacagggcacatattcgaatacaaaggagaacggcatcaacggggagctcacctccgccgatagggaaaccgcagaagaggtatccgctcgcattgtccaggtagttacagctgaagccgtggcagtgctcaagggcgaacaagagaaagaagcccaacacaaggatcagaccgctgccctgccactagctgccgaggagactgctaacctgcccccctctccacctccaagtcctgcctcagaacaaaccgttactgtcgaagaggcttccaagatggagttccacgaccagcaggaactcacaccctcaacggctgagcctagcgaccaaaaggagaaggaatcagagaaacagagtaagcccggagaagatttgaaacacgccgcattagtgtcccagccggagacaaccaagacgtaccccgataagaaagacatgcaaggcacggaggaggaaaaggcccctctcgccttgtttggccacacactggtggcaagtctggaagacatgaagcagaaaaccgagcccagcctggtcgtgccaggcatcgacttacccaaagagcctcctacccccaaagaacagaaagactggtttatcgagatgcccactgaagctaaaaaggatgaatggggccttgtggccccaatctcccccggacctctgacgcctatgcgagagaaagacgtatttgacgatatcccgaaatgggagggaaagcagttcgatagtccaatgccttccccattccaaggtggcagtttcacgctgccgctggacgtaatgaaaaacgagatagtcaccgaaacatcccccttcgcccccgcgtttctgcagcccgatgacaaaaaatccctgcaacagacgagcgggccagctactgctaaggacagctttaaaatcgaggagcctcatgaggcaaagcccgacaaaatggctgaggcccctccctctgaagcgatgactctccctaaggacgcacatatccctgttgtggaagaacacgtcatgggcaaggtgctggaagaggaaaaagaagctattaaccaggaaaccgtgcagcagagggacacgtttacccctagcggacaagagcctatcctgactgaaaaagagactgaactgaagctcgaggaaaaaacaacgatctctgacaaggaggcagtgcccaaggagagcaagcctccgaaaccagccgatgaggagattggaattattcaaacttccacagaacacactttctcggagcaaaaagatcaggaacccacaactgatatgttaaaacaagattcatttcccgtgagcctcgaacaggccgtcacagactccgccatgacatcgaagaccctcgagaaagcaatgactgaaccaagcgcactgatcgagaagagttccatccaggagctattcgagatgcgggtcgatgacaaggacaaaatcgaaggtgtcggggccgctacaagcgccgaactcgatatgcccttctatgaagataaatcaggaatgtccaaatacttcgagacctctgcacttaaagaagaagccacaaagagcattgaacccggctccgactattacgagctttccgacacacgcgagtctgttcatgaatctatcgatacaatgagtccaatgcacaagaacggagacaaggagtttcagaccggtaaggaaagtcagccttcgccaccagctcaagaggctggttattctacccttgctcagagctatccctcggatcttcccgaagagccttcctccccacaggaacgcatgttcacaattgacccaaaggtatacggagaaaagagagatctgcatagcaaaaacaaggatgatttgactctctcgcgctcgttgggcctgggggggagatccgccatcgaacagagaagtatgagcatcaatcttcctatgtcgtgtctggattccatcgccttgggttttaacttcgggaggggccacgatcttagtcccctcgcctccgatatcctgaccaataccagtggaagtatggacgagggcgatgattatctgccagccactactcccgcactggagaaagctccgtgttttccagtcgagagcaaagaggaagagcagattgagaaagtcaaggccacgggtgaagagagcacccaagccgagatctcatgcgagagtccctttctggccaaagacttctacaagaatggcacagtaatggcgcctgacctgccggagatgttggatctggcggggacccggtcccgtctcgcttcagtaagcgccgatgccgaggttgcacgcagaaagtcagtgccaagcgaaaccgtggtagaagattcccgcaccggcctgccaccggtgaccgatgaaaaccatgtgatcgtgaaaacggactcccaacttgaagacctcggttattgtgtctttaataaatacaccgtcccactgcctagtcccgttcaggatagcgagaatctgtcaggtgaatccggaacattctacgaaggaactgatgacaaggtccggagggacttggcaacagacctatctcttattgaagtaaagctagccgctgctggccgcgtgaaggacgaattctccgtagacaaggaggcatccgcacatatttctggcgacaaaagcggtctgagcaaggagttcgaccaggagaaaaaggccaatgaccggctggacactgtcctagagaagtcggaagagcacgcagactctaaggaacatgctaaaaagaccgaagaagcaggcgacgagattgagacttttgggctcggagtaacctacgagcaggcattagccaaagatctctccatccccacggacgcaagttcggagaaggctgagaagggactcagcagcgtccccgagattgccgaggtggagccaagtaagaaagtggagcaaggcttagactttgctgtgcagggacagcttgacgttaagatatcagacttcggccagatggcatctggactgaatattgatgatagaagagcgacagaactgaagctggaggctactcaggacatgacacctagcagcaaagctcctcaggaagccgacgcattcatgggagtagaatccggacacatgaaagaagggaccaaggtatccgagaccgaggtcaaagagaaggtagcgaagcctgatctggtgcaccaggaagcggtggacaaggaagagtcatatgagtcttccggtgagcatgagagtctgacaatggagtctctgaaagcggatgaggggaagaaagagacatcacccgaatcatctctgatccaagacgaaatcgccgtgaaactgtctgttgaaatcccgtgcccccctgcagtgtccgaggctgaccttgctacagacgagcgcgccgacgtgcagatggagtttatccagggccccaaggaggagtctaaggagactccggatatctctatcaccccctctgacgtggctgaaccacttcacgaaacgatcgtaagcgaaccagcggagattcagtctgaggaagaagagatagaagctcaaggggagtacgacaaattactgtttcgttctgatactctgcagataactgacctgggagtcagcggtgcccgggaggagttcgtggaaacatgtcccagtgaacacaagggggtaatcgagtcagtcgtgaccattgaggacgatttcattacagtcgtgcagacaactactgatgaaggggagtccggaagccactccgtgagatttgcggcccttgagcaacctgaagtggaaaggagaccctccccccatgacgaagaggaatttgaagtcgaagaagcagcggaagcacaggcagaaccaaaggacggttctcctgaggcccccgcgtctcctgaacgcgaggaggtggccttgtccgagtacaagactgagacttacgatgattataaggacgagacgaccatagacgactcaatcatggatgcagacagtctctgggtcgatactcaggacgacgaccgcagcatcatgaccgaacagttggaaacaatccctaaggaagaaaaagccgaaaaggaggccaggcgtagctccttagagaaacaccgcaaggagaagccattcaagactgggcgaggccggatttcaacacctgaaaggaaagtggctaaaaaagagccctcgacggtctcacgggacgaagtgcggaggaaaaaggcagtatataaaaaagcggagctcgccaaaaagactgaagtgcaggcccattcaccctctcgcaaattcattctgaagccggctatcaaatacacaaggcccacccatttatcttgcgtgaaacgcaaaacaactgccgcaggaggggaaagcgctcttgccccatccgtattcaaacaggctaaggataaagtttctgacggagtcacaaagtctcctgagaagaggtccagtctgcctcgtcccagctctattctgcccccacgacggggtgtcagcggagacagggacgaaaactccttctctttgaactcttccattagcagctctgctcgcagaacaacaagatctgagccgatacggagggctggtaaatccggtacaagtacaccaaccacaccaggctctaccgcgataacaccaggcacaccaccatcgtactcttcacgaacaccaggaacgcctggcactccctcctaccctaggacccctcatacaccaggaacccccaagtccgccatcctggtaccatccgagaaaaaagtggcgattatacggactcctcctaaatctccagccacacccaagcagctcagattaatcaaccagccactgccagacctgaagaatgtaaaatctaagatcgggtcgaccgacaacatcaagtatcaacccaagggcggccaagtgcagattgtgacaaaaaaaatagatttgtctcatgtgaccagtaaatgtggatctcttaagaatattcgtcatcggccaggcggcggacgggtgaagattgaatctgtgaagctcgactttaaggagaaggctcaggccaaggttgggtcactggacaacgcgcaccatgtacctgggggcgggaatgtcaagattgattctcaaaaactaaacttccgcgagcatgccaaagccagagtggaccatggcgctgaaattattacacagtctcccggccggtcatctgtggcttctcctagacgactgtcgaacgtgagttcctcaggttccatcaacctgctcgagtccccacagctggccactctcgcggaggatgtaaccgctgccctggctaaacaaggcttgtag

SEQ ID NO: 124365 - DNA, 2664 bp, synthetic construct
  misc_feature 1..2664: note = Description of Artificial Sequence: Synthetic coding sequence
  source 1..2664: mol_type = other DNA
atggagactactggtgaccaggggatcgaggggatggcatacatggacgaaaaccggaacatcaccttcacttgtcctagaacaccatctgagttgattaataagtcctctcctttagaggtcttggagtctgctgcctgtgagaagttgccaactcccactccacaagtcgttaaggaaggagacagctttcccgatactctggcaaagaatgggcaggaaattgctccagcgcagatatccaaaagtctaatggttgacaactacacgaaggatggggtgcccggtcaggaaaggcctaaaggcccttccgcagtggtgccaagtaccagcacgggaggtgtagcgctgccaattaccaccgcgatcgaaacagtgaacatacacggtgatcactcccttaagaataaggctgagcttgccgacagtatgaaaaatgaggccggcattgatgagggccacgttattggagaaagtgaaagcgtccactcaggcgcaagtaagcactcagtggaaaaagtcaccgaactggccaagggccacttgctgcctggggtccccgtcgaagaccagagtctgccaggggaagcacgggcactagaagggtatgccgacagagggaattttcctgcccatcctgtcaatgaggaaaaagagaccaaggaagggagcgtagccgtgcagatccctgatctgttagaggataaagcacagaaactgtccttctgcgaagatcaaaacgcacaagatcggaatagtaaagggagcgactctctgaataagaaagtggacctcacgctattgtctcctaagagcgagaatgacaagctcaaagagatttcattagcatgcaagattacggagctggagtcagtctcgctcccgacgccagagatacaatctgactttttgcatagtaaggttgaggccccaccaagcgaggtggccgatactctggttattatgacagcctccaaaggcgttcgcctgccagagccgaaagacaagattctcgaaactccccagaagatgaccgaaaagtccgagtctaagactcctggggaagggaagaaggaagataagtcccgaatggcggagccaatgaagggatacatgcggcccacaaagagtagaggcctgacaccattgttacccaagtctaccatccaggagcaggaaaggcacaagcagttgaagtcagccgggattgcacggcccgaagaagggaggcctgtcgtaagcggtacggggaatgacatcactacccctccaaacaaggagcttcccccttcaccggagaagaagaccaaacccttggcgacaactcagccagctaagactagcacatccaaggcaaaaacccagcccactagcctccctaagcagcccgcccccaccacgatcggtgggcttaataagaagcctatgtctctggcgtctggtctggttcccgctgctcctccaaagcggccggccgtggcgtcagctaggccatctatcctgccatcaaaagacgtcaagcctaaacccatcgcagatgccaaagcccccgagaagcgcgcatcaccatcaaaaccagcttctgctcccgccagccgcagcggaagcaaatctactcagaccgtcgcaaaaacaaccacggctgcggccgtcgcttctacggggccatcctcgcggtccccatctaccctgctgcccaaaaagcccacagctatcaaaactgaaggcaagccagccgaggtgaagaaaatgactgctaaatctgtccccgccgatctgtcaaggcctaagagtaccagcacaagtagcatgaagaagacaacgactctgagcggtactgctcccgccgccggcgttgtcccatccagagtaaaggctacccccatgccctccaggcctagtaccactcctttcattgataaaaagcctacaagcgcgaaacccagcagtacaacaccacggctgtctcgcctagcgaccaacaccagcgctccggatctgaagaatgtccgtagtaaagtggggtctacagagaatatcaaacatcagcctggcggaggacgagccaaggtcgaaaagaagacagaggctgctgcaaccactaggaaaccagagagcaacgccgttaccaaaactgcaggcccaatagcctctgcccagaagcagccagcaggcaaagttcagatagtttccaaaaaagtgtcttacagccacattcaatctaaatgcggttctaaggacaatattaaacacgtgcctgggggtggcaatgtgcagatacaaaacaaaaaggtagatatcagtaaagtttcttctaagtgcggcagtaaggccaacattaaacataagccagggggtggcgacgtcaaaatcgaatcccaaaagctaaattttaaagagaaagctcaggccaaggtgggctctttagacaatgtaggccatctcccagccgggggggcggtgaaaactgagggcggaggtagtgaagctccactatgccccggcccacctgcgggggaggagccagccatatctgaggccgcaccagaggcaggcgctccaacgtccgcgagcggcttaaatgggcaccctacactgagcgggggtggcgatcagcgcgaggcccagaccctggacagccagattcaggagacttccatatag

SEQ ID NO: 124366 - DNA, 1392 bp, synthetic construct
  misc_feature 1..1392: note = Description of Artificial Sequence: Synthetic coding sequence
  source 1..1392: mol_type = other DNA
atatgtgaggaaccagtggccaaaaagagggaagagttagcacacttctctaattccagctcgaattccggaaagaaagaactggggacggccggcttatatcttcacagtaagctcgaacaaatcccagaaggttcaagtaaagagaaaggacaagaagatttttcggagaccaggatagatagttgctcacaggtgtgccagcggggggagaagcagcccggccagaccgccctggctggcaaaaaagagattgaagtaactgcaactcagagcacaccgtcttttcttttcgagaaacccccccgagacgggatcgcacgaccagaggaggggaggcctgtggtcagtggcaccggtaatgacattactacgcctcccaacaaagagctgcctcccagccctgaaaagaaaacaaaacccatcgcggatgcgaaggcaccagaaaagcgggcaagcccatccaagccagcctcagctcctgccagcaggagcggctctaaatcaacacagaccgtcgccaaaacgacaacggccgctgcagtcgcgtctaccggaccttcgtcaaggagcccgtctacacttctgcccaagaaacctaccgccatcaaaacggaaggcaagcccgctgaggtcaagaaaatgaccgctaagtccgtcccagccgacctaagccggccgaagagcacctcaacgagttctatgaaaaagacaacaacccttagtggaaccgccccagccgctggagtcgtcccttccagagtcaaagcaactcccatgcctagtcgccctagtaccaccccttttatcgataagaagccgacgtctgccaaaccaagcagtacaacaccgcgattatctcgactggcaaccaacacgtctgctccagacctgaaaaacgtgagaagtaaggtggggtccaccgaaaacatcaaacatcagcctgggggcgggcgggtccaaatcgtctccaagaaggtcagctacagtcatatccagtctaaatgcggcagcaaagataacatcaaacacgtgccgggtggcgggaacgtgcagattcagaacaaaaaggtggatattagtaaagtttctagcaagtgcggaagcaaggctaatattaaacacaaacccggcggaggtgatgtgaagatagaatctcagaagctaaacttcaaagagaaggcccaagccaaagtgggaagtctcgataacgtgggtcacctcccggccggcggagccgttaagatagagacgtaccggctcacatttagggccaatgctcgagctcgcacagatcacggcgcggacattgtctctagacctcctcacttccccgggggaccaaattcagggtcacgagtgttgggaccattgtctcgggccgtacattag

SEQ ID NO: 124367 - DNA, 3459 bp, synthetic construct
  misc_feature 1..3459: note = Description of Artificial Sequence: Synthetic coding sequence
  source 1..3459: mol_type = other DNA
atggcagacctgtctctcgctgatgcccttacagaaccttcgcccgatatcgaaggcgagatcaaacgggacttcattgcaacactggaagcagaagcttttgatgacgtggtaggagagaccgttggaaagacagattacattcctctgcttgacgtggacgaaaaaacagggaatagtgaaagcaaaaagaagccgtgctcagaaacctcccagattgaagacaccccgtcttcaaagcccacgctgctggccaacgggggccatggggtcgaaggatcagatacaacaggttcacccactgagttcctggaagaaaagatggcttatcaagagtatcccaactcccagaactggcctgaagacacaaatttctgctttcagccagaacaggtggttgatcccatccagaccgacccattcaagatgtatcacgacgatgatctggccgacctggtctttccaagctcggccactgccgatacgagcatattcgcggggcagaacgatccactgaaggattcttacggcatgtccccctgcaacaccgcggtggtgcctcaagggtggtctgtggaggcactgaactcccctcatagtgaatctttcgtctcaccagaggcagtcgccgaaccgcctcagccaacagctgtaccactggagttggcgaaggaaatcgagatggcatccgaggagcgaccgccggcacaagcgctggaaattatgatgggcttgaagacaactgacatggctccttcaaaggaaaccgaaatggctctagcgaaggacatggcattagctacaaagactgaagtggcattagccaaggatatggagtcccccacaaagctagatgtcacgctggccaaggacatgcagccgtcaatggagtctgacatggctctagtcaaagatatggagctccctaccgagaaggaggtggcccttgttaaggacgtgaggtggcctaccgaaaccgacgtcagctctgccaagaacgttgtcctaccgacggaaaccgaagtggctcctgcaaaggatgtgaccctcctgaaggagactgagcgcgctagtcctattaaaatggatctggcaccttctaaagacatgggaccgcccaaggagaacaagaaggagaccgagcgggcctctcccattaagatggatttggctccatccaaagatatgggacccccaaaggagaacaagatcgtgcccgccaaggacctcgtgttgctttccgaaatcgaagttgctcaggcaaacgacataatctctagcacagagatttctagcgcagaaaaagtggccctgtcgagtgagactgaagtggccctggcgagagatatgacactgcccccagaaactaatgtgatcttgaccaaggacaaggccctcccactggaggctgaagtcgccccagttaaagacatggcgcagctgccagagacggagatcgctcccgccaaagatgttgccccctctaccgtgaaggaggtaggccttctgaaagacatgtccccactgtccgaaaccgaaatggcgctcggcaaggacgtcactcctccgcccgaaacggaggtggtactgatcaagaacgtgtgtctgcccccagagatggaagtggctctgactgaagaccaggtccccgcactgaaaacagaagcaccacttgcaaaggacggtgtgttgactttggccaacaatgtgaccccagccaaggatgtgccccccctgtcagagaccgaagctacccctgtacccattaaggatatggagatcgcgcagacccagaaaggaattagtgaagattctcacctcgaatcgttacaagatgtagggcagagtgctgccccgaccttcatgatctctcctgagactgttacgggaactggaaagaagtgtagtctgccggctgaggaagacagcgttttagagaagttgggcgagcgtaagccctgcaactcccagccatcggagctgtcatccgaaacttcagggatcgcacggcctgaggaaggacgtcctgtggtgagtggaaccggcaatgatatcactactcctccaaacaaggaactccccccttcaccagagaagaagacaaagcccctcgctacaacgcagcccgcaaagacttccacaagcaaagctaaaacgcaaccgacaagccttccaaagcagcccgcccctacgactataggaggacttaacaaaaagcccatgtctctggccagcggcctggttcccgctgcaccacccaagagaccggcagtcgcttctgccagaccatctatccttccttcgaaggatgtcaaacctaaacccatagcagatgcaaaggctcccgagaagagagcttctccgtccaagcccgccagcgcaccagcctccaggtccgggtcgaagagcacacaaaccgtcgcaaagacgactacagctgcagctgtcgcctcaacgggcccaagcagcaggtctcctagtaccctgctgcccaagaagcccacagcaataaaaactgaggggaagccagcagaggttaagaaaatgaccgccaagtccgtgcccgccgacctttcgcgtcccaagtccacctctacctcgtccatgaaaaaaaccacgactctgtcaggcacagcgcctgctgccggggtagtgccttctagagtgaaagctacccctatgccctctcgaccatctactacaccatttatagataaaaagcctacatccgctaaaccttcgtcaacgacccctaggctcagccgcttggccacaaatacttctgcaccagatctgaagaacgtccgctctaaggtgggctccaccgaaaacataaagcaccagcctggaggcggacgtgctaaggttgaaaagaagaccgaggccgcagcaacaaccaggaagccggaatcgaatgctgtgaccaagacagccggaccgatcgcctcagcccagaagcagccagccggcaaagtgcagattgtttccaagaaagtgagttattcgcatatccagagtaaatgtgggtctaaagacaacatcaagcatgtgccagggggaggtaacgtgcagattcagaacaaaaaggtggacatctcaaaggtgagcagcaagtgtggttccaaagcgaatatcaagcataagcccgggggcggcgatgtgaagatcgaatctcagaaactgaattttaaggaaaaagcccaagcaaaggtcggaagcctggataatgtcgggcatctgcccgctggtggagccgttaagaccgaaggggggggaagtgaggcacctctgtgccccggccctccagctggcgaggaaccagccatctccgaggcggctcccgaagcgggggccccaacttctgccagcggactgaacggacatccaacactgagcggaggaggcgatcaaagggaggcgcagacactggacagccagattcaggaaacatctatttag

SEQ ID NO: 124368 - DNA, 2139 bp, synthetic construct
  misc_feature 1..2139: note = Description of Artificial Sequence: Synthetic coding sequence
  source 1..2139: mol_type = other DNA
atggagactaccggagaccaaggaatcgagggaatggcttacatggatgaaaataggaacatcacatttacttgcccccgaaccccatctgaattgatcaataagtcatctcctctggaagtactggagagcgcagcttgtgagaaactgcccaccccaacccctcaggtcgttaaggagggagattctttcccagatacccttgccaagaacggacaagaaattgctcctgcccagatctcaaagtccttgatggttgacaattacaccaaggacggggtgccaggccaggaaagacctaagggcccatcggcagtcgtcccgagtacttcaactggcggggtggcactgcctattacgaccgcaattgagactgttaatatccatggggatcattctttaaaaaacaaggctgagctcgccgattccatgaagaacgaggctggaatcgacgagggtcatgtgattggagaaagcgagtcagtccattcaggggctagtaaacattccgtggagaaagtcaccgagctggccaagggccatctccttccgggcgtgccagtggaggatcagtctctgccaggagaggctagggctttagaaggttacgctgaccgcggaaacttccccgcccacccagtgaacgaagaaaaggagacaaaggagggttccgtcgcagtgcagatccccgatctgctcgaggataaggcacagaagcttagcttctgtgaggaccaaaatgcccaggacagaaactcaaaaggatctgattcgttgaataagaaggtggatttgactctgctctcccctaaatccgagaatgacaagcttaaggagatctcgctggcctgcaagatcaccgaactggaatccgttagtctaccaaccccagagattcaaagcgactttctgcactcaaaagtcgaggcccctccaagtgaagttgcagataccctggtgatcatgaccgctagcaagggggtgagactaccggaaccaaaagacaagattctagagacccctcagaaaatgaccgagaagtccgaatccaaaaccccaggcgaaggaaaaaaagaggataagagtagaatggccgaaccaatgaagggttatatgaggcccaccaaatcacgtggcctgactcctcttctacctaagagcactatccaggagcaagaacgtcacaaacagctaaaaagcgctgggatagcacggcctgaggaaggccgccccgtggtcagcgggacaggaaacgatattaccaccccccccaataaggaattaccccctagtccagagaagaagaccaaacccttggctaccactcaacccgctaagacctccacctctaaggccaagactcagcctaccagccttcccaagcagccagccccaactacaattggtggtctcaataaaaagccaatgtcactggcctcagggcttgttccagcagctccccctaaacggccagcggtagcttccgcccgccctagtatactcccttctaaggacgttaaaccaaaacccattgctgatgcgaaggcacccgagaaaagggcatcgccgagcaaacccgcatcagctcctgccagccgaagtggatccaagtccacccagacagtggcaaagacaactacggccgctgccgtcgcttccacaggcccctcctcaaggtccccatctactctgttgccaaagaagccaaccgctatcaagacagaaggcaagccagcggaagtgaaaaagatgacagctaaaagcgtgccagcagatctgagccgacctaagtccacttctacatctagtatgaaaaagaccacgacattatccggcacagcccctgccgccggtgttgtaccctcccgcgttaaggctacaccgatgccatctcggccttcaaccactccctttattgataaaaaaccaacgtctgccaaacccagcagcacaactccacgtctgtcacgcttggcaaccaatacgagcgcgcccgatcttaagaatgtccgtagtaaggcaaaagtagaaaagaagactgaggccgccgccacaacaaggaagccagagagtaatgcagtgacaaagacagctggccccatcgcatcagcccagaagcaacctgcgggaaaagtctag

SEQ ID NO: 124369 - DNA, 2436 bp, synthetic construct
  misc_feature 1..2436: note = Description of Artificial Sequence: Synthetic coding sequence
  source 1..2436: mol_type = other DNA
atggcagacctcagcttggccgatgcattgaccgaaccaagtcctgacatcgagggtgaaatcaaacgcgacttcatcgcaacactggaggccgaagcatttgacgatgtggtgggagaaactgtcgggaagaccgattatatccctctgcttgacgttgatgagaagactggaaactcggagtccaaaaaaaaaccctgttcagagacttcccagattgaggatacaccaagttcaaagcccactttgctggccaacggaggccacggggtggagggctcagatacaaccgggtcacccaccgaattcctggaagagaagatggcatatcaggaataccccaattcccagaactggcccgaagatacgaatttttgttttcagcctgaacaggtggttgatccgatacaaacagacccgtttaaaatgtatcacgacgacgacttggccgatctggtatttccctcctctgccactgctgacacctctatcttcgccggccagaatgatcctctgaaggacagctatggaatgtctccttgtaatactgcagtggttccacagggatggtccgttgaggccttgaattcaccccacagtgagagcttcgtatctcctgaagctgtggctgagcccccacaacccactgccgtgcctctggaattggccaaggaaatagagatggcgagcgaagaacggcctccagcgcaggccctggagattatgatggggctaaaaaccaccgacatggccccttccaaagaaacagagatggccctggccaaagacatggcgttagcaacgaagacagaggtagccctggccaaagatatggagagccccaccaagttggacgtgacccttgccaaggatatgcagccaagcatggaatcagacatggcactggtaaaagacatggagctgcctaccgaaaaagaagttgccctagtgaaagacggggtgcgtttgccagaacctaaggacaagatcctcgagaccccacaaaagatgaccgagaagagtgagtctaaaaccccaggcgaggggaagaaagaagacaaatctcggatggccgagcctatgaaagggtatatgcgtccgacgaagtcccgaggtctgacaccactgctccctaagagtacgatccaggagcaagagcggcacaagcagctcaagagcgctggaatcgctcggcccgaagaaggccggccggttgtgagcggtacagggaatgatattactaccccacccaataaggagctgcctcctagtcccgagaaaaagactaagccacttgcgactactcagccagccaagacgtccacctcgaaagccaagactcagcctacctccttgccaaagcagcccgctcccaccacaatcggaggcctgaataaaaaaccaatgtcccttgcaagcggcctggtccccgccgcgcccccaaagcgacctgccgtcgcttcagcaagaccatccattctcccatccaaggatgtgaagcctaaaccgatcgctgacgctaaggcccccgagaagagggcctcaccaagcaagccggccagtgctcccgcgagtcgcagcggcagcaaatccactcagaccgtagccaagactactaccgctgcagctgtggcttccaccggaccttcgtctcgcagtcctagcactctgctgcccaaaaagccaacagctattaaaactgaagggaaaccagccgaagtgaaaaagatgacagctaaatctgtgccagctgacctgagccgtcctaaaagtactagtacttcctcaatgaaaaaaacaaccacgcttagcggtaccgcccctgcggctggggttgtaccaagtagggtgaaggctacacctatgccatctagaccatcaactactcccttcattgacaagaagccgacatcagctaaaccgtccagcactacccctcgactctcccggctggccacaaacaccagcgcaccagacctgaagaacgtgcggtccaaggtgggctctaccgagaacattaagcaccagcctggaggcggccgggtccagatccaaaataaaaaagtcgacatatcaaaagtctccagtaaatgcggcagtaaggccaacataaagcacaagcctggcggcggagacgtgaagatcgagagtcagaaattaaacttcaaggaaaaagcacaagctaaagtgggctctctcgataacgtgggacacctgcccgctggcggagcagtaaagaccgagggtggagggagcgaggccccactgtgccccggcccacccgccggggaagagcccgcgatcagcgaagccgcacccgaggccggtgctccaactagcgcatcggggctgaacggacaccctacgctgagcggcggtggtgaccaacgggaagcacagaccctggacagtcagatccaggagacgagtatttag

SEQ ID NO: 124370 - DNA, 3408 bp, synthetic construct
  misc_feature 1..3408: note = Description of Artificial Sequence: Synthetic coding sequence
  source 1..3408: mol_type = other DNA
atggccgacttgtcgctggctgatgcgttgaccgagccctcccctgacatcgagggggaaattaagagagattttatcgcaacactcgaggctgaggctttcgatgatgtggtcggggagaccgtcggaaagaccgactatatcccccttcttgatgtggatgaaaaaacaggaaacagcgagtctaaaaagaagccatgctcagaaacaagccagatagaagacacacccagctccaagccaaccctcctcgccaacggtgggcatggagtggagggctcggacacaaccgggtccccaacagagtttctagaggaaaagatggcatatcaagaataccctaatagtcagaactggccagaagatactaatttttgctttcaacccgagcaagtggtcgatcctatccaaaccgacccctttaaaatgtatcatgacgacgacctggcagacctcgtgtttcctagttcagcgacggctgacacctccatcttcgcgggccaaaacgacccactaaaagactcttacggcatgtcaccttgcaacactgccgtggtgccacagggttggtcggtcgaagctttgaattctcctcacagcgaatcctttgtgtcacccgaggccgtggccgagcccccgcagccgactgcagtaccactggagctggctaaagaaatcgagatggccagcgaagagcgcccaccggcacaggctctcgaaataatgatgggtcttaagacaactgatatggctccttccaaggaaaccgagatggccctggccaaagatatggccttagccactaaaacggaagtggcccttgcaaaagatatggaatctcccactaagttggacgtgacgctggccaaggatatgcagccatccatggagtctgacatggcacttgtgaaggatatggagttgcccacagaaaaggaggtcgcgctggtgaaggatgtacgctggcccacagaaactgatgtctccagcgccaagaacgtggtacttccaactgagaccgaagtggcccctgctaaggatgtgactcttcttaaggagaccgagcgagcttctcccattaagatggacctggccccctcaaaggacatggggccccctaaggagaacaaaaaagagaccgagcgtgccagcccaatcaaaatggaccttgcacccagtaaagacatggggccccccaaggagaataagatcgtgccagcaaaagacctcgttctgttgtctgaaatcgaagtggcacaagcaaatgacattattagcagtaccgaaataagctctgcagagaaggttgccctgagctctgagacagaagtggcactggctagggacatgaccttgccacccgaaactaatgtgatcctgaccaaagacaaagctttgccgctcgaggcagaggtcgctcctgtcaaggacatggcccagttgccagagaccgagattgccccggccaaggatgttgcgccttcaactgttaaggaggtcgggctgctgaaagacatgtccccattgtcagagacagagatggccttaggaaaggacgtgaccccaccaccagagaccgaggtagttttaattaagaatgtgtgccttccacccgaaatggaggtggctcttacagaggatcaggtaccggctctgaagaccgaggcgcctctggccaaagatggtgtgcttaccctggcaaataatgtgacgccagcgaaggatgtccctccactttcagagacagaagctaccccagtgcctataaaggacatggaaatcgcccaaacccaaaagggcatttcggaggactcacatctagaatcacttcaggatgtgggccagagcgcagcgccaacctttatgatctcaccagaaaccgtgaccggaacgggcaaaaaatgctcactccctgccgaggaggatagtgtcttggagaaactgggagagagaaaaccttgtaattcacagccaagtgaactgagttctgagacttccggaatcgcccggcccgaagaaggccgaccagtcgtatctggaaccggtaatgatattacgacacctcccaataaggaactcccacctagccccgagaagaaaaccaagcccctggccaccacccagcccgcaaaaacgtctacgtctaaggccaagactcagccgacgtcactgcctaagcagccagctcctaccaccatagggggcctcaacaagaaacccatgtcgctggcttccggacttgtccccgcggccccccctaagaggcctgcagtggcaagcgccaggcctagtatcctgccctcaaaggatgtgaaacccaaacccatcgcggatgcaaaggcgccggaaaagcgagccagtccttcaaaacccgcgtcagctccggcctcacgctctggaagcaaaagtacccagacggtggccaagaccacaaccgcggcagctgtcgctagcaccggccccagctcgagaagcccatccacattactccccaagaagcctaccgccattaaaactgaaggtaagcctgcggaagtgaaaaagatgacagccaagtccgtgccagctgatctcagtagacccaagagcacttccactagttccatgaagaagacaaccacactgtccggcactgctccggctgccggagtcgtcccatccagagtgaaagctactcctatgccctcccgcccgagtacaacgccatttattgataaaaagcccacctctgcaaaacccagcagtactacacctaggctgtcgagactggccactaatacctctgctccagacctaaaaaacgtgcgctcaaaggtggggtccactgaaaacatcaagcatcagcctggaggcgggcgtgctaaggtggagaagaaaaccgaggccgccgccacaactcggaagcccgaatcaaacgcagttaccaagacagccgggcctatcgcatcagcgcagaaacagccagccggcaaggttcagatcgtgagtaaaaaagttagctatagccacattcaaagcaagtgcggctcaaaggataatattaaacatgttcctgggggcggaaacgtgcaaattcagaacaagaaggtcgacatctcgaaggtgagttcaaagtgtggctctaaagctaacatcaagcacaaacctggaggaggcgatgttaaaattgaatctcagaagctgaacttcaaagaaaaggcccaggcgaaagtcggcagcttagacaatgtgggacaccttcctgcggggggtgctgtgaagatcgagacgtaccgcttgaccttccgggcaaatgcgcgggcaaggacggatcacggcgccgacatagtcagcaggcctcctcactttcctggcggccccaacagtgggtcccgagtgctgggtcccctttcccgagccgtacactag

SEQ ID NO: 124371 - DNA, 2487 bp, synthetic construct
  misc_feature 1..2487: note = Description of Artificial Sequence: Synthetic coding sequence
  source 1..2487: mol_type = other DNA
atgtcactgagcgacaaacagactgcgagcctgacagctgcttatgggcaactatcgaaggggaagcccgctgagtgtcgtatggactccccgaaggagattagtcaggccggcttcgagtggcagcggaccgaaggaaaactgaatgaaatcggtctcaatgttagcatggatggccagccaaaagacggcctggtgaagaacgcctcattcctggagcaaaacaagttatgcttctttgaggggaaattggataaagagctttccattgagatgcaagacaaggactgccaggaggccagcggacacctggagtctaggtacgtgatcagcgagacttgtcaccctcttgagggtaacagcgtccatcagaagacgtctgagttccatctaggccttattgaaggaccagataagaataagaccatcccagtccagggcaaagtggccggtaagaatggcctggagacaaaaagtcagagtgacttggattttccgggagctgcggacatccctaccaggtacgtgaaagagcaagaaacatcggtgtggaaccctagctttcaccccgttgctcaagggagcctcggtagcagggaagcaacacccggtgagatggaaaatagcattacacccggatgcccggtgattggcgtggtgaatgataactcagagcagctcaaatgcgaaagtcccctacttgtgtccttggcccacccagcccctatcattgaacactctcctacaacaatccctcccataactatggtgtttacacaggagcacctgaatgcttcatgtcacatcagggaccatgacaaagagctggaaaagctgagttctacagaggaggccgtacttaaccaggccccccagcaaaagaaggctgtgagacgagctctgagtgaatgcagccacctgagcgtgccacccgcggtaaatttggccgataagtaccctgaactgcctgccagggaagagcctagctctgggctgctgcctccgccaagctcacctatgcccagtcctacccccgggaaactgggagcacccgccatgaaaaggtctatgaccgtgggggaagaacaaactgcctcttataagctgtcacctggaaagctaccaatcctgagcaccaaagagatccctcccttcatctgcgaggaaccagttgctaagaaaagagaggaattagcacatttttcaaattcttcctctaatagcgggaaaaaagagctgggtacagctggcttgtatctgcactcaaagctggagcagatcccggagggatcatctaaagagaagggacaggaggatttttctgaaaccaggattgattcgtgcagccaggtatgtcaacgtggcgaaaaacagccgggccaaacagctttggccggtaagaaggagattgaggtgacggcgacacagtcaacgccatccttcttgtttgaaaaaccgccccgagacggaatcgccagacctgaggagggacgacccgttgtgtcaggaacagggaatgatatcacaaccccacccaataaggagttacccccgagccccgagaagaagaccaagccaatcgccgacgccaaggccccagaaaagagagcctcgcccagcaagcccgccagcgctccggcctcccgttccggaagcaaatctactcagaccgtggctaaaaccacaacagcggcagctgttgcctcaacaggaccatcttctcggtcaccgagtaccttattgccaaagaagccaaccgccgatctctcccggcctaaaagcacaagcacatcctcaatgaaaaaaactacgacactgtcgggaactgcgccagctgccggtgtggtccctagtcgcgtgaaagcgaccccaatgccctctaggccctcaacaaccccattcattgataaaaagccaacaagcgctaaaccatccagcacaacaccacggctctccagactcgctaccaacacatctgctcccgatctgaaaaacgtgcgcagcaaggttgggtccactgagaatattaagcaccagccaggcggcggtagggtgcagattgtgagcaagaaggtgagctattcccacattcaatcaaaatgcggatccaaggacaacatcaaacatgtgcccgggggtgggaatgtacaaatccagaataagaaggttgatatttcaaaggtctcctcaaagtgtggcagtaaggccaatatcaaacacaagccaggtggcggagacgtgaagatcgagagccagaaattgaattttaaagaaaaggcccaagccaaagtaggcagcttggacaacgttggacatctgcccgccggaggcgccgtgaaaatagagacctatcgcttgacattccgagccaacgctagggctagaaccgatcatggggccgacattgtgtcaaggcccccccattttccgggaggacctaactctgggtcacgggtcctcggacctttgtcacgtgctgtgcattag

SEQ ID NO: 124372 - DNA, 6894 bp, synthetic construct
  misc_feature 1..6894: note = Description of Artificial Sequence: Synthetic coding sequence
  source 1..6894: mol_type = other DNA
atggctgaccttagtcttgcggatgcattgaccgagccatcgcccgatattgagggggagataaagagagacttcatcgccaccctggaggccgaggcgttcgacgatgtggttggtgagactgtagggaaaaccgactacatcccactcctggacgttgacgaaaaaactggtaacagcgaatcaaaaaaaaagccatgctccgagaccagccaaatcgaagacctgccgttgcccccacacccagcatccctgtctttccatctgcccttggacacaccctcctctaaacctactcttctggccaatggggggcatggcgtggagggctccgatacaacaggctcccccaccgagtttctcgaggagaagatggcgtatcaggagtaccctaattctcagaattggcccgaggacaccaacttttgtttccaaccagagcaggtggtggatcctatccaaaccgacccattcaaaatgtaccacgacgatgacctcgctgacttggtgttcccgtcttccgctacagctgacacatcgatattcgctggacagaatgaccccttaaaggatagttacggtatgtcaccttgcaacacagccgtggtcccacaggggtggagcgtagaagctctgaactcaccgcactcagagagttttgtttccccagaagctgtcgccgagcccccccaacccactgctgttccactggaactggcaaaagagatcgagatggcctcagaggaaagacccccggcccaagctttggaaatcatgatgggcctgaaaacaacagatatggccccaagtaaagagacagagatggccttggccaaagacatggccctagcgaccaagaccgaagtcgccctggccaaggacatggaatctcccaccaaactggatgtaactctggctaaagatatgcagcctagtatggaaagcgacatggccctggtaaaggacatggagctaccgaccgaaaaagaggttgcgctggtaaaggatgtcagatggccaactgagactgacgtcagtagcgcaaagaacgtggtgctaccaaccgaaaccgaggtggctcccgcaaaagacgtgacattactgaaggagacagagagagcgtctccaataaagatggacctggcgccttctaaggacatgggtccaccaaaagaaaataaaaaggagaccgagagagcttcaccgatcaaaatggacctggcccctagcaaagacatggggccacccaaggagaacaaaatagtgccagccaaagatctggttttgctttccgaaatcgaagtcgcccaggccaacgacatcatctccagtacagagatttcttccgcagaaaaggtggctttgagctccgagaccgaggtggcactggcccgggatatgaccctcccacccgaaaccaacgttatactgacaaaggataaggccctgcccctggaggctgaggtcgcacccgtgaaagacatggcccaactgcctgagaccgaaattgcccccgcgaaggatgtcgcacccagcactgtcaaggaagttgggttgttgaaagacatgagcccactatctgagaccgagatggccttggggaaggatgttactcctccaccggaaacagaagtcgtgctgattaagaacgtgtgccttcctccagagatggaggtggctctcacggaggaccaagtgccagccttgaagaccgaggccccactcgctaaggacggcgtcctgaccctggccaacaatgtgacccccgcgaaagatgtaccacccctgtcagagaccgaagcaactcccgtgcctatcaaggatatggagattgcacagacccagaaaggaatctccgaagactcccacttggagagcctccaggacgtcgggcaatcggcagctccaacttttatgatctctcctgagactgtcacagggacaggcaaaaagtgctcacttccggccgaagaagactcagttttggaaaaactcggggaacgtaaaccatgcaattcccagccatctgaactgagctcggaaacatcagcaaatttcatgtactgcggcacccctcccacacaggctaagcaggtctgtcggccctcggatcgccggtctacccgcccaaagccggcccgcgttcctcccgagctgctagggggctcccccccatggaaaacgctcgaccaccggttgggtcattgctccttgtccgagtcagggtgggtctcgggtagctccagttgtggaggcccaggcaaccagcggaagagcattcatgtggactcactggagccgcaacgcgatctcggacgtgaggcctgggatattgaaagcacccctattatgatgaaaaagaaaaaaaaaaaacccaagcagaagcggtactcacaaccccgggctggcggcccttcagacgacgataacgctgataagcccaagggacacccatttgctgcagatacccagaagagcggtgtcctgccctcccagcccaccacgatgggcacggagtacggtttagttagcggagagaaccttaaaagggaatgtctggttaactcctccgccgcaagacttgtggccgagaactttgtgtccgagagcctgcggattcctctgtaccccagcgaggaggctcctaaaacagccatttctagccagagtaaactgcgtgttgaagaggaaagcaagagtaataaatctgtcctccagaaccaggacaaaaagctgctcaagcagcacgagtacaagccccagccagcgccacatctaaagacaccagttgataagtctcagtcagtgggccccctgaacctgaaaggcccacttgcagaggtgagcgcctacaatgtcgagacacccctagatattaggctgaaagaaggctgctctccttttcttgaccaggaagtgatgggagtggtgagtaaacctacggccgctaaagagattccgaacctcgtgccaaccttgattgcaagcaatccactcgagtgtaacttgaaggaggggaataacgaaagtaaaatgaccaaactgcaaaacgtaaagctaaaggagttcccggagggggctgaggaggataaggagttaaagaaggaggcatttccaaatgaacgccaggagatcagtatattcactagcgagcagttgcaaggtcaggtccttgttcaggtgccaggggtggagaacgaaccattcaaacgcatggccggggatgggaagtcccgaaaaggccgtggtagcagcgggaaaatgcggacagattcgggcaaagtcaaggcaaagtcagagctcccattcctgctggactcacagaaggatggcagagccgttttgatacctagtgagcctgtatccaagacagaggggatgactactcaagataaatctgaagaattgggacttaacagttcaaaacagccaggtacaaaagccgacctcacagaagcagtcgtgatgggagaacctaaggagatgacccagcccaaagtggccggcactatgcaagctctgatccctctggagtccggaagtggaatgacgcagacatctggcgtaagtacggagactggggatgtcgtcaaggatatgggagtgaacaatcaaagcaaagagggccggtgcccttggaaggatcacgaggctgccccctggatctctgaaaagcccaaaaaacggggaaatgagggaaagagtaaaaaatttaagaacaactacagcactcagccagcacgaatggagcgcaaggaggaaatcctgaatcctcccttcgagggcaaggacggagacaccggcagcattccacacaaatcgaaagaaatcgggttcacattcccgaaaatgcacgactctagtttttcgcacaccccagatacacctacagtggaggccgtcgatcggaaagggggcaattttcaggtgaactttgtcgaactgggcaccctaggtgagaacaagatatcaaccgtgaaggcctctactgtgactgagcctcctgctaaggtcaccgacgtaagttgccaggagcagattcagggcgcaggctttgtgccatctgtggtgtcagaagagaataagacagacgcagccaatagatacacggccgtcgcagacaaacctagtaaacgctccaacgacggtaagtccaagaaggtcaagaattcttcacccgaaaagcacattcttgaaaacaaaatcgacgccaccaagatacacgtgcccatggaaaccactggcgaccaggggattgagggtatggcctacatggacgagaaccgaaacatcacattcacatgcccccgaaccccaagcgaactcatcaataaatcatcacccctggaggtgctcgaatctgcggcatgtgagaaactgccaacgcccactccccaagtcgttaaagaaggggattcttttccagacacgctggctaagaacgggcaagagatagctccagcgcagattagcaagtccctcatggtggataattataccaaagacggggtccccggacaggaacgccctaagggcccctcagctgtagtgcccagcaccagtactggtggggtggcattgcctattaccaccgccatcgagactgtcaacattcatggggaccacagtctgaaaaacaaggcagagctagcagactccatgaagaatgaagctgggatcgatgaggggcacgtcattggcgaatccgagtccgtgcactcaggggcttcaaaacacagtgttgagaaagtcaccgaactggcaaaaggccacctgctgcctggggtccccgtagaggaccagagcctccccggcgaagccagggccctcgaggggtatgccgacaggggcaatttccctgcccatccggttaacgaggagaaagaaaccaaagagggcagcgttgccgtccaaatcccggatcttttagaggataaagcccagaaactatccttctgtgaggaccagaacgcacaggaccggaatagtaaaggaagcgacagcttgaataagaaggtggacctcaccctgctgtctcccaagagcgaaaacgacaaactgaaagaaatatctctcgcttgtaagattaccgaacttgaatcagtgtctctccctactccagagattcagtcagatttcttgcatagcaaggttgaggctcccccctcggaggttgccgacacgctggtaataatgaccgctagcaagggcgtacgcctgccagagcccaaggacaaaattttggagacgccccaaaagatgaccgagaagagtgagtctaagacaccgggcgagggtaaaaaggaggataagtcgcgtatggccgaacctatgaaagggtacatgcgtccgacgaaatctagaggactcacccccctcctcccaaagtccacgatccaggagcaggaacgccacaaacagctgaaatcagcgggcatcgctcgcccggaggaaggccgccctgtggtttccggtactgggaatgacattaccacgcctccaaacaaggagcttccaccctctcctgaaaagaaaactaagcctttagcgaccacgcagcccgccaagacctcaaccagtaaggcaaaaacccaacccacttctttacctaagcagcccgcaccgaccacaatcgggggcttaaacaagaaaccaatgtccttggcctctgggctggtcccggccgcgccccctaagaggcccgcggttgcctctgctaggccctctatcttgccaagtaaggatgtgaaaccaaaacctattgctgacgcgaaggccccagagaaacgagcgtccccgtccaagccagcgagtgctccggcatcacgctcagggtctaaatccacccaaacggttgctaagacaaccaccgctgctgctgtggcctcaaccggtccgagttctaggagcccctcaaccttactccctaagaagcccacagcgattaagactgaaggaaaacccgcagaggttaaaaagatgaccgctaagtctgttcctgctgatctgtcccggcccaaaagcaccagcactagctctatgaagaagaccacaacactcagcggaaccgcgcctgccgcaggcgtcgtgcccagcagggtcaaagccactcctatgcccagtcgtccttcaaccacacctttcattgacaagaagcccacttccgcgaagccaagcagcactacacctcgtctctcaagattggccaccaacacctccgctcctgacttaaagaacgtcagatctaaagtaggttctactgaaaacatcaagcatcagcccggtgggggaagagctaaagttgagaaaaagacagaggctgctgctacaactcgaaaaccagagtccaacgcagtaacaaagactgccgggcctatagcatctgcccagaaacagcctgctggaaaggtgcagatcgtgagtaagaaggtcagctatagtcacattcagtctaaatgcggctccaaggataacattaagcatgttcctggggggggtaatgtccagatccagaataaaaaagttgacataagtaaggtgagctcaaagtgtgggagcaaggcaaatatcaagcataaaccaggtggtggcgacgtaaagatcgagagtcaaaaactgaatttcaaagagaaggcacaagccaaagtggggtcgctggataatgttggccatttgcccgccggcggggcggtgaagacagaaggcgggggatcggaggcgcccctctgccctggcccgcctgctggcgaggagccagcaatctcagaagctgctccagaggccggcgccccaacaagcgcttccggtctgaacgggcatccaaccctgagtggaggcggggatcaacgcgaagcacaaaccctcgacagtcagattcaggagacaagcatctag

SEQ ID NO: 124373 - DNA, 750 bp, synthetic construct
  misc_feature 1..750: note = Description of Artificial Sequence: Synthetic coding sequence
  source 1..750: mol_type = other DNA
atgacagcgaaatccgtgcccgctgacttatcccgacctaagtcgaccagcacaagttctatgaaaaaaaccaccaccctatcagggacagcacctgcagcaggagtggtcccctctagggtgaaggcaacacctatgcctagtcgaccttctactactccatttattgataaaaagccaacgagtgcaaagcccagtagcaccacacccaggctctctcggcttgccacgaacacttcggcccccgacctgaagaacgtccgaagcaaagtggggagtactgaaaatatcaaacaccaacccggcggcggacgagtgcaaatcgtgtctaaaaaagtctcctacagccatattcagtcaaagtgtggcagtaaggataacattaagcatgtccccgggggcgggaatgttcaaatccaaaataaaaaagtggatatatctaaggtcagcagcaagtgtggttcaaaagctaacatcaagcacaaacctggtggtggcgatgttaagatcgagagccagaagctcaacttcaaagaaaaggctcaggctaaggtgggctcactggacaacgtgggacatcttcccgccggaggagccgttaaaatcgaaacatatagactgacctttagagcgaacgcccgcgcgaggaccgatcacggcgctgatattgtgagcaggccgccacatttcccaggaggcccgaactctggcagccgtgtgctgggcccgctgtctcgagcagtccactag

SEQ ID NO: 124374 - DNA, 300 bp, synthetic construct
  misc_feature 1..300: note = Description of Artificial Sequence: Synthetic coding sequence
  source 1..300: mol_type = other DNA
atggcggaccttagcttagcagacgccctgaccgaacccagccctgacattgaaggtgagattaagagggactttattgccactctggaggccgaagcctttgacgacgtggtgggcgagactgtgggcaagacggattatataccattgttggatgtcgatgagaaaaccggcaactcggagtccaaaaagaagccatgttcagagacgagccagatagaagacactccctcaagcaagcccaccctcctggccaatgggggccacggagtggaaggatccgatactactgaggcatag

SEQ ID NO: 124375 - DNA, 2277 bp, synthetic construct
  misc_feature 1..2277: note = Description of Artificial Sequence: Synthetic coding sequence
  source 1..2277: mol_type = other DNA
atggcagagccccggcaggagtttgaagtgatggaggatcatgctggcacctacggcctgggggataggaaggatcagggcggctacacaatgcaccaggaccaggagggcgacacagatgccgggctcaaggagtcccctctccagactccaacagaagacgggagtgaggagcccgggtcagaaacttctgacgctaaatccacacccactgcggaggacgtgacagcccccctggtcgatgaaggagcccccggcaaacaggccgctgctcagccgcacaccgaaatccccgaggggaccacagccgaggaagccggcatcggcgataccccttccctggaagatgaggctgcaggccacgtaacgcaggagcctgagtctgggaaggtggtgcaggagggtttcttaagagagcccgggccacccgggctctcccatcagctgatgtcaggcatgccaggcgctcccctgctacctgagggaccacgcgaggccaccagacagcctagcggcaccgggcccgaagatacagagggagggcggcacgctcctgagctcctgaagcatcagctcctaggggacctccaccaggaggggcctcccctcaagggagccggaggaaaagagcgaccagggagcaaagaggaggtggacgaagacagagatgttgatgaaagctcgcctcaggactccccgccctctaaggctagcccagctcaagatggaaggccaccccaaacagccgcacgagaagcgacaagcatccctggtttcccagccgagggtgcaatacccctcccagttgattttctgagcaaagtcagcacagagattcccgcttcagagcccgacgggccgagcgtcgggcgcgctaagggacaagatgcccccctggaattcacatttcatgtcgagattacccccaacgtgcaaaaggagcaggcgcatagcgaggagcaccttggcagagccgcgttcccaggcgctccgggagagggccccgaagcaaggggtccatcgctgggcgaggatacaaaagaggctgatctccccgagccatctgagaaacagcccgctgccgcacctaggggaaagccagtgagccgagtcccccaattgaaagctcgaatggtaagcaaaagtaaagatgggacaggtagcgatgataagaaggccaagacaagcactcggagctccgctaagacactgaagaatagaccgtgtctgtctcctaagcatccaacaccagggtccagtgatccgttgatacagcctagcagccccgccgtgtgcccagagccaccgtcatccccgaagtatgtgtccagcgttacctcccgtactgggtcatctggtgccaaggaaatgaagttgaagggcgcagatggtaaaaccaaaatagccaccccacgaggagccgctccaccaggccagaagggccaggccaatgctacccgcattccagcaaagactccccccgccccaaaaacaccaccatcttccggcgaaccccctaagagcggggaccggtcgggctacagttctccaggcagccccggaacccccgggtctagaagtaggacacccagtctgcctaccccacctacacgggagcctaagaaggtcgctgtggtcagaacaccgcctaaaagccctagcagtgccaagagtcggctccagaccgcacccgtgcctatgcctgatctaaagaacgtcaagtctaaaattgggagcaccgagaatcttaagcatcagcctggaggagggaaggttcagataattaataagaagctcgatctgtcaaacgtacaaagcaagtgcggctctaaggataacatcaagcacgtgcctggaggtggcagcgtgcagatagtttacaaacctgtcgacctgagtaaggtgacctctaaatgtggatcactgggcaacatccaccataaacccgggggtggccaggtcgaggtgaagtccgaaaagctagattttaaagaccgcgtgcaatcaaaaattgggagcctggataacattacacacgttccagggggaggcaataaaaagatagaaacacacaagctcacgtttcgcgagaatgcgaaagccaagaccgaccacggggctgagattgtgtacaagagccctgtggtttctggggatacttccccccgacatttgtcaaatgtttcctcaacaggtagcatcgacatggtagacagtcctcagctggctactctggctgatgaggtgtccgctagcttggcaaagcaggggctttag

SEQ ID NO: 124376 - DNA, 1152 bp, synthetic construct
  misc_feature 1..1152: note = Description of Artificial Sequence: Synthetic coding sequence
  source 1..1152: mol_type = other DNA
atggctgagccaaggcaggagtttgaggtcatggaggatcatgcgggcacatatggattgggggatcgaaaggatcaagggggatatacaatgcaccaggatcaagagggcgataccgacgccgggcttaaagctgaagaagccggcattggggatacgccgtctctggaggacgaagctgccggacacgtgactcaagcgagaatggtgtctaaatccaaggatggcactggcagtgacgataagaaggcgaaaggagcagacggcaaaaccaaaatagctacaccccgaggtgcggctccacccggccagaaggggcaggccaatgccactcggatacccgctaaaacgcctcctgccccgaaaactccacccagttcaggggaaccaccaaaatccggagaccgttctgggtattcttcgccaggaagccctggcacaccagggtcaagatctagaacgccgtctctccccaccccacccactagggaaccaaaaaaagtcgctgtggtccggactccccccaaatcaccttcctctgctaagtctcggttgcagactgctcctgtccccatgcccgatctgaaaaatgtgaagagcaaaatcggttctaccgaaaaccttaaacaccagcccggcggtgggaaggtccagattatcaacaagaagctggacctgtcaaacgtccagtctaagtgcggcagcaaagacaacataaagcatgtgccgggcggcggctctgtgcaaattgtttataagcctgtggacttgagcaaggtcacttccaagtgcggaagccttggaaacatacaccacaaacccggaggcggccaggtggaagtgaagtccgaaaagctggatttcaaagatagagttcagagcaaaatagggtctttggacaacattacccacgtgcccggaggcggaaataaaaagatcgaaacccacaagctcacatttcgcgagaacgccaaggccaaaactgatcacggcgcagagattgtgtacaaatccccagtcgtttctggtgacacctcacctcgccacctctccaacgtgtcctcgacaggctctatcgatatggtggattcgccgcagctggctacgctcgcagacgaagtatccgcctcactggctaagcagggcctgtag

SEQ ID NO: 124377 - DNA, 1239 bp, synthetic construct
  misc_feature 1..1239: note = Description of Artificial Sequence: Synthetic coding sequence
  source 1..1239: mol_type = other DNA
atggctgagcctcgacaggaattcgaagttatggaagaccacgccggaacctacggcctgggcgatcgcaaggaccaggggggttacacaatgcatcaggatcaggagggcgacaccgatgcggggttgaaggagtcgcccctgcagacccctacagaagacggctcagaggaacccggatcagagacaagcgatgcaaagagtactccaaccgctgaagccgaggaggcaggaataggtgacacccctagcctcgaggacgaagctgctggccacgtcactcaagccaggatggtctcaaagagcaaggacggaaccgggtccgacgataaaaaggccaagggagcagatggaaagacaaagattgcaacccctagaggcgccgctccacccggacagaaagggcaggccaacgccactcgcatcccagctaagaccccaccggccccgaagacaccgccttcctcaggggaaccaccaaagtcgggcgaccggagcggctactcgtctcctggcagtcccgggacaccaggttctaggtcccgaacaccttctctccctacccccccaacacgcgagccaaaaaaggtcgccgtagtgagaacccctcctaaatctcctagctctgccaaatccagattacagacagcccccgtaccaatgcccgatctgaaaaacgtcaagtcaaaaatagggtcaaccgaaaacttgaagcaccaacccggcggaggcaaagtgcagattatcaataagaagctggacttgagtaatgtacagagtaagtgtggctcgaaggacaacattaagcatgtacctggaggggggagcgtgcaaattgtgtataaaccggtggacctttccaaagtgacctctaaatgcggatctctgggaaatatacaccacaagcccgggggcggacaggtagaagtcaagtccgaaaaactcgacttcaaggaccgggttcagtctaaaatcgggtccctggacaatattacacacgttcccggcgggggcaacaaaaaaattgaaacacacaaactcacattccgagagaatgccaaggcaaagaccgaccatggcgcagaaatagtctataagtctccggtggtgagcggcgacacttccccacggcacctttctaacgtatccagcacagggtctattgacatggtcgacagtcctcagctggccacccttgctgacgaggtatcagcaagcctcgccaaacaggggttgtag

SEQ ID NO: 124378 - DNA, 2331 bp, synthetic construct
  misc_feature 1..2331: note = Description of Artificial Sequence: Synthetic coding sequence
  source 1..2331: mol_type = other DNA
atggctgaaccacggcaggaatttgaagtgatggaagaccatgcaggaacctatggcctgggggaccgcaaagaccaaggcggatatacaatgcaccaggaccaagaaggtgacacagatgcaggccttaaggagagtcccctgcagacacccacagaggatgggtctgaagaacccggctctgagacatcagatgctaagtccacaccgaccgctgaagacgtaactgcacctctcgtggacgagggagccccggggaaacaggcagctgctcagcctcacactgagatacccgagggtacaacagccgaggaagcgggaattggcgacacgccaagcttggaggatgaagccgcaggccatgtgacgcaggaaccggagtccggcaaggtggtgcaggagggcttcctgcgggaacctggcccccctggcctgagtcaccaacttatgagtgggatgccaggagccccgctcctccctgagggcccacgggaggctacccgccagccctctggaacaggcccggaagacaccgaaggggggagacacgcgccggagctcctcaaacaccagctgctgggagacctgcaccaggagggccctcctctgaaaggtgctggaggtaaagagcgtccaggtagcaaggaagaggttgatgaagatcgggacgttgacgagtccagtcctcaggactccccaccctccaaggcctcacccgcccaggacggcagaccaccacagactgcagcacgggaggcgacatcaatccctgggttcccagctgagggagcgattcctctgcctgtcgactttctgtcaaaagtttcaacggagatacccgcgtctgaaccggacgggccctcagtaggccgagccaagggtcaggatgcaccacttgaatttacctttcatgtcgaaatcacccctaatgtgcagaaggagcaggcccactccgaggaacatcttggccgcgccgcctttcccggcgcacccggagaaggacctgaggcgcgaggccctagcctcggagaggatacgaaagaagcggaccttcctgaaccttccgaaaagcagccagccgccgccccccgtggcaagcccgtgagcagagtaccacagctcaaagctaggatggtgagtaagagtaaagatggcacaggcagcgatgataagaaggccaagaccagtacaagaagcagcgctaagacgctgaaaaatcggccctgtttgagccccaaacaccctacgccagggagcagtgaccctctcatccagccatctagccccgccgtctgccctgaaccacccagcagtccaaaatacgtgtccagcgtaacaagcaggactggctcatcaggggcaaaggagatgaaactcaaaggagccgacggcaagaccaaaatcgctactcctcggggagccgcccccccaggacagaagggccaggcgaatgcaaccaggattccagcaaaaacaccccccgctcccaaaacccctccatctagtgctaccaagcaagtacaaagacgccctccgcctgcaggccccagaagcgagagaggagagcctccaaaatcaggggatcgatctggctatagtagcccaggctcgcctggcaccccgggatcccgttccaggactccgtccctcccgactcctcctacaagagaaccaaagaaggttgcggttgtgagaactccgcctaaatctccatcatctgcgaagagcagactacaaacagctcccgtgcccatgcccgacttgaagaacgtcaaatctaagataggctccaccgagaatcttaagcaccagccagggggtggcaaagtccaaatcatcaacaaaaaactggacttgagcaacgtacagtccaaatgcggcagcaaggataacattaagcacgttcctggcgggggaagcgtgcagatcgtgtacaagcctgtcgacctgtccaaagtgaccagcaagtgtggcagcttagggaacattcaccataaacctggcgggggtcaggttgaagtcaagtcagaaaaactggatttcaaagatcgggtgcagagcaagatcggaagcctcgacaacatcacccatgtacccggtggtggaaataagaagatcgagacccacaagctcacgtttagggaaaacgccaaggctaaaacagatcacggagcagagatcgtatacaaaagccctgtagtatccggtgatacgtcaccccggcatctctcaaatgtttcttcgaccggttccatcgacatggtggactcgccccagctcgcaacactcgccgacgaggtctcagctagccttgctaagcaagggctttag

SEQ ID NO: 124379 - DNA, 951 bp, synthetic construct
  misc_feature 1..951: note = Description of Artificial Sequence: Synthetic coding sequence
  source 1..951: mol_type = other DNA
atgctgagagccttgcagcagcgcaaaagggaggctggtatcggggacaccccatccctggaggacgaggccgctgggcacgtgacccaagcccgaatggtgagtaagtcaaaggacggtaccggatccgacgataagaaggcgaaaggggccgatggtaagacaaagattgccacgcctcggggagccgcccctcccggccagaaaggtcaggcaaatgctactagaatccccgctaaaactcctcccgcacctaagaccccgccaagcagcggagagcctcccaaaagcggcgaccgttccggctactctagtccaggcagccctgggacaccaggctctcgtagcagaacgccaagcctgccaaccccaccaactagagagccaaagaaagtcgctgttgtgaggacacccccgaagtctccttcctccgccaagtcacgactgcagaccgctccagttcctatgccagatctcaagaacgttaaaagcaaaatcggttccactgagaacctgaagcaccagcccggtggcggtaaggttcagattgtctataagcccgttgatctctccaaggtgacgagcaagtgcggatccctggggaatatacaccataagccaggtgggggacaggtggaggtaaagagcgagaagctggactttaaagatagagtccagagtaaaatcggctcactcgacaacattactcatgtccctggaggcggcaataaaaagatcgagactcacaaacttacctttcgggagaatgccaaagccaaaacagatcatggcgctgagattgtgtacaaatccccagtcgtatccggcgacacatctcctaggcacctgagcaatgtgtcatcaactggctcaattgacatggtggattctccccagctggccacactggccgacgaggtgagcgccagtttagcaaaacaggggctgtag

SEQ ID NO: 124380 - DNA, 1326 bp, synthetic construct
  misc_feature 1..1326: note = Description of Artificial Sequence: Synthetic coding sequence
  source 1..1326: mol_type = other DNA
atggcggagccccgccaggagtttgaggttatggaagaccacgcaggtacttacggcttgggcgatcgcaaggatcaggggggttatacaatgcatcaggaccaggagggcgacactgacgctgggctgaaagagagtcccttgcaaacacctactgaagatgggtccgaggagcccggcagcgagacctccgacgcgaagtccacccccactgcagaagacgtcacagcccccctggttgatgaaggtgccccaggaaagcaggccgctgcccagccgcataccgagatcccagagggcaccaccgccgaggaagctggcatcggcgacactccttccctggaggacgaggcagcaggccacgtcacacaggcgagaatggttagcaaaagtaaggatggaactggtagcgacgacaagaaggcaaagggggctgatggcaagacaaagattgcaacccccaggggcgcagcccccccaggccagaagggacaggccaacgcaacgcgcatccctgcaaaaacccctcctgctccaaagacccccccctcatcgggcgagccccccaagtctggagaccgctctggctattctagcccaggtagccccggaactccgggcagccgaagccggactccaagtctgcccaccccacctacaagggagcccaagaaagtggccgttgttcgcacaccgccgaaatcaccatcttctgcgaagtcgagattgcagaccgccccggtccccatgcctgatctcaagaacgtcaaatctaaaattggttctaccgagaacctgaaacaccaacctggcggagggaaagttcagattattaacaagaagcttgacctgagcaacgtccaatctaaatgcggtagcaaagacaatattaaacacgtgccaggtggtggaagcgtgcaaatagtgtacaagccagtcgacctcagtaaggtcacttccaaatgcggcagcctggggaatatccaccacaagccaggtggtggacaggtcgaagtgaaatctgaaaagctcgacttcaaggacagagtgcagagcaaaataggatcattggataatatcactcacgtaccaggcggggggaataaaaagatagaaacacacaaacttacattccgggagaatgctaaggctaaaactgatcatggcgccgagatagtgtacaagtccccagttgtaagtggggacacatcaccacggcacttaagtaacgtgagttctaccgggagtattgatatggtagattcccctcagcttgccacactggcagacgaggtaagcgctagcctggcgaagcagggactatag

SEQ ID NO: 124381 - DNA, 1080 bp, synthetic construct
  misc_feature 1..1080: note = Description of Artificial Sequence: Synthetic coding sequence
  source 1..1080: mol_type = other DNA
atggccgaacccaggcaggaattcgaggtaatggaggaccacgccgggacctatggactcggcgaccggaaggatcagggaggctacactatgcatcaagatcaagaaggtgacaccgatgccggcttgaaggagagccccctacagactcccactgaggatggctccgaggagcctggctcggaaacgtctgacgcaaagtccacacccaccgcagaagcccgtatggtctcaaaatctaaagatggcacaggcagcgatgacaaaaaggccaagggtgctgatggcaaaactaaaatcgccactcctcgaggcgctgctccgccagggcaaaaggggcaagctaatgctactaggattcctgccaaaacaccacccgcccctaagaccccaccaagctcaggggagcccccaaagagcggagatcgctctggttactcctcccccgggagtcctggtacacctggcagtcggtctcgcaccccaagtttacccaccccccctacacgggaaccaaaaaaggttgcagtggtacggaccccccccaagtctccttcatcagcaaaatcaagactgcagaccgctccggtgcccatgcctgatctgaagaacgtgaaaagtaagatcggaagcacagaaaaccttaagcatcaaccaggcgggggcaaggtgcagattgtctataaacctgtagacttgtctaaggtcaccagcaaatgcggcagtctgggcaatatccatcacaagcccggaggtgggcaagtggaggttaaatcggaaaaactggatttcaaagaccgggtacaaagcaaaataggctcactggataacatcacccatgtcccagggggcgggaataagaaaatcgagacccacaaactgactttccgtgagaacgctaaagccaaaaccgaccatggagccgaaattgtgtataagtctcctgtcgtctccggcgatacctcccccagacacctgtccaacgtgagctcaacgggcagtatcgacatggtcgatagcccccagctggcaaccttggcagacgaggtgtccgccagcctcgctaagcaggggctttag

SEQ ID NO: 124382 - DNA, 2331 bp, synthetic construct
  misc_feature 1..2331: note = Description of Artificial Sequence: Synthetic coding sequence
  source 1..2331: mol_type = other DNA
atggcagagccccggcaggaatttgaagtgatggaagatcacgcggggacctacggattgggagacagaaaggatcaggggggatacactatgcaccaggaccaagagggcgatacagatgcaggtttaaaagagtctccgcttcagaccccaactgaagacggatccgaggagccaggctcagagacatctgacgctaaatcaacaccgacagctgaggacgttacagctccactggtggacgaaggagcacctgggaagcaggccgctgcacagccgcacaccgagatccctgaaggcacaaccgctgaagaggctgggatcggggacacaccttccctggaagatgaggccgcagggcacgtcacccaggagccagagagcggaaaagtcgttcaggaaggattccttagagagcctggcccacccggcctgtctcaccaactcatgtcaggtatgcccggggcaccacttctccctgagggccctcgcgaagcaacacgacagccatcgggtaccgggccggaggacactgaggggggccggcacgctccagaacttctcaaacaccagctgctgggagatctgcatcaggaggggcccccactgaaaggggctggaggaaaagaaaggccgggcagcaaggaggaggtagacgaggacagggacgttgatgagagcagcccacaggatagcccccccagtaaggcttcccccgctcaagacggcagacctccccagaccgcagcacgtgaagccacatctatcccaggttttccagctgagggtgccatccccttgcccgtggacttcttgtccaaagtgtccacagagattcccgccagtgagcctgacggcccatccgtcggccgcgccaagggacaagacgcacctttggagttcacttttcacgtggagatcactcccaacgtgcagaaggagcaggcacactcggaggagcaccttggccgagcggcattccccggcgcccccggtgaaggtcctgaggccagaggtccatcccttggcgaagacactaaagaggctgacctgcccgaaccttccgagaaacaacccgcagctgcgcccagaggaaaaccagtcagcagggtgcctcagcttaaggcacgaatggtcagtaagtcaaaagatggtacagggagtgatgataagaaggcgaaaaccagcacccggtcgagcgctaaaactctgaaaaatcgcccatgcctcagtcccaagcatcccacacccgggagttctgatccactgatccagccctcaagccccgcggtctgtcctgagccccctagtagccctaagtacgtgagctctgtgacaagccggactggttcttctggtgcaaaagaaatgaagttaaaaggagcagatggaaagactaaaattgctacgccccgaggcgccgccccaccaggacaaaaaggacaagctaacgcaacacgcattcctgctaaaacccctcctgctcctaagactccgccaagttctgctacaaagcaggtacaacgacgcccccctccagcaggacccaggagtgagagaggggagcctccaaaatccggagatcgttcaggctatagctcaccaggatcacccgggacccccgggagcagaagccgcaccccgagcctgccaactccaccaactagagaaccaaaaaaggtagctgtcgtccggaccccccctaagtcaccctccagcgcgaagtcacggctgcaaacagcgccagtgccgatgccagaccttaaaaacgtgaagagtaagatcggatccacagagaacctcaagcaccagccaggagggggcaaggttcagatcatcaacaagaagctggacctgtctaacgtgcagtcaaagtgtgggagcaaggacaacatcaagcatgtccccggtggtggaagtgttcaaatcgtctataagcccgtcgatctctctaaagtcacaagcaaatgcggtagcttaggcaacatccaccataagccaggaggcggccaggtagaggtgaagagcgagaagctcgatttcaaggacagggtgcaatctaagattggctctctggataatattacccatgtaccaggtggcggcaataagaagatcgagacacataaattaacttttagggaaaatgctaaagcaaagaccgaccatggcgcggaaattgtatataagtcgccagtcgtttcgggcgacacctcacctaggcacctctcaaatgtgagctccacagggtccatcgatatggtagactctccacaactggccactctcgctgatgaagtgtctgcaagcctggcaaaacagggactctag

SEQ ID NO: 124383 - DNA, 1239 bp, synthetic construct
  misc_feature 1..1239: note = Description of Artificial Sequence: Synthetic coding sequence
  source 1..1239: mol_type = other DNA
atggcagagccccggcaggagtttgaggtgatggaagaccacgcaggcacctacggcttgggcgaccgaaaagaccaaggtggctatacaatgcaccaggaccaggaaggcgatacggacgccgggctcaaggagagccccttgcaaactcccacagaggacggatccgaggaacctggctcagagacctccgatgccaagtcaaccccaactgcagaggcagaagaggctggcattggagacacccctagtctggaggatgaggccgcaggccatgtgactcaggctaggatggtgagcaaaagcaaagacggtactggcagtgatgacaagaaagccaagggcgcagatgggaagactaagatcgccaccccacgcggagctgcccccccaggccagaaaggtcaggccaacgctaccaggatccctgcaaagacccctccggccccaaagacccctccaagttcaggagagccaccaaagagcggagatagaagcgggtatagtagtccaggcagccctggaactccggggtcacgctcacgcactccttcattaccaaccccccccactagggagccgaaaaaagtcgccgttgtgagaactccacctaagtctccatcttcggccaagtcccggttacagacggccccagtgccaatgcctgaccttaagaacgtcaaatcaaaaatcggaagtactgaaaatctgaagcatcagccgggcggcgggaaagttcaaattattaataagaaactcgacttgagcaacgtgcagtctaagtgtggctctaaagataatataaagcatgtgcctggcggaggttctgtccagatagtctataagcccgtggacctgtcaaaagtgacctctaaatgcggaagcctgggaaacatccatcacaaacccggggggggccaggtcgaagtaaagagtgagaagctggatttcaaagatagagtgcagagtaagatagggtcattagacaacataacccacgtgccaggaggtgggaataaaaagatcgagacccacaaactaactttccgggaaaacgctaaggccaagactgaccacggggcagaaatagtgtacaaatctcctgtcgtctccggtgatacaagtccccgtcacttgagtaacgtctcaagtacgggctctatcgatatggttgacagccctcagcttgccacattggcagatgaagttagtgcctccctagccaagcagggcttgtag

SEQ ID NO: 124384 - DNA, 795 bp, synthetic construct
  misc_feature 1..795: note = Description of Artificial Sequence: Synthetic coding sequence
  source 1..795: mol_type = other DNA
actagagaggccgaaggcgctgacggcaaaactaaaattgccacgcctaaaggccaggcaaacgcgacccgaatccctgctaaaacccccccggcacctaagacgccgcccagtagcggggagccacccaaatccggcgaccgcagcggctactcctcccccggcagcccaggtactcccggatctcgctcacggacaccctccctgccaaccccaccaacaagggaaccaaagaaggtggccgttgtccggacccctcccaaatccccatcatctgctaagtcaaggctgcagaccgccccggtccccatgcctgacctgaagaacgtgaaatctaaaatcggctctaccgagaacctaaaacaccagccgggaggcgggaaagtgcaaatcgtgtacaagcccgtggacctttccaaagtcaccagtaagtgtggatctctcggaaacatccaccacaaacctgggggaggccaggtcgaggtgaagtcagagaagctcgactttaaagatagggttcagagtaagattgggagcctggacaacattactcatgttccaggaggaggaaacaagaaaatcgaaacacataagctcactttccgtgagaacgctaaggctaagaccgatcacggtgcagaaattgtctataagtctcctgtggtttccggagatacttcaccgaggcatctgtcgaatgtctcttctactggctctatcgatatggtggactccccccagttagccaccctagcagacgaggtgagcgccagtcttgctaagcagggtttgtag

SEQ ID NO: 124385 - DNA, 1059 bp, synthetic construct
  misc_feature 1..1059: note = Description of Artificial Sequence: Synthetic coding sequence
  source 1..1059: mol_type = other DNA
atggctgagcctcgccaggagtttgaagtaatggaggatcacgccggtacctacggtttgggcgaccgcaaggaccagggcgggtacactatgcaccaggatcaggagggcgatacagacgctggactcaaagcagaggaagcagggataggtgatacaccatcactcgaagacgaggcggcaggacatgtgactcaggcacgtatggtcagcaagagtaaggatggcaccggtagcgatgataagaaagccaagggcgccgacgggaagaccaagatcgccaccccacgtggagcagctcctcctggacagaaggggcaggccaatgctaccagaatcccagccaaaaccccccccgctcctaagacccctccttcctctggtgaaccgcctaagagcggagatcggagtgggtactcatcacctggatcaccggggacaccaggctctaggtctaggaccccgagtctccctacccctcccaccagagagcccaaaaaagttgcggtggtgcgcacccccccaaagagcccttctagtgccaagtcgcggttgcagactgcgcctgtccccatgccggatcttaagaacgttaaaagcaaaatcggttccacagagaatctcaagcaccaaccaggtggggggaaggtgcaaatcgtatacaagcctgtggatctgtctaaggttacatctaagtgcggctccctggggaacatccaccataagcccgggggaggtcaggtcgaggtcaagtcagaaaagttggactttaaagacagggttcaatctaaaataggtagccttgacaacatcacacacgttcccggcggcgggaacaaaaagatcgaaactcacaaactgacttttcgggaaaatgcaaaagccaagactgatcatggcgccgaaatagtgtataagtcccccgtggtctcaggcgatactagtccaagacacctctccaacgtgtcaagcaccggttccatagacatggtggactcacctcagctggcgactctggccgacgaggtgagcgcatctctcgccaaacagggtctctag

SEQ ID NO: 124386 - DNA, 1233 bp, synthetic construct
  misc_feature 1..1233: note = Description of Artificial Sequence: Synthetic coding sequence
  source 1..1233: mol_type = other DNA
atggcagaaccaaggcaggaattcgaagttatggaagatcacgctggaacatacggactgggcgaccgcaaagatcagggcggctacacaatgcatcaggatcaggaaggcgatactgatgcagggttgaaagagtctcccctgcagactcccacagaggacggttccgaagaaccaggctcagagaccagcgatgcaaagagtacaccaactgccgaggatgtgacggcaccgctggtggatgaaggtgcaccaggaaaacaagctgccgctcagccccataccgagatccccgaggggactactgccgaggaggcaggcattggcgacacgcctagtctcgaagacgaggccgccgggcatgtgacccaggcaaggatggtgtcaaaatcaaaggatggcaccggctccgacgacaaaaaggctaaaggcgccgatggaaagacgaagattgctacacctcgtggtgccgctcccccaggtcaaaaagggcaagcaaatgcaaccaggatccccgccaagactccgcccgcaccaaagacgcctccctcaagcggagagcctcctaaatctggagacagaagcggttacagcagccctgggtcacctggcacgcctggatcccgttctcggacccctagcctgccgacccctcctactagagagccaaaaaaggtggctgttgtgcgcacaccaccaaagagccccagtagcgcgaagagtcgtctgcagacagctcccgttcccatgcctgacctgaagaacgtcaagtcaaaaattgggagcactgaaaatctgaaacatcagccagggggcgggaaggtgcaaatagtctacaagcccgtggacctgtccaaggtgacatccaaatgcggcagtctgggaaatatccatcataagcctggagggggtcaggtcgaagtgaagtcggaaaaactagacttcaaggatagggtccagtctaagatcggctccttagataatatcacccatgtccctgggggcggcaataaaaagattgagacacacaaattaaccttcagagagaacgccaaagctaaaacagatcacggtgcagaaatagtctataaatcaccagtcgtgagtggggacacgtctcctcgtcacctgtccaatgttagctctaccggaagcattgacatggtcgattctcctcagctcgcgactcttgccgatgaggtgagtgccagcctagccaagcaaggcctgtag

SEQ ID NO: 124387 - DNA, 807 bp, synthetic construct
  misc_feature 1..807: note = Description of Artificial Sequence: Synthetic coding sequence
  source 1..807: mol_type = other DNA
atggcagtgaatgtttatagcacatcagtgacctccgataatttatctcggcatgacatgctggcatggattaatgagtctctgcagttgaatctgaccaaaattgaacagctgtgttcgggcgccgcctattgccagtttatggatatgttgttcccgggctctatcgcactcaagaaggtcaagtttcaagctaaactggagcatgagtatatccagaatttcaagatcctgcaagccgggtttaagcgtatgggcgtcgataaaattattccagttgataaactggtgaaaggcaagttccaggacaattttgaatttgtgcagtggttcaaaaagttcttcgacgccaactatgacgggaaggactacgatcctgtcgccgctcgccagggccaagaaaccgcagtcgctcctagtcttgtggcacccgcgctgaacaagcctaagaaaccgctcaccagcagcagcgcggccccacaaagacccatctcaacgcagcggacagccgccgctccaaaagctgggcctggcgtggtgcggaaaaatccaggtgttgggaatggtgatgatgaggctgctgaactgatgcaacaggtcaacgtcctaaagctgaccgtcgaagacctcgagaaggagagggatttctacttcggcaagctccgcaacattgagttaatctgccaggagaacgaaggagagaatgatccagttctgcagaggattgtcgatatcctttatgcaaccgatgaaggattcgtgataccagatgagggaggtcctcaggaggaacaggaggagtactag

SEQ ID NO: 124388 - DNA, 984 bp, synthetic construct
  misc_feature 1..984: note = Description of Artificial Sequence: Synthetic coding sequence
  source 1..984: mol_type = other DNA
atgccagggcctacacagaccctgagccccaatggggagaacaataatgatatcattcaagacaacaatggaaccattattccatttcgcaaacacaccgtgcgaggagaacgaagttacagctggggcatggccgttaacgtgtattccacaagcataacacaggaaacgatgtctcggcatgatatcatcgcctgggtgaatgacatagtttccttaaactacacaaaagtagaacagctgtgctctggggcagcttactgtcaattcatggacatgctttttccaggctgtatcagcctgaagaaagtcaaattccaggcaaaacttgaacatgagtatattcataatttcaagctcctgcaggcctccttcaagcggatgaatgtagataaggttattcccgtggagaagctggtgaaggggcgtttccaggataatctcgacttcattcagtggttcaagaaattctacgatgccaactacgatggtaaagagtacgaccccgtggaggcacgccaggggcaggacgcaattcccccccccgacccaggagaacagatcttcaatctgcccaaaaagtcacaccacgccaacagtcctactgcgggggcggctaagtcaagccccgcagcaaagcccggatcaacaccatcaagaccttcttcagcaaagcgagctagcagtagtgggtccgcctctaagagcgataaagacctagaaacccaggtgatacagttgaacgagcaggttcactccctaaagctggccctcgagggggtcgaaaaagagcgtgacttttatttcggtaagctgagggagatcgagctgctgtgccaggagcacggccaggagaatgatgatctcgttcagcgtctgatggatattttgtacgcctcagaagaacacgagggacacaccgaggagcctgaggccgaagaacaagcgcatgagcagcagcccccccagcaggaagagtactag

SEQ ID NO: 124389 - DNA, 855 bp, synthetic construct
  misc_feature 1..855: note = Description of Artificial Sequence: Synthetic coding sequence
  source 1..855: mol_type = other DNA
atggccgtgaatgtctactcaacttcaattacccaagagaccatgtctagacacgatattatcgcatgggtaaacgatatcgtcagcctcaactacacgaaggtggaacagctgtgcagcggggccgcgtattgtcaattcatggacatgctgttccccgggtgtatctcattaaagaaggtgaaatttcaggctaaactagagcacgagtacattcataactttaagctgctgcaggcatcctttaagcgaatgaacgtcgacaaggtgattccagtcgaaaaactcgtaaaggggcgctttcaggataatctcgacttcatccagtggttcaaaaaattctatgacgccaactacgatgggaaggagtacgatcctgtcgaggctaggcagggccaggatgcaatcccccccccagacccaggcgagcagatttttaacctgccaaagaagtcgcaccacgctaactcgcccacggccggcgcagctaaatcctccccagcggcaaagcctggctcaactcctagtcgaccctcttcggccaaacgggcttcttcctcgggttctgcatcaaaatctgataaagatctggagactcaggttatccaacttaatgagcaagtgcacagtctgaaactcgcccttgagggcgtcgaaaaagaacgagatttctactttgggaaactgcgcgagatcgagctattgtgccaggagcatggacaggaaaacgacgacctggttcagagattgatggacattttatacgcttctgaggagcatgaggggcacacagaggagcccgaagcagaagaacaggcccacgagcaacaacctccgcagcaggaggaatactag

SEQ ID NO: 124390 - DNA, 948 bp, synthetic construct
  misc_feature 1..948: note = Description of Artificial Sequence: Synthetic coding sequence
  source 1..948: mol_type = other DNA
atgaagcagaatcgggatcagaagtgccctgtgtctcaacggaactcttctttccaacagcccggcaggaagccaggttgttccagctggggcatggcggtaaacgtgtactctacttccatcacccaggaaacaatgtcgagacacgatatcatcgcgtgggtgaatgatatagtgtctctgaattacaccaaagtggaacaattatgcagcggagctgcctactgtcagttcatggacatgctctttcccggttgtatctcactgaagaaggtgaaattccaggcaaaactagaacatgagtacatccacaacttcaagctacttcaggccagcttcaagcgcatgaatgtagacaaagtgattccagtggagaaactcgtcaaaggccgattccaggataacttggatttcatacaatggtttaagaagttctatgatgcgaactacgatggaaaggagtacgacccggttgaggctcgccagggtcaggatgctatccctccccccgatcctggcgaacaaatattcaacttgccaaaaaagtcccaccacgcaaatagccccacagctggcgccgcaaagtcttctcctgctgccaaaccaggtagcacaccgagccgcccctctagtgccaagcgtgcctcgagctccggcagcgctagcaaatccgacaaggatctggagacccaggtgatccagctgaatgagcaggttcactccttgaagctggcgctggagggagtcgagaaagagcgggatttttacttcggtaagcttcgcgagatcgaactcctctgtcaggagcacggacaggaaaatgatgacttggttcagaggcttatggacattttgtacgcctccgaggagcacgaaggccatacggaagagcctgaggccgaggagcaggctcatgagcagcagcctccacagcaggaagaatattag

SEQ ID NO: 124391 - DNA, 825 bp, synthetic construct
  misc_feature 1..825: note = Description of Artificial Sequence: Synthetic coding sequence
  source 1..825: mol_type = other DNA
atggcgcgcactactaccacatcatcccggattataacagggccctccttcctatccggaagtacacagtgcgcgggttcggtgcccactggagcagcatactgtcagtttatggacatgctgtttccgggttgtattagcttaaaaaaggtgaagttccaggccaagctagagcacgagtacatccacaactttaagcttctacaggctagcttcaagaggatgaacgtcgataaggtgatacctgtcgagaagttagttaagggccgatttcaagacaacctagattttatccagtggttcaaaaaattttatgatgccaactatgacggcaaggagtacgacccggtcgaagcgaggcagggacaggatgctatcccgccgcctgatccaggagagcagatttttaacctgcccaaaaagagccaccatgccaactcacctacagcaggcgcagccaaaagctctcctgccgccaaacccggatccacaccttcccggccaagcagcgccaaaagagcaagtagctctggcagcgcttctaaaagtgacaaggatctggaaacacaggtcattcagttaaacgaacaggtacactctctaaaactggcactcgagggtgtcgaaaaagagagagacttttatttcggaaagctccgggaaatagagttactctgccaagaacatggacaggaaaacgacgacctggtccaaaggcttatggatatcctgtatgcttctgaagagcacgagggtcatactgaagagcctgaggcagaagagcaggctcacgagcaacagccgcctcaacaggaagagtactag

SEQ ID NO: 124392 - DNA, 1005 bp, synthetic construct
  misc_feature 1..1005: note = Description of Artificial Sequence: Synthetic coding sequence
  source 1..1005: mol_type = other DNA
atgtccgaacctatccgcgtcctagttacgggcgccgccggtcagatagcgtacagtctgctttacagtattgggaatggctccgtgtttggcaaggatcagccaatcattttggtgctgctggatattactcccatgatgggggtgctggacggggtgctgatggagctccaagattgcgccctacctcttctcaaagatgtaattgccactgacaaggaagatgtggccttcaaagacttggacgtggctattcttgtggggagcatgccccgtagggagggcatggaaagaaaggacctactgaaggcaaacgtgaaaatcttcaagagccaaggggctgccttggataagtacgccaaaaagtctgtaaaggtgatagtggtgggaaacccagctaacaccaattgcctcactgcatctaagagcgcgccctctatccccaaagagaatttctcatgtcttactagactggaccacaacagggccaaagctcagatagctctgaaattgggtgtaactgccaatgacgtaaagaacgtaatcatttggggaaatcattccagcacacaataccccgacgtcaatcacgccaaagtgaagctccagggcaaagaagtcggagtgtatgaggccttaaaggatgactcctggctgaaaggtgagttcgtaaccactgtccagcagaggggtgccgctgttatcaaggctagaaagttgtcaagcgctatgtccgccgccaaagcgatatgtgaccacgtgcgagacatctggtttgggactccagagggtgagttcgtgtcaatgggcgtcattagtgacggaaatagttacggggtacctgatgatttgctgtatagtttcccagtagtgatcaagaacaaaacatggaagttcgttgagggcttacctattaatgatttctcccgagagaaaatggacctgaccgccaaggaattgaccgaagaaaaagaaagtgcttttgaattcctgtcatccgcttag

SEQ ID NO: 124393 - DNA, 801 bp, synthetic construct
  misc_feature 1..801: note = Description of Artificial Sequence: Synthetic coding sequence
  source 1..801: mol_type = other DNA
atggctgtgaacgtctactcgaccagcgtcacatcggagaacttgtcgagacacgacatgctcgcttgggtgaacgactccttgcacttgaattatacaaagattgagcagctctgcagtggcgcagcatactgtcaattcatggatatgttgtttccaggctgtgtgcatctgagaaaggttaaatttcaggcaaaactggaacacgagtatatccacaattttaaggtgttacaggctgcgtttaagaaaatgggcgtcgataagatcattccagtggagaagttggtcaagggaaagtttcaggacaatttcgaattcatccagtggttcaagaaattcttcgatgcgaactacgatggcaaggattacaaccccctgctggccaggcagggccaggacgtggccccacctcctaaccctgtcccacaacggacctcacccacgggccccaaaaatatgcaaacatcgggccgtctctcaaatgtggcccccccttgcatcctgcgcaaaaacccaccatctgcgcgcaacggaggccacgaaacagatgctcagatactggagcttaatcagcagctggtcgatttgaagcttacagttgatgggttagagaaagaacgcgacttttacttctctaaactgcgagatattgagctcatatgccaagagcacgagagtgagaacagtcctgtcataagcggtatcatcgggatcctgtatgcaactgaggagggctttgctcccccagaggatgacgagatcgaggaacaccaacaggaagatcaagacgagtattag

SEQ ID NO: 124394 - DNA, 801 bp, synthetic construct
  misc_feature 1..801: note = Description of Artificial Sequence: Synthetic coding sequence
  source 1..801: mol_type = other DNA
atggccgttaatgtctactctacatccgtaacatccgagaacctctcccgacatgacatgctggcctgggtgaatgattccctccatttgaactatacaaaaattgagcagctgtgtagcggggccgcttactgtcagtttatggatatgctatttcccggatgcgtccaccttcggaaagtgaaattccaagccaagctcgaacacgaatacatccacaacttcaaggtgcttcaggctgcatttaaaaaaatgggagttgataaaattataccagttgagaagctagtcaaggggaagtttcaggacaatttcgagtttatacagtggtttaaaaaattctttgacgcaaattatgacggcaaagactataacccattactggctaggcagggccaggatgtggcccccccacccaaccctgtcccacagcgcacgtctcccacaggtcctaaaaatatgcagaccagtggaaggctcagcaacgtcgcaccaccctgcatcctgaggaagaacccgcccagcgcccgcaatggaggacacgagactgatgcccaaatcctagaattaaaccagcagttagtggatctcaagttgactgtggacgggcttgagaaagaacgtgatttctactttagtaaactgagggacatagagctcatctgtcaagagcatgaaagtgagaactccccagtgatatcaggcattataggcattttgtacgctactgaagagggtttcgccccacctgaagatgacgaaatcgaggagcaccagcaggaggatcaggatgaatactag

SEQ ID NO: 124395 - DNA, 657 bp, synthetic construct
  misc_feature 1..657: note = Description of Artificial Sequence: Synthetic coding sequence
  source 1..657: mol_type = other DNA
atggctgtcaatgtttactcgacctccgtcaccagtgagaacctatcacgacacgacatgcttgcctgggtcaacgatagccttcaccttaactataccaagatcgaacagctgtgtagcggagcagcatattgccagttcatggacatgttgtttccaggctgtgtacacctgcggaaagtcaagtttcaggctaagttagagcacgagtacatccacaactttaaggtgttgcaggctgcttttaagaagatgggcgtagacaagattatccctgttgagaagttggttaagggtaagtttcaggacaattttgagttcatccagtggtttaaaaaattctttgatgctaactacgatggaaaggactacaatcctcttctggcacgccagggtcaggacgtcgctcctccgccaaaccccggagaccagatcttcaataaaagcaagaaactgattggaacagcagttccccagcggactagtccaacaggcccgaagaatatgcagacatcaggtaggctaagcaatgttgcaccaccctgcatccttagaaagaatcccccatcggccagaaatggcggtcatgagactgacgctcaaattcttgagctgaatcagcagctggtggatctaaagctgactgtggatggctag

SEQ ID NO: 124396 - DNA, 2004 bp, synthetic construct
  misc_feature 1..2004: note = Description of Artificial Sequence: Synthetic coding sequence
  source 1..2004: mol_type = other DNA
atggagacattggaatctgagctcacttgtcccatctgcctggagctgttcgaagaccccttgcttctcccttgcgctcattccctctgtttcaattgtgcccatcggattctggttagccactgtgccactaacgaatcggttgaaagcattaccgccttccagtgtccaacatgtagacacgtgattaccctatcacaaagaggtctggacgggctgaagaggaacgtcacactgcaaaatatcatagataggtttcaaaaggcctccgtatctgggccaaattcaccgtcagaaacaagacgtgagagagcctttgacgctaacaccatgacaagtgcagagaaggtcctgtgccagttttgcgatcaagatccagctcaagatgctgtgaagacctgcgtgacttgtgaggtcagctactgcgacgaatgtctgaaggccacccaccccaacaagaagccattcaccgggcacagattgatcgagcccattcctgactcccatattcgcggcctgatgtgtctggagcacgaagatgagaaggtgaacatgtactgcgtaacagacgaccagctgatctgcgctttgtgtaagttagttggaaggcacagagatcaccaggtcgcagccctttcagaacgatatgataagcttaaacagaacttggaatccaacctgactaacctaattaagaggaacactgaacttgagactttgctcgccaaattaatacagacttgccaacatgtcgaggttaacgcaagccgacaagaggccaagctgacagaagagtgcgatcttcttattgaaattatccagcagcggcgtcagatcattggtacaaagattaaggaaggtaaagtgatgagattgcgcaaactggcccagcagattgcaaattgcaaacagtgcattgagcgctcagcgagcctaattagccaagcggaacactctttgaaagaaaatgaccacgcccgatttctgcaaacagcaaagaacatcacggaaagggtgtccatggcaactgcatcctcgcaggtactgatcccggaaattaatttgaacgacacgttcgacaccttcgccctggatttcagtagagagaagaaacttttagaatgtttggattacctgaccgcacccaacccacctacgattagggaggagctatgcacagccagttacgacacaatcaccgtccattggacaagtgatgatgagttctctgtggttagttatgagctgcagtatacaatttttaccggacaagccaacgtggtctcactctgtaatagcgcagactcctggatgatagttccaaacatcaaacagaatcactacacagtgcacggcctgcagagcgggactaaatatatctttatggtcaaagccatcaatcaggcagggagtcgttcatccgagccggggaagctaaagactaattcgcagccattcaaacttgacccaaaaagtgctcataggaaactgaaagtgagccacgataatcttacagtggagcgagacgagagctcgtctaagaagtcccacacacccgaacgtttcacaagtcagggatcatatggggtggccggaaatgtgtttatcgatagcggccgacattattgggaggtggtcattagcggtagcacgtggtacgctatcgggctggcttacaagagcgcacccaaacacgaatggattggcaagaactcagcgtcttgggcactgtgtcggtgtaacaataattgggtggtgagacacaattcaaaagagattcccatcgagccggccccgcacttgcgtcgagtgggcattttgcttgactacgacaatggaagcatcgcattctacgacgctcttaattctatccacctgtatacgttcgatgtggccttcgcacagccagtgtgtccgacatttaccgtatggaacaagtgtctaacaatcatcaccggcctgcccatcccggatcacctcgattgcactgagcaattgccgtag

SEQ ID NO: 124397 - DNA, 2004 bp, synthetic construct
  misc_feature 1..2004: note = Description of Artificial Sequence: Synthetic coding sequence
  source 1..2004: mol_type = other DNA
atggaaactctcgagtccgagctaacctgtccaatctgtctggagctcttcgaggaccccctcttactcccatgcgctcattccctgtgcttcaactgcgcgcataggatcctggtcagccactgcgccaccaatgagtcagtcgagtccatcactgcctttcaatgtcccacctgtagacacgtgatcacactctcccaaagaggtctggatggcttgaaacgcaacgtgactctgcagaacataatcgatcgttttcagaaggcaagcgtgagcgggccaaactctccatccgaaacacgtcgtgagagggcttttgacgctaataccatgacctcagcggaaaaggtgctttgccagttctgcgaccaggatcccgctcaagacgccgtgaaaacatgcgtgacatgtgaggtgtcctattgtgatgagtgtctgaaggctacacatccgaataagaaaccatttaccggtcataggcttattgaacctatccctgactcccacatcaggggactgatgtgccttgagcacgaagatgagaaggtcaatatgtactgtgtgaccgacgatcaactgatctgcgctctctgcaaactggtgggacgtcaccgagatcaccaggtggctgcactctctgagcgctatgataaacttaagcagaatctggaaagcaatctcacaaatctgatcaaacgaaacaccgagctggagacactgctggcaaagctgatccagacatgccagcacgtggaggtaaacgcgtcacggcaagaagccaagctgacggaggagtgcgatctccttatagagattattcagcagcggagacagatcatcggtaccaaaatcaaggagggcaaggttatgcggctgcgcaaactggcccagcagattgcgaactgcaagcagtgtatcgagagaagcgcaagcctgattagccaggccgaacatagtcttaaggaaaacgaccatgcccggttcctacagaccgccaagaatatcacagaaagagtgagcatggcgaccgcaagctcacaagtcctcattccagagataaatttgaatgacaccttcgacactttcgccctggatttcagccgggaaaagaaattgttggaatgtttagattacttgaccgcacctaacccaccaacgatccgcgaagagctgtgcactgcctcttatgacacaataacagtccattggaccagcgatgatgaatttagcgtcgtatcttacgagcttcagtatactatttttacaggacaggcgaacgttgtctctctgtgtaacagtgctgattcttggatgatcgttcctaatatcaagcaaaaccactacactgttcatggccttcagagcgggaccaaatacatctttatggtaaaggctattaatcaggcagggagcagaagttcggagcccgggaagctcaagacaaactcacagcccttcaaactagacccgaagagtgctcacagaaagcttaaagtttcgcatgataacctgaccgtggagcgcgatgagtcatccagcaaaaagtcacatactcccgaacgattcacttcgcagggtagttacggcgttgccggaaacgtgttcattgatagcggtcggcactactgggaagtggtgatttctggctctacctggtacgcaattggtttggcatataaaagcgcaccaaaacacgaatggattggaaagaactctgcctcctgggcactttgccgatgcaataataattgggtggtccgccacaatagcaaagaaatccccattgagcccgccccccatctgagaagagtggggattcttctcgactacgacaacgggagtattgctttctacgatgcattgaactctatccacttatacacgttcgatgtcgccttcgcccaacccgtgtgtccaactttcactgtgtggaacaagtgccttaccataattaccggtctgcctattcccgatcatcttgattgtaccgagcagctcccctag

SEQ ID NO: 124398 - DNA, 2004 bp, synthetic construct
  misc_feature 1..2004: note = Description of Artificial Sequence: Synthetic coding sequence
  source 1..2004: mol_type = other DNA
atggagaccctggagagtgaactgacttgccccatttgccttgagcttttcgaggatcctctgctgcttccatgcgctcactcactttgttttaactgcgctcaccgaatcctggtctctcattgtgccacaaacgaatcggtagaaagcattacagctttccaatgccctacatgccgtcatgtcataacactgtcccagcgcggcctagatggattgaaacgcaatgtcacgctgcagaacattatcgacaggtttcagaaggcgtctgttagcggcccaaacagccctagcgagaccaggcgggaaagagcattcgacgctaacactatgacatctgccgagaaggtactctgccagttctgcgatcaggatcctgcacaggacgccgttaaaacctgtgttacttgtgaggtctcgtattgcgacgaatgcctgaaggcaactcacccaaacaaaaagccctttacaggacaccggctgattgagccaataccagactcacacattcggggtctgatgtgtctggaacacgaagacgagaaggttaacatgtattgcgtgacggatgaccaactgatctgtgccctctgcaaacttgtggggaggcatcgagatcatcaggtggcagctctcagcgagcggtatgataagcttaagcagaatcttgaatccaatctgactaatcttattaagagaaacacagaactggagacactactggcgaaacttatccaaacatgccaacatgtggaggtcaatgctagccgccaggaagcgaagctcactgaggagtgtgacttactcattgaaatcatccagcagcggcggcagataattgggactaaaataaaggaaggaaaggtgatgcgactgaggaaacttgcgcaacagatcgctaattgtaagcagtgtatcgaacgcagtgctagcctgatcagtcaggcagagcattcgttgaaggagaacgaccatgctaggttcttgcagaccgccaagaatatcaccgagcgcgttagcatggccacagcttcaagccaggtcctcattcccgaaattaatctcaatgacacatttgataccttcgcacttgatttttccagggagaagaaactgctggagtgcctcgactacttaaccgctccgaatccgcccaccatccgtgaggagctctgcaccgcctcttacgatactattacggttcattggacctccgacgacgagttctccgttgtctcatacgagctgcaatacaccatttttaccggacaggctaatgttgtgagtctctgcaattctgccgatagttggatgatcgtgccgaacatcaagcagaaccattatacggtgcatgggctgcagagcggaaccaaatacattttcatggtcaaggccatcaaccaggcggggtctaggtcttctgaaccaggaaaactgaagaccaacagccagcccttcaagcttgacccaaaaagcgctcaccggaagctgaaagtgtctcacgacaatctcactgtggaaagggatgaatccagctctaagaagtctcatacgccagaaagattcactagtcagggcagctatggagttgcaggcaatgtgtttattgattcaggccggcattactgggaagtggtcattagcgggagcacatggtacgccatcgggttggcctataaaagcgctcctaaacacgaatggatagggaagaacagtgcttcatgggcattgtgtaggtgtaacaataattgggtggtgagacataactccaaggagatcccaattgagcctgcaccccatttgcgacgagtaggaatcctgctggattacgataatggtagtatcgcattttacgatgcactgaacagcatccacctgtataccttcgacgtagcttttgcccagccagtgtgtccaacgttcactgtgtggaataagtgcctaacgattatcaccggcctgcccatccccgaccacttagattgcacggagcagcttccatag

SEQ ID NO: 124399 - DNA, 1659 bp, synthetic construct
  misc_feature 1..1659: note = Description of Artificial Sequence: Synthetic coding sequence
  source 1..1659: mol_type = other DNA
atggagaccctagaatccgaactgacctgccctatttgtctggaactcttcgaggaccccctgttactcccctgtgcacactctctttgctttaactgcgctcatcgtattctggtctcacactgcgccaccaacgagtccgtcgaaagcattaccgcatttcaatgccctacttgccgccatgtcataacactgtcccaaagaggcctggacggtctcaagcggaatgtgacacttcagaatattattgatagattccagaaggcatccgtgtccggaccaaactccccttccgagacccgcagggagcgagccttcgacgccaacacaatgaccagcgccgagaaggtgctgtgtcagttttgcgatcaggacccagcccaggacgccgtaaagacttgcgtaacctgcgaagtgtcctactgcgatgagtgccttaaagccacccacccaaataaaaagccatttaccggtcacagactgatcgaaccaatcccagattcgcacatccggggcctgatgtgtttagagcatgaggatgaaaaggtcaacatgtactgtgttacagacgatcagctgatctgtgctctatgtaagctggtcggaaggcacagggatcaccaggtggccgccttatctgagcgctacgataaactgaagcagaacctggagagtaatcttactaacctcatcaaaagaaatacagaactagaaaccctactcgcaaagctgatccagacgtgccaacacgtggaggtgaatgcctcgagacaggaagcaaaactgacggaagaatgtgacctcctgatcgaaatcatccagcaaagacggcaaatcattggtaccaagatcaaggaggggaaggtcatgcgcctgcgcaaactggcacagcaaattgcaaattgtaagcagtgcatcgagcggtctgcatcactgatttcacaggctgagcacagcctaaaggagaatgaccatgcccgattcctgcagaccgcaaaaaacataactgaaagggtcagcatggccactgcttcatcacaggtgctgatacccgagattaacctgaacgatacattcgatacttttgcactcgatttcagccgagaaaagaaattgctggaatgcttagactacctaactgctcccaatcctccgaccatcagagaagagctttgtacagcctcctacgacacaataactgtccactggacctcagatgatgaattcagcgttgtttcctatgagttacagtacacaatatttaccggacaggcaaatgtggtatcactgtgcaacagcgcagacagttggatgatcgtccccaacatcaaacagaaccattatacggtgcacggtctccagagtggcactaaatacatattcatggtgaaggcaattaaccaggccggaagccggagctcagaacccggcaaactaaaaaccaacagtcagccatttaaactggatcctaaatctgcgcaccgcaagctgaaggtatctcacgataacctcaccgtagaacgcgacgagagcagctccaagaagagccacacgccagaaagatttacgtcccaggggagctatggtgtggctggaaacgtctttattgactctgggcggcattattgggaagtggtaatcagtggctccacctggtag

SEQ ID NO: 124400 - DNA, 2004 bp, synthetic construct
  misc_feature 1..2004: note = Description of Artificial Sequence: Synthetic coding sequence
  source 1..2004: mol_type = other DNA
atggaaacactggaatccgagcttacctgccccatctgcctggaactgtttgaagatccactgctgttgccctgcgcacactctctgtgcttcaattgtgctcatagaatactcgtgagtcattgcgctactaacgaatccgtcgaatctatcactgcctttcagtgtcctacctgccgccatgtgattacactatcacaacggggactggacggtcttaaacgcaacgtgacattacagaacatcattgataggtttcaaaaagctagcgtaagtggccctaactcgcccagcgaaactcgccgcgagagagcctttgatgctaacacgatgacctccgctgagaaggtgctctgtcaattttgtgaccaggacccggcgcaggatgcggtgaaaacctgtgttacctgcgaagtgagttattgtgatgagtgtctcaaggccacccaccctaacaagaagcccttcactggccatcgcttgattgaacccattccagacagtcacatccgcggattgatgtgtcttgaacatgaggacgagaaagtcaacatgtactgcgtaacagacgatcagttgatttgtgcgctgtgcaaactggtgggccgccacagagatcatcaggtggcagcactcagcgaacggtacgacaagttaaagcagaatttggagtctaacctgactaacctgattaaaaggaacacagagctggagactctgttggccaagctgatccagacctgtcagcatgtcgaggtgaatgcttctagacaggaggccaaactgacagaggagtgcgacctcctcattgaaataatccagcaacgcaggcagataatcggcaccaagatcaaggaaggcaaagtaatgcggctgaggaaactcgcacagcagatagccaattgcaaacaatgcatcgagcgaagcgctagccttatcagtcaggctgagcatagcctgaaagaaaatgatcacgctagattccttcaaaccgccaagaatatcactgagcgcgtgagcatggccacagcttccagccaggttctcatacccgagataaatctcaacgatacattcgacacattcgccctggacttctcaagggaaaaaaagctactggaatgcctcgattacctgacagccccgaaccctcccaccatccgcgaggaactgtgtacggcctcctacgatacaatcactgtgcactggaccagcgatgatgaattcagcgtcgttagttatgaacttcagtacacaattttcaccggccaggcaaatgtggtgagcctgtgcaactccgcagattcttggatgattgtgcctaatatcaaacagaaccactatacagtacatggcctgcagtccggcaccaagtatatatttatggtgaaagctataaaccaggccggcagtcgctcgtctgaaccaggaaagctgaagactaattctcagccctttaagttggatccgaaatccgctcaccgtaagctgaaggtgtcgcatgacaacttgaccgtcgagcgcgacgaaagcagctcgaagaaaagccatacacccgagagatttacttcccagggcagctatggcgtggccggcaatgtgttcattgactctggccggcattactgggaggtagtcatctcaggcagtacatggtatgccattggattggcatataaatccgcgcctaagcatgaatggattggaaaaaactcggccagctgggccctgtgccgttgtaataataattgggtagtgaggcacaatagtaaagaaatccccattgagccagcccctcacttgcggagggtgggtattttactcgattacgacaacgggagcattgccttctacgatgccctcaactctattcacctctatacattcgatgtggccttcgcccagccggtctgcccaacgtttaccgtatggaataagtgtttgacaatcataacaggtctccctatcccagaccatctggactgcaccgagcagttgccctag

SEQ ID NO: 124401 - DNA, 2004 bp, synthetic construct
  misc_feature 1..2004: note = Description of Artificial Sequence: Synthetic coding sequence
  source 1..2004: mol_type = other DNA
atggagactctcgagtccgagctcacatgccctatatgccttgaactgttcgaagacccgttgctgctgccttgcgctcactccctgtgttttaactgcgcccaccggattctggtttcacattgcgcaacaaacgagtctgttgaatccattacagcttttcagtgccctacttgtcgccatgttattacactctcccagagaggactggatgggctgaagaggaatgtgaccctgcagaatatcattgaccgatttcagaaagcaagtgtgtcaggccccaacagcccgtcagagacacggcgcgagcgagcttttgacgccaacaccatgactagtgcagaaaaggtgctgtgccagttctgcgatcaagaccctgcccaggatgccgttaagacatgtgtaacatgtgaggtgtcatactgcgacgagtgcctgaaggctacacatcctaacaagaagccatttacaggccaccggctcattgagccaattcctgactctcatatacgtggcctgatgtgtttagagcatgaagacgaaaaagtgaacatgtattgtgtcactgacgatcagctcatctgcgccttatgcaagttggttggccgccatcgagaccatcaggttgccgcattatcagagaggtacgataaactcaaacagaatttggaaagcaacttgaccaatctgatcaaacgcaataccgaactcgagactctcctcgctaagctgattcagacatgccagcacgtagaggttaatgcctcgcggcaggaggctaaacttactgaggagtgtgatctgctcatcgagatcatccagcagagaaggcagatcatagggaccaagattaaagagggcaaggtaatgaggctccggaaactggcccagcagattgccaactgtaaacaatgcattgagagatccgcctctttaattagtcaggccgaacactccttgaaagagaatgaccacgctcgctttctccagaccgccaagaacatcacagaacgggtgtcgatggccacagcttcatcgcaggtgttgatacccgagataaatctgaacgatacatttgacacatttgctttggatttttcgagagaaaaaaagcttctggagtgcctggactacctgaccgcacctaatcctccgaccatacgagaggagctgtgcacagcctcctatgataccattacagtgcattggacatctgacgatgagttctccgtggtgagctacgagttgcagtacaccatatttacggggcaggccaacgtggtgtctctctgtaattctgccgatagttggatgatagtccccaatattaagcagaaccactataccgtgcacggacttcagtccggcacgaagtatatttttatggtgaaggcaatcaatcaggccgggagcagatcctcagagcctggcaagctgaaaacaaactcccagccctttaagttagatcccaagagtgcccaccggaaactgaaagtttcccacgataacctgacagtagagcgcgacgaatcgtctagtaaaaagtcccacacccccgagcgctttacgagtcaggggagttacggcgtggcagggaacgtgttcatcgactctggacgacattactgggaggtagtgatatctggaagcacttggtacgccattggactcgcttacaagtcggctccaaaacacgaatggatcggaaagaattcagcttcgtgggcgctgtgtaggtgcaataacaactgggtagtgcggcataattccaaggagatacccattgaacccgcacctcatctccggcgggttggaattttgctggattatgacaacggctcaattgctttctatgacgccttgaatagtatacacctctatactttcgacgtcgccttcgcacagcccgtttgcccaacgtttaccgtatggaataaatgtctcacaataatcaccggattaccgatcccagaccatctcgactgcactgagcagctgccctag

SEQ ID NO: 124402 - DNA, 1452 bp, synthetic construct
  misc_feature 1..1452: note = Description of Artificial Sequence: Synthetic coding sequence
  source 1..1452: mol_type = other DNA
atggaaaccctggagtccgaactgacctgtcccatctgtctcgaacttttcgaagatccactcttgttgccatgtgcacactctttgtgttttaactgcgcgcatagaattctggtgagtcattgcgccaccaacgagtccgtggagagtatcaccgctttccagtgtcctacatgtcggcatgttataacactcagtcagcgggggcttgacggccttaaacggaacgtcactctgcagaacatcatcgaccggttccaaaaggcctccgtgtctggtcctaactcaccctctgagacccgccgggagcgggcttttgatgctaataccatgacgagcgcagaaaaggtactgtgccagttttgtgaccaggacccagcccaagacgcagttaagacatgcgtcacctgcgaggtgagctactgcgacgagtgcctgaaggctacccaccctaataagaagcccttcacggggcaccggctcatagaacccatcccggactcacacatcaggggactgatgtgtctggaacacgaggatgaaaaggtgaatatgtactgtgtaactgatgaccagctcatctgtgccctgtgtaagctcgtggggaggcacagggaccaccaggttgctgcgttatctgagaggtacgataagctcaaacagaatttggagtccaatctgacaaatctgataaagaggaacactgaactggagacactcttagccaagcttatacagacctgccaacatgtggaagtgaacgcgagtcggcaggaggctaaacttaccgaagaatgcgatctgctgattgagattatccagcagcggagacagattatcggtaccaaaattaaggaaggaaaggtgatgcgactgcgcaaattggcgcagcagattgccaactgtaagcagtgtatcgaaaggtcggcgtccctgatatcccaggctgaacattcattgaaggaaaacgaccacgctcggttcctgcagacagccaaaaacatcacagaaagggttagcatggcgacagccagctcgcaggtgctgatcccagaaataaatcttaatgacacatttgacactttcgctctggacttttcccgagaaaaaaagctgctggaatgcctggactatctgacggctcccaatcctcctacgatccgcgaggaactttgtacggccagctatgacaccattacagtccattggaccagcgatgatgagttctccgtggtgagttacgaattgcaatatacgatatttacagggcaggcaaacgtcgtgtcactatgcaactctgcggactcctggatgattgtccccaatatcaaacagaaccactacaccgttcacggcctgcaatccgggaccaagtacatcttcatggttaaagccattaaccaggccgggagccgtagctccgaacccggcaagttgaagaccaactcctag

SEQ ID NO: 124403 - DNA, 594 bp, synthetic construct
  misc_feature 1..594: note = Description of Artificial Sequence: Synthetic coding sequence
  source 1..594: mol_type = other DNA
atggaaacgctcgagtcagagttgacatgcccgatttgcctggagctctttgaggatccacttctcctgccatgcgcgcactcactgtgttttaactgcgctcatcgcatcctcgtgagtcattgcgcaactaatgaaagcgtcgagagcattacagccttccagtgtccgacctgtcgccatgtcataacactgagccagcggggcctagacggactgaaaagaaatgtgactctacagaacattattgatcgctttcagaaggccagtgtcagcggaccaaacagccctagtgagacacgcagagagcgcgccttcgacgccaacacaatgacctctgctgaaaaggtactgtgtcaattttgtgaccaggatcccgcacaagacgctgtgaaaacatgcgtaacatgcgaggttagctattgcgacgaatgcttaaaggcgactcaccctaataagaagccctttaccgggcacagactgatcgaacccatccctgattctcacatacgtggcctgatgtgcctggaacatgaggacgagaaggtgaacatgtattgcgtgactgatgatcagttgatctgtgcactgtag

SEQ ID NO: 124404 - DNA, 2004 bp, synthetic construct
  misc_feature 1..2004: note = Description of Artificial Sequence: Synthetic coding sequence
  source 1..2004: mol_type = other DNA
atggaaactctggagtccgaactgacatgcccaatatgccttgagctcttcgaggaccctcttctgctgccctgtgcccactctttgtgttttaattgtgcccaccggatcctggtttcccactgcgctactaatgaaagcgtggaatcaattacagcatttcagtgcccaacctgtagacacgtaattaccctgagtcagaggggtcttgatggtttgaaacggaatgttacgctccagaatataatcgatcggtttcagaaggcttccgtgagcggacctaattccccctctgaaactagacgtgaaagagcctttgacgctaataccatgacctccgcagaaaaggtcctgtgccagttttgcgaccaggatcctgcccaggatgcggtgaaaacctgtgttacctgcgaggtgagctattgcgacgagtgcctaaaggccactcacccaaacaagaaaccattcaccggccaccgccttatagagcctatcccggactcacatatacgtggtctgatgtgcctcgaacatgaggacgaaaaggtgaatatgtactgcgtgactgacgaccaactgatatgcgctctctgcaagttggtgggcagacaccgggaccaccaggtagccgcgctctccgagcgttacgacaaactcaaacagaatctggaaagtaacctgacaaatctcattaaaagaaacactgaactggagactctgttagccaaactcatacaaacttgccagcacgtcgaagtcaacgcctcacgacaggaggctaagttaactgaagagtgcgacttgctgatcgagatcatccaacaacgaaggcaaatcatcggcaccaagattaaggagggaaaggtgatgagattgcgcaaactcgctcaacaaatcgctaactgcaagcagtgcatcgagcgatcagcttcattgattagccaggcagagcattccctgaaagagaacgatcacgccaggttcctccagaccgccaagaacatcactgagagggtcagtatggccaccgcttcttcgcaggtgctgatcccggaaattaatttgaacgacacatttgacacatttgccctcgatttttctcgggaaaagaaattgctggaatgtttggactatctgactgctccaaaccctcccaccattcgcgaagaactgtgtactgcgtcctatgacactattaccgtacactggacaagtgacgacgagttctccgtagtgtcctacgaactgcaatataccatctttacaggtcaagctaatgtggtctccctgtgtaactctgcagactcctggatgatcgtccccaatataaaacaaaaccattataccgtccacggcctgcagagtggaacgaaatacatatttatggtaaaagccatcaatcaggcgggcagtcggtcaagtgaaccaggcaaactcaaaacaaattcccagccttttaagctggatcccaaatccgcccatcggaagctgaaagtaagccatgacaacctgaccgtggaaagagatgagagttcaagcaaaaagagccatacgcctgagcgatttacttctcaaggatcctacggagtggccggaaacgtgttcattgacagtggccgccattattgggaggtggtgatcagtggaagcacctggtacgctatcggattggcctacaaatctgcccccaagcatgaatggatcgggaaaaactctgcgtcttgggcactgtgtcggtgtaacaacaattgggtagtgcgccacaattcaaaagagattcccatcgagcctgctccccaccttcgaagagttggcatactgcttgactacgacaatggtagcatcgctttctatgatgccttgaactccatacatctctatacctttgatgtcgcctttgcacaaccggtttgcccgacatttaccgtgtggaataagtgtctgactattatcacaggattgcccatcccagaccacttagattgtaccgagcagctgccttag

SEQ ID NO: 124405 - DNA, 1854 bp, synthetic construct
  misc_feature 1..1854: note = Description of Artificial Sequence: Synthetic coding sequence
  source 1..1854: mol_type = other DNA
atggaaacgctagaatctgaacttacatgccccatctgtttggaactgttcgaagaccctcttttacttccatgcgcccacagtctgtgttttaattgtgcccaccgcatactcgtgtcccattgtgctacaaatgaaagtgttgaatctattacggcattccagtgtcctacttgtcggcatgttattactttaagtcagcgtggactggatggccttaagcggaacgtaactctgcagaacatcattgacagattccagaaggccagtgttagcggcccgaatagcccctcagagaccagcgctgagaaggtcttatgtcagttttgcgaccaggatcccgcgcaagatgccgtgaagacctgcgtaacctgcgaggtgagttattgtgatgaatgcctgaaagctacgcacccaaataaaaaaccattcacaggtcatcggctgatagaacccatccctgactcccatatccggggcctgatgtgcctggagcatgaagatgaaaagcagaacttggagtctaatctgaccaatcttatcaagcggaatactgagctggagacactgcttgccaagctaatccagacttgccaacatgtggaggtgaatgccagtagacaagaggctaaacttacagaagagtgcgatctcttgatagaaataatccagcagaggcgtcaaattattggaacaaagatcaaagagggtaaggtgatgcgacttaggaagttagctcagcaaattgcaaattgtaaacagtgcatcgagcgttccgcgagcctgatttcccaagccgaacacagtctgaaagagaacgatcacgcacgttttctccagacagccaagaacatcacagagagagtgtccatggcgaccgcaagcagccaggttcttatccctgagattaacctcaatgacacatttgatacgtttgccctggatttttctcgtgagaaaaagttgctggagtgcctcgactacctgacagcacccaatcctccaacgatcagggaagaattatgcacagcatcctatgatactattactgtgcattggacgtctgacgacgagttctctgtcgtgtcatatgaacttcaatacactatctttacagggcaggcgaatgtcgtttctctgtgcaactcagccgatagctggatgattgttccgaacatcaagcagaatcactataccgtacacggtctgcagagcgggacaaaatacatttttatggtgaaagctatcaaccaggccgggtcgcggagtagtgagccaggtaaactgaagacgaattcccagccattcaagctagatcccaaatctgcccatcgaaaactgaaagtgtcccacgacaacctcaccgtagagcgagacgaaagctcctctaaaaagagccacacccccgaacgattcacaagccaggggagctacggagtcgctggtaatgtattcatcgattcaggcagacactattgggaagttgtcatctccggatcaacctggtatgccattgggctggcctacaagtccgcaccaaagcacgagtggatagggaaaaactccgcttcctgggccctctgccgctgtaataacaattgggtggtgcgccacaatagtaaggagattcctattgaacccgcaccccacttaagaagagtgggcatccttctggactatgacaacggttcaatagctttttacgatgcactcaacagtatccacctgtacaccttcgatgtcgcttttgcacagcctgtctgtccaacctttaccgtctggaacaagtgcctcacgataatcaccggtctgcctattccagaccacctcgactgcaccgagcagcttccttag

SEQ ID NO: 124406 - DNA, 2208 bp, synthetic construct
  misc_feature 1..2208: note = Description of Artificial Sequence: Synthetic coding sequence
  source 1..2208: mol_type = other DNA
atgggtgagtcccctgcctcggtcgttctgaacgccagcggcggcctctttagcctcaagatggagaccctggaaagcgagctcacttgtcctatatgcttggaactgtttgaagatcctctgttgctcccttgtgcccatagcttgtgcttttcctgtgcacaccgaatacttgtatcgagctgttcctcaggtgagagtattgagccaatcacagctttccagtgcccaacgtgtcggtatgtcattagtttaaaccaccggggtctggacggtttgaagagaaacgtgactttacagaatattatcgaccgcttccagaaagctagcgtgagtggccctaattctccttcagaatcaaggcgcgagcgtacctaccggcccacgaccgctatgtctagcgaacgcatagcttgccagttctgcgagcaggacccacctagggacgccgtaaaaacatgcattacatgcgaggtttcttactgtgatagatgcctgcgagctacacatccaaacaaaaagccattcacttctcacagactggtggaaccggttccagatacccatctgcgaggcatcacttgcctcgaccatgagaacgaaaaggtaaatatgtactgcgtgtcagacgaccagttgatttgtgctctctgtaaattagtgggccggcatagggaccaccaggtcgcaagcttgaacgatcgattcgagaaattgaaacagactctggaaatgaacctgactaatctcgtcaagcgaaactccgagctggagaatcagatggccaagctgatccaaatttgtcagcaggtggaagtaaatacggcaatgcacgaagctaaacttatggaggagtgtgacgagctggtcgagatcattcagcagcggaaacagatgatagctgtgaaaatcaaagaaaccaaagttatgaaactgagaaagcttgctcagcaggtcgcaaactgccggcaatgccttgaaaggagcacagtgctcatcaaccaggcggagcatatactaaaggagaacgatcaagcaagatttctgcagtctgctaagaatatcgctgagcgggttgcaatggctactgcctctagccaagtactcataccagacatcaacttcaatgatgcattcgaaaattttgcgctcgacttcagccgtgagaagaagctgcttgaaggcctcgattatctcaccgcacctaacccgccaagcatccgcgaggaactctgcacggccagccacgatacaataaccgtccactggatttccgatgacgagttctctatttcaagctacgagctgcagtacactatctttacaggccaggctaatttcatttcgaagtcatggtgctcttggggtctgtggccagagattaggaagtgcaaggaggccgtatcttgttctcgcctcgctggcgcccccaggggtctatacaactccgtcgactcctggatgattgtgccaaatatcaagcagaaccattacacagtacacggcctccagtctggcaccaggtatatctttatcgtgaaggctatcaaccaggctgggagtaggaactcagaaccaactcgacttaaaactaatagccaaccctttaaattggaccctaagatgacccacaagaagctgaagatctcaaatgacgggctccagatggagaaggacgagagtagtctgaagaagtcccatacgccggagagattcagcggtactggctgttacggtgcagccggaaatatcttcattgactcagggtgccattattgggaagtggtgatggggagctccacctggtatgctatagggatcgcctacaagagcgcacctaagaatgaatggatagggaagaatgcatcatcctgggtgttctcgcggtgtaactctaacttcgtggtgcgccataataacaaggagatgctcgtggacgtgccgcctcatctcaagcgtctgggcgtcctcctggactatgacaataatatgctatcgttctatgatccagcaaactcactacatctgcacacttttgacgtcacgttcatactccctgtctgccctaccttcaccatctggaataagtcactgatgatcctgtctgggctccccgcccccgattttatcgactatcccgagcgacaggagtgcaattgcagaccacaagagtccccctatgtgtcaggcatgaagacttgccactag

SEQ ID NO: 124407 - DNA, 2118 bp, synthetic construct
  misc_feature 1..2118: note = Description of Artificial Sequence: Synthetic coding sequence
  source 1..2118: mol_type = other DNA
atgggcgaatctccagcatccgtggtgttgaatgcctctggaggtctgttctcactgaaaatggaaacccttgaatccgaactgacatgccccatctgtctcgaactatttgaggacccactcctgctgccctgcgctcattcattgtgttttagctgtgctcatcgaatcctggtgagctcctgctcaagtggtgaatctatcgagccaatcacggcctttcaatgtcccacttgccgctatgtaatcagcctcaaccacagagggctcgacggattaaaaaggaacgtgactctgcagaatattatcgaccggtttcagaaagcgagcgttagtggcccaaattcacctagcgaaagtagacgggagagaacatatagacctacaacggcgatgagctctgagcgtatcgcttgccagttttgcgagcaagaccctccccgagatgcagtaaaaacctgtataacttgtgaagtcagctactgcgaccggtgccttcgcgccacccacccgaacaaaaaaccgtttacctcccaccggttggtcgagcccgtgccagacactcacctgcgcggaataacttgtctggatcacgagaacgagaaggtcaacatgtattgtgtgtcagatgaccagctgatttgcgcactttgcaaactcgtgggccggcacagggatcatcaggttgcttcattaaatgatagattcgaaaaactgaagcagacccttgagatgaacttgactaacctagttaagcggaacagcgaattggaaaaccagatggcgaagctgatccagatctgccagcaggtggaggtgaacaccgctatgcacgaagccaaattgatggaggagtgcgacgagctggtagagataattcagcagcggaaacagatgatcgcagtgaaaattaaagagacaaaggtgatgaagctgcgtaagttggcccagcaggtggcaaattgccgtcagtgccttgagcgcagcactgtattaataaaccaagccgagcacatcctgaaagagaacgatcaagcccgctttctacagagcgccaaaaatatcgcagaaagggtggccatggcaactgcctcgagccaagtattaatccccgatatcaattttaatgacgcctttgagaacttcgccctcgacttttcaagagaaaaaaagctactcgaggggctcgattaccttaccgcccccaaccctcccagcatcagggaagaactttgcaccgcgagccacgacactatcacagttcattggatatcagacgacgaattttctattagctcctatgaactgcagtacacaattttcaccgggcaggccaactttataagcctatataactccgtggattcctggatgattgtcccaaatataaaacagaatcattacacagttcacggattacagtccggaactaggtatatctttatcgtgaaagctatcaatcaggcgggctcccggaatagtgagcccacaagactcaagaccaacagtcagccatttaagctcgacccgaaaatgacacataagaagctcaagataagcaacgatggactgcaaatggagaaagatgaatccagtttgaagaaatcacatacaccagagcgattttccggcaccggctgttacggtgctgcaggaaacattttcatcgactcaggttgccactattgggaggtggtcatgggatcaagtacctggtatgccatcggaatagcctataagtctgctcctaagaacgaatggattggaaagaacgccagttcctgggtcttcagccgttgcaacagtaatttcgtggtgagacacaataacaaagaaatgctggtggatgtaccaccccatctaaaacgactgggggtgctgctcgactacgacaacaatatgctgtcattctacgacccagctaattccctgcacttacacacattcgacgtaaccttcattctgccagtgtgccccacctttacaatatggaacaagtccctgatgatcctgtctggccttcctgcgcctgattttatcgattacccagagcgccaggaatgtaactgccggccacaggagtccccctacgtatctggcatgaaaacctgtcattag

SEQ ID NO: 124408 - DNA, 660 bp, synthetic construct
  misc_feature 1..660: note = Description of Artificial Sequence: Synthetic coding sequence
  source 1..660: mol_type = other DNA
atggagacattggaaagcgagttgacatgtcctatctgcctggaactcttcgaggacccgctactcctcccctgtgcccattctttatgtttctcttgtgcccaccgcattctcgtgtcttcctgctcctccggagagtcaatagaacctatcacagctttccagtgtccgacttgcagatacgttatctcactgaatcatcggggccttgacggcctgaagagaaatgttacactgcaaaatatcattgacaggtttcagaaagcctccgtcagcgggccaaacagcccctccgagtcaagacgggagaggacttacaggcccacaacagcgatgagttccgagcgaatagcctgccagttttgcgagcaggatccgccgcgggatgccgtcaaaacttgtatcacatgtgaagttagttactgcgatcgctgcttgcgggctactcaccctaacaaaaaaccttttacatcccatcgattagttgagccagttcctgacacccacctgagggggattacctgcttagatcacgagaatgagaaagtgaacatgtactgcgtctccgacgatcagttgatatgcgccctgtgtaagctggttggtaggcacagggaccatcaggtagccagcctgaatgaccggtttgaaaaactgtag

SEQ ID NO: 124409 - DNA, 1407 bp, synthetic construct
  misc_feature 1..1407: note = Description of Artificial Sequence: Synthetic coding sequence
  source 1..1407: mol_type = other DNA
atggagccccaaccggggggagctaggtcctgccgaaggggggctcccggtggagcctgtgagctcggacccgccgctgaggccgcacctatgtctctagcgattcatagtacaaccggaacacgctacgatctggccgtgccccctgatgaaactgtggagggccttcgaaagcggctatcccaacgactgaaagtgcctaaggagcgccttgccctcctgcacaaggatacgagattgtcctccggtaagcttcaggagtttggtgtcggggatgggtcgaagctgaccctagtgcctaccgttgaagctggcttaatgagccaggccagcaggccagagcagtctgtgatgcaggccttagaatcactgacagaaacccaagtgtccgactttctgtcggggaggtcccccttaacgctcgctctgcgggtgggagaccatatgatgtttgtgcagctgcagctggctgcccagcatgccccactacaacaccgccatgtgctcgccgccgctgccgcggccgctgcggctcgaggggaccccagcatcgcctctcccgtgtccagtccttgcaggcctgtgtccagcgcagcgcgagtcccacccgttcctacctctccatcgcccgcctctccaagtcctatcacagccgggagctttcgttcacatgcagcatccacgacctgtcctgagcagatggactgtagtcccactgccagcagctcggcttctcccggggcttctaccacgtcaacccctggcgctagccccgcccctcgttcccgaaaaccaggcgccgtaatcgagtcgttcgtgaatcacgcgcctggagtcttctctggaacattctccggtaccctccatcctaattgccaggacagtagtggtcgccccaggcgggacatcggcaccatcctgcagatcctgaatgatctactgtccgctactcgccactatcaaggaatgccccccagcctagcacagctgcgctgccatgcgcagtgttcccccgccagccccgccccagacctggcgccacggaccactagctgcgaaaaattgaccgcagcaccatctgccagtctgctgcaaggtcagagccagatcaggatgtgcaaacctcctggagacaggctgcgccagacagagaaccgggcaacacgatgcaaagttgaaagactccaactgcttctccagcaaaaacgcctgcggcgcaaggcccgcagggatgctcggggcccctaccattggtcaccctctcggaaggccgggcgttcagactccagctcatcagggggtggagggagcccaagtgaggccagtggattgggtctggattttgaggactctgtctggaagcccgaggtcaatccagatatcaagtcagaatttgttgtcgcatag

SEQ ID NO: 124410 - DNA, 771 bp, synthetic construct
  misc_feature 1..771: note = Description of Artificial Sequence: Synthetic coding sequence
  source 1..771: mol_type = other DNA
atgggggagccatcccgggaagaatataaaatccagagtttcgatgcagaaacccagcaacttctgaagaccgccctcaaagtggcctgcttcgaaactgaggatggcgagtatagcgtctgccaacgatcctatagtaactgctccagactgatgcccagtaggtgtaatacccaataccgggatcccggagctgttgacctcgaaaaggtggccaacgtgatagtcgatcactccctccaggactgcgtgttttcaaaagaggctggaagaatgtgctacgcaatcatccaggccgagagcaaacaggctgggcagtccgtctttagaagagggcttctcaaccgcctacagcaggaatatcaggcccgggagcagctcagggcgagatctttacagggttgggtgtgctatgtgacatttatctgcaacatctttgactacctccgcgttaataacatgcccatgatggctttggtgaacccagtgtatgactgtttattcaggttagcccagcccgactcgctgagcaaagaagaggaggtggattgtttggtgctgcagctgcaccgtgtgggagaacagcttgagaagatgaacggtcaaagaatggatgaactgttcgtcctgatccgcgatggctttttgctgcccacaggcttatcttcactcgcccagcttctgctattagagatcatcgagtttcgagctgccggttggaagacaaccccagcagcccataagtactactactccgaggtgtcagattag

SEQ ID NO: 124411 - DNA, 669 bp, synthetic construct
  misc_feature 1..669: note = Description of Artificial Sequence: Synthetic coding sequence
  source 1..669: mol_type = other DNA
atgggagaaccgagcagggaggagtacaagatccaatccttcgacgctgagacacaacagctccttaaaaccgcactcaaagaccctggagctgttgacctggagaaagtggccaacgtgattgtcgaccattcccttcaggactgtgtattcagcaaggaagcaggaagaatgtgctacgctatcatccaggctgaaagtaagcaagctggacagtcagttttcaggcgcggactgctgaaccgcctgcagcaagagtatcaggcccgggaacagttaagagcccgtagtctccaggggtgggtgtgttacgtaacctttatctgtaacatctttgattacctccgtgtaaacaatatgcccatgatggccttagttaatccggtgtatgattgcctgttccgactcgcacagcccgattccctcagtaaggaggaagaggtggattgtttagtgctgcaattacacagggtgggagaacagctggaaaagatgaatggtcaacgtatggacgagctcttcgtactgatccgggatggatttctgcttcccaccggtttatcgtcactcgcccaactacttctgctggaaatcatagagtttagggcagccggatggaagaccaccccagccgcccacaagtactattattctgaggtctcggattag

SEQ ID NO: 124412 - DNA, 792 bp, synthetic construct
  misc_feature 1..792: note = Description of Artificial Sequence: Synthetic coding sequence
  source 1..792: mol_type = other DNA
atgggggagccctcacgtgaggagtataagatccagtccttcgacgccgagacccagcagttgcttaagaccgcccttaaggctccctccttagaatgcacagtcgcctgctttgagacggaggatggcgagtactcagtgtgtcagaggtcctactccaattgctcaaggttaatgccgtcccgctgtaacacccagtaccgcgacccaggagccgtggatctggagaaggtggctaatgtgattgtcgaccacagtttacaagattgcgtgtttagcaaggaagccggtcgaatgtgctacgctatcatccaggccgagagtaaacaggccggacagtcagtgttccgtaggggactgctgaaccgcctgcagcaggaataccaggcaagagaacagctcagggcacgatctctgcagggttgggtgtgctatgtcacctttatctgcaacattttcgactacctgcgcgtgaacaatatgcccatgatggccctcgttaatcctgtttacgactgtttgtttcgcctcgctcagcccgactcactatcaaaagaagaagaggtagattgcctggtgctacagctgcacagggttggggagcagctcgagaaaatgaatggccaacgtatggatgaactgttcgtgctcataagggacggcttcctgttgcccaccggtctctcctccttggcacaactgcttttactcgaaatcatcgagtttcgggctgcaggctggaaaaccacgcccgcagcacacaaatactattattctgaggtatctgactag

SEQ ID NO: 124413 - DNA, 1164 bp, synthetic construct
  misc_feature 1..1164: note = Description of Artificial Sequence: Synthetic coding sequence
  source 1..1164: mol_type = other DNA
atgcctaggcccagattacttgcggctctatgcggcgccctcttgtgcgcgccctccctgcttgtcgcactcgatatctgttctaagaatccctgccacaatggagggctctgcgaggagatatcacaggaagtgcgcggagacgtctttccgagctatacctgtacttgcctgaagggctacgctggcaatcactgcgagactaaatgtgtggaacctttaggtttggagaacggaaatattgccaattctcaaattgccgcctcttctgtgcgcgtgacctttctgggcctccagcactgggtgcctgagctcgctagactgaaccgggcaggcatggtgaatgcttggaccccctccagcaacgacgacaatccatggatccaagtaaacttgcttcggagaatgtgggtgactggagtggtgacccagggtgcctccaggcttgcatcacatgaatacctcaaggcatttaaagtggcatactcactgaacggacacgagttcgacttcatacacgacgtgaataagaagcacaaagaatttgtgggcaattggaacaaaaacgccgtacatgtaaatctcttcgagacgccggtagaggcgcagtacgtcagactttatcctacgtcttgtcacactgcctgtactttgcgctttgagctgttgggctgtgagctgaatggatgcgcaaacccgctgggcctcaagaataacagtatccccgataaacagataaccgcctcttctagctataagacctggggactgcatctcttttcctggaatccctcatacgcacgtctcgataaacagggcaactttaacgcgtgggtagccgggagttacggaaacgaccagtggttgcaagtggacctcggcagctccaaggaggtaactggcatcatcacgcagggggcacgtaactttggcagtgtgcagttcgtggcatcctataaagtggcttattcaaacgactccgcaaattggacagagtatcaggatcctagaacaggttcctcaaagatttttccaggtaactgggataatcatagccacaagaaaaacttgttcgagacccccattctggcgcgttatgtccgtattctcccagtggcatggcataatcggatcgctctacgccttgaacttttaggctgttag

SEQ ID NO: 124414 - DNA, 1140 bp, synthetic construct
  misc_feature 1..1140: note = Description of Artificial Sequence: Synthetic coding sequence
  source 1..1140: mol_type = other DNA
atgtggcctttcccggaaggaggtaataccatccccattctgcacaccgacatctgtagtaagaacccatgccacaatggcggcctctgcgaggagattagccaggaagtgcgcggcgacgtgtttccatcctatacatgcacctgcctgaagggatatgctggcaaccactgtgagaccaagtgtgtggagcccctcggcctggaaaatggcaacatagcgaactcccagatcgcagcatcctccgtgcgagtgacattcctgggcctacagcattgggtgcccgagctggcccggctgaatcgcgcagggatggttaacgcctggacgccttctagtaacgacgataatccctggattcaggtgaatctgctgagaagaatgtgggtgaccggcgtcgtgacgcaaggcgcctcccgactcgccagccacgagtatcttaaggcgttcaaggtggcttattcactgaatgggcatgagtttgatttcattcacgatgtgaacaaaaagcacaaggaattcgttggcaactggaataaaaacgctgtgcacgtcaatttgttcgagacacctgttgaggcacagtatgtgagactgtatcccacgagctgtcacaccgcttgtacgctgaggttcgagctgttaggctgtgaactaaatggatgcgcaaacccactgggtttgaagaataactcaattccagacaaacagattaccgcaagctcatcttacaagacttggggtctccacctgttctcatggaacccatcttacgccaggctggacaagcagggcaatttcaacgcctgggtggccgggtcatatggcaacgaccagtggctgcaggttgaccttgggtcctcgaaagaagtgactgggataattacacagggagccaggaacttcgggagtgtacaattcgttgccagttataaagtagcttatagcaacgacagcgctaattggactgaataccaagaccctcgaacaggcagtagtaagatcttcccgggaaattgggacaatcatagtcataaaaagaatctctttgaaacccctattctggcgcgctatgtgcgtatcctgccagtcgcatggcataacaggatagcccttaggctggaactcctggggtgctag

SEQ ID NO: 124415 - DNA, 1008 bp, synthetic construct
  misc_feature 1..1008: note = Description of Artificial Sequence: Synthetic coding sequence
  source 1..1008: mol_type = other DNA
atgccaaggcctagactcttggccgccctctgtggcgccctgctgtgcgccccatctttgctggtagccttagatatctgctcaaagaatccctgtcacaatggcggcctctgtgaagagattagccaggaagtccgaggggatgtttttccttcttatacctgcacctgcctgaaagggtatgccgggaatcactgtgagacaaagtgtgtcgagcccctcggcttggaaaacgggaacatcgccaattctcaaatagcagcctcctctgtgcgggtgaccttcctcggccttcaacattgggttccggagctggccaggttgaaccgcgctggtatggtcaacgcatggaccccatccagcaacgacgataatccctggatccaggttaatctactgagaagaatgtgggtgactggagtagtgacacaaggggcctcccgcctagcttcacatgaatacctgaaggccttcaaagtggcctactcgctcaatgggcatgaattcgactttattcatgatgttaacaaaaaacacaaggagtttgtgggcaattggaacaaaaatgccgtccatgtgaatctctttgagacccccgtggaggcacagtacgtaagactatacccaacctcctgccacaccgcttgcactctgcgcttcgagctcctgggctgcgagctaaatggatgtgccaatccgctcggccttaagaataatagcatccctgataagcagataactgcttcttcgagttataagacatggggattgcatcttttttcttggaacccatcatatgctaggttggacaagcaggggaacttcaatgcctgggttgctggatcctacggaaacgaccagtggttgcagatcttccctggcaattgggataaccacagtcacaagaaaaacctgttcgagacgccaattctagcccgatatgtgaggatcctgcccgtcgcgtggcacaaccggattgccctgcggttagagttgctgggctgttag

SEQ ID NO: 124416 - DNA, 1929 bp, synthetic construct
  misc_feature 1..1929: note = Description of Artificial Sequence: Synthetic coding sequence
  source 1..1929: mol_type = other DNA
atgccatgcggcgaggattggttaagtcatcctctcgggatcgtccaaggttttttcgcccagaatggcgtgaaccctgattgggaaaaaaaggtgatcgaatattttaaagaaaaactgaaggagaacaacgcacccaagtgggtgccatcactgaatgaggtccccctgcactatctgaagcctaactcttttgtaaaatttaggtgtatgatccaagacatgttcgaccccgaattttatatgggggtgtatgagaccgtgaaccaaaatactaaggctcatgtgttacacttcggcaaatatcgcgacgttgcagaatgtggcccccagcaagaactggatctcaacagccccaggaacaccacactggaaagacaaacattttattgcgtgcctgtgccgggggagagcacatgggtgaaggaagcttatgtgaacgctaaccaagcacgagtctcccctagtacgtcttatactccaagtcgacacaaacgaagttacgaggacgatgatgacatggacttgcagccaaacaagcagaaagatcagcacgcaggcgcccggcaggctggttctgtggggggccttcaatggtgcggagagcctaagcggctggagactgaggcaagtaccgggcagcagttgaatagcctaaacctttccagcccatttgacttaaacttccccctcccaggtgaaaagggtcccgcctgtctcgttaaggtctatgaggactgggattgtttcaaggtcaatgatatactcgaactatatggtattctgtctgtggaccctgtcctgtcaattctaaataacgatgagagggacgccagtgcactgctggaccccatggaatgtacggacacagccgaggagcaaagagtccatagcccaccagcctctttggttccacgcatccacgttattttggctcaaaagctccaacacatcaatcccctgctgcctgcctgcctgaacaaagaggagagcaaaacttgcaagtttgtcagcagctttatgtctgagctgagcccagtgagggcggagctgcttgggttcttgactcatgccctgctgggcgattccctggcggccgagtatttgatcctccacctgatcagtaccgtctacaccagacgagatgtcctgccactgggtaaattcacagtaaacttgagcggttgtccccggaatagcacctttaccgagcatctgtatcgcataattcaacaccttgtcccggcgagcttccggctgcagatgacaatcgaaaacatgaatcacctgaaattcattccacataaagattacaccgccaacaggctcgtgagtggcctgctccaactgccttctaatacatctctcgttatcgatgagacgctgctggaacaagggcagctcgacacgcctggagtgcacaacgtaaccgccctttccaacctgataacctggcagaaagtagattatgatttctcataccatcagatggagtttccatgcaacataaacgtgtttatcacatcagaggggcgttcactgctgccggccgattgtcagattcatctgcagccccagctcattcctccaaatatggaggagtacatgaatagcctgttgtcagctgtacttccatccgtcctaaacaaattcaggatctatctcaccctgctgcggtttctagagtattctatctctgacgaaatcaccaaggccgtagaggatgacttcgttgagatgagaaaaaacgacccacaatcaattaccgctgatgaccttcatcagttgttggtagtagctaggtgtcttagtctctccgcgggacagaccaccctttcccgcgaacggtggctgcgtgcgaaacagttggagtccctgagaaggacgagactccaacagcaaaagtgcgtgaacggtaacgaactctag

SEQ ID NO: 124417 - DNA, 1923 bp, synthetic construct
  misc_feature 1..1923: note = Description of Artificial Sequence: Synthetic coding sequence
  source 1..1923: mol_type = other DNA
atgccctgcggggaggattggctgtcacaccccctcggcatcgtgcaagggttcttcgcccagaacggcgtgaaccccgactgggagaaaaaagtaattgaatatttcaaggagaaacttaaggagaataatgcccccaaatgggtgcctagtttgaatgaggtgccacttcattacctgaagcctaactctttcgtcaagtttaggtgtatgattcaggatatgttcgaccccgagttctacatgggcgtgtacgagactgttaatcagaacactaaagcccatgtcctgcacttcggcaaatatcgagacgtggctgagtgcgggccgcagcaggaactagacctgaattccccgagaaacacaacacttgaacggcagactttttactgtgtgcccgtgccgggggagagcacttgggtgaaagaggcatatgtgaacgctaaccaggcacgggtgagtcctagcaccagttataccccgtctcgtcacaaaagatcttatgaagatgatgacgatatggacctccagcctaataaacagaaggaccaacatgccggtgcccggcaggccggctcagttggaggtcttcaatggtgcggcgagcctaagcgtctggaaacagaagcttcaactggtcagcagctaaactcgctcaatttgagttctcctttcgacctcaactttcctctaccgggtgagaaagggccagcctgtttggtgaaagtgtatgaggattgggattgttttaaagtcaacgacattttggaattgtatggaatcctctctgtggaccccgtgttaagtatcctgaataatgacgagagagacgcctctgcacttcttgatccaatggaatgcacagacacggcagaagagcagagagtgcactccccccccgctagtttagtgcctcggattcatgtaatcctcgcccagaagctgcaacatatcaatcctctactgcccgcctgcctgaataaggaagagtcaaagacctttgtgtcctcattcatgtcggagctgagtcccgtgagggcggagctcctcggatttcttacccacgctctgttaggcgattctttggcagcggagtacttgattctgcacttgatatctacagtctacactaggagggacgtcctgcctctaggcaaatttaccgtgaatctatcgggttgccctaggaacagcacatttaccgagcacctgtataggatcatccagcatttagtaccagccagttttcgcctacagatgaccatcgaaaacatgaatcatctcaagttcatccctcacaaggactatacggcgaacaggctcgtgtcaggcctcctccagctgccaagtaatacaagtttagttatcgacgaaaccctcctcgagcagggccagctggatacccccggggtccataatgtaacagcacttagcaacctgattacctggcagaaggtggactacgatttctcctaccaccagatggaattcccttgtaacattaacgtgttcatcacttccgagggcaggagcctgctgcctgccgattgtcagatccatctccaaccgcaactgattcctcctaacatggaagagtacatgaattctctcctgtcagcagtactgccttctgtactgaacaaattccgcatctacctgaccttgctccgatttctagagtattcgatcagcgatgaaatcactaaggccgtcgaggatgacttcgtggaaatgcgaaaaaatgacccgcagagtataactgccgacgacttgcaccaactccttgtggtggcccggtgtctgtctttgtcagccggccaaactacactgagtagagagcgctggctccgggctaaacagctcgagagtctccgccgcactcgtttgcagcagcaaaagtgcgtaaacggaaacgaactctag

SEQ ID NO: 124418 - DNA, 2628 bp, synthetic construct
  misc_feature 1..2628: note = Description of Artificial Sequence: Synthetic coding sequence
  source 1..2628: mol_type = other DNA
atggatgaggaggaggacaacctgtccttattaaccgctctgttagaggagaatgaatcagcactcgactgcaattctgaagagaacaactttctcacgcgcgaaaatggtgagcccgacgcatttgatgagctgttcgatgcggacggcgacggagagtcctatacagaggaggcagacgatggggaaaccggtgagaccagggatgagaaggaaaacctggctacacttttcggagacatggaagaccttactgacgaggaggaagtgcctgcctcgcagtccacagaaaatagggtgctgcctgcccccgctccgaggagagagaaaaccaatgaggagctccaagaagagttgcgaaatttgcaggagcagatgaaagcgctgcaggagcagcttaaagtgacaaccatcaagcagaccgcatctcctgctcgcctccagaagagccccgtcgagaagtctccgaggccgccactgaaggaacgaagagtgcagcgaatccaagaaagtacctgtttctccgccgagctcgatgttccagctttgccgcgcaccaagagggtggcgagaaccccaaaggcttcacctcccgatccaaagagctcatccagcagaatgacttccgcacccagccagccactgcaaaccatctccagaaataaaccaagtggcatcacgagaggccagatcgttggcacgccaggttcttccggtgagactacccaacccatctgcgtcgaggcgttttctgggcttcgtctgcgaagaccaagggtgtcctcaactgaaatgaataagaagatgactggacggaaactgatccgcctctcccagatcaaagagaagatggctagagagaagctggaggagatcgattgggtcacatttggggtaatcctcaaaaaagtcacaccacagtctgtgaactcaggtaagactttcagtatctggaagctcaacgaccttagggatctgacgcaatgtgtgtccttgttcctgttcggggaagtgcacaaagccctgtggaaaaccgagcagggcaccgttgtgggaatcttaaatgcaaacccaatgaagcccaaagacgggagcgaggaggtatgcctttccatcgaccatccacagaaagtcctgatcatgggtgaggctctcgacctaggtacatgcaaagccaaaaaaaagaatggcgagccttgcacacagaccgtgaacctgcgtgactgtgagtattgccagtaccatgtccaggcccagtacaaaaagttgagtgcaaagagggctgacttgcaatcaactttctccggggggaggatccctaaaaagtttgcgaggaggggcacatctttgaaggagcgcctgtgtcaggatggattctattacggaggagttagctctgcctcttacgccgcatccatagctgctgcagttgcacctaaaaaaaagatacagactactctgtctaatctcgtagtcaaaggaactaacctcatcatccaggagactcgccagaaattgggcatcccccaaaaatctttaagctgcagtgaggaattcaaggagctgatggacctgccaacatgcggggcacggaacctgaaacagcacctggccaaagccactgcctctggaatcatgggcagccccaaacccgccattaagtccatcagcgcctcagcacttttgaagcagcagaaacagaggatgctcgagatgaggcgcaggaagtccgaagaaatccaaaaaaggtttctgcagtcatcaagcgaggtggaatcccccgctgtcccttcgtcttctcggcagccccccgctcagccgcccagaactggcagtgaattcccgcgtcttgaaggtgcgccagcaacaatgaccccaaaacttggacgtggtgtgcttgagggagacgatgtcttgttttacgatgaatctccgcccccccgtcccaaactgagtgcacttgccgaagctaaaaaactggccgccatcacaaagcttcgagctaaaggccaggtcctgactaagaccaatcccaatagcatcaagaagaagcagaaagatcctcaagacattctggaagtaaaggagcgtgtggaaaagaataccatgttttcctctcaggccgaggacgaacttgagcctgcacgcaaaaagcggagagaacagctcgcctatctggaatcagaggaatttcagaagatcctgaaagccaagagcaagcataccggcatcctgaaagaagcagaagcagagatgcaggaacggtactttgaaccactcgttaaaaaagaacagatggaggagaaaatgagaaacatccgggaagttaagtgcagggtggtcacgtgtaaaacatgcgcatatacccactttaagctcctcgagacttgtgtgagtgagcagcacgagtaccactggcacgatggagtcaagagattcttcaaatgcccatgcggcaaccgttctatttccttggataggctgcccaacaagcactgtagcaactgcggcctatacaaatgggagagggatggaatgttgaaggagaaaactgggcccaagatcggcggagaaactctgcttccacggggagaggaacacgccaaattcttgaacagtctgaaatag

SEQ ID NO: 124419 - DNA, 2568 bp, synthetic construct
  misc_feature 1..2568: note = Description of Artificial Sequence: Synthetic coding sequence
  source 1..2568: mol_type = other DNA
atggacgaagaggaggacaatctgagtcttctgacggccttactagaggaaaacgagtcagcgttggattgcaactcagaagagaacaacttcttgacaagagaaaatggagagccggatgcgtttgacgaactgttcgacgctgacggagacggggaaagctatacagaagaggcggacgatggtgaaacaggggaaacacgagacgaaaaggagaatctggcaactttattcggggatatggaggacctgacagatgaggaagaagtgccggcctcccaatcaacagagaacagggtgttacctgccccagccccacggcgcgaaaagacgaatgaagaactgcaggaagagctccggaacctgcaggagcagatgaaggcattacaagaacaactgaaggtgaccaccattaaacagaccgcctcacccgcaagattgcagaagtcccccgagaaatcaccccgtcctcctctgaaagagagacgagtccaacggatccaagagtccacatgcttttcagccgaactagacgtaccagctctgcccaggacaaagcgagtcgcaagaaccccgaaggcttcaccccccgacccgaagtcgtcgagttctcgcatgacctccgctccctctcagccactgcaaaccatctccaggaataagccctcagggattacaagaggccagatcgtcggcactcccgggagctcaggagagactacccagcccatttgtgtagaagcctttagcggcctccgcttgagacgcccccgcgtgtccagcactgagatgaataagaagatgactggacggaagctcattagactgtcccagatcaaggagaaaatggcaagggagaagcttgaggagatcgactgggtgaccttcggggtcattctaaagaaggttacaccacaaagcgtaaattccggcaagacattctccatctggaagctcaatgacctgcgtgacctgacgcaatgcgtgtccctgttcctgtttggagaagtgcacaaggcgctgtggaagactgagcagggaaccgtggttggaatcctgaacgcaaaccccatgaaacctaaagatggctctgaggaagtctgcctctctatcgaccatccccagaaggttttaattatgggtgaggctctcgatcttggaacgtgcaaggctaaaaaaaaaaatggtgaaccttgtactcagaccgttaatctgagagactgtgagtattgccagtaccacgtgcaggcccaatataagaagctgagcgccaagcgcgccgacctccagagcacctttagcggcggtaggattcccaagaaatttgctaggaggggaacctcactgaaagagaggctgtgccaggatggcttctattacggcggggtgtcttccgcaagttatgctgcaagcattgcagcagctgtcgctccgaagaagaagatccagacaacactcagcaacctcgttgtcaaggggaccaatctgattatccaggaaacaaggcagaaactgggaattcctcagaagtcactcagctgctcagaggaattcaaggaacttatggatctgcccacatgtggggcacgcaatctaaaacagcacctggcaaaggcaacggccagcggaattatggggtctccaaagcctgccattaaatccataagcgcttccgccttgctgaagcagcagaaacagaggatgctggagatgagacgcagaaagtcagaagagattcagaagcgcttccttcagagttctagcgaggtggagtccccagctgtcccatccagctctcggcagcctcctgcccaacctccccgcacagggagcgagttcccccgccttgaaggcgcgcctgctacaatgacaccgaaattggggcgcggcgtactagaaggggatgatgtcttattttacgacgagtccccacctccacggccgaagctcagcgccctggctgaggctaaaaagttggcagctattacaaagctgagggcgaaggggcaagttttgacaaaaaccaacccaaactctataaaaaaaaagcagaaggaccctcaagacatcctagaggtgaaagagcgggtggaaaagaatactatgttcagtagtcaggcagaagatgaactcgaacctgccagaaagaagcgtcgagaacagctcgcgtatctggagtccgaggaattccagaaaattctgaaagcaaagagcaagcacacgggcattcttaaggaggcagaggcagagatgcaagaaaggtactttgagcctctggtaaagaaagagcagatggaggaaaagatgcgtaatatacgggaggtgaagtgtcgcgttgtgacatgtaagacctgcgcatacacccatttcaaattgctcgagacctgcgtaagcgagcaacacgagtaccactggcatgatggtgtgaaaaggttctttaagtgtccgtgtggaaatcgttcaatttctctagaccgccttccaaataaacattgctctaactgcggtctctacaaatgggagagagatggtatgctgaaggtctgccacctgcgaacgaacttttag

SEQ ID NO: 124420 - DNA, 2625 bp, synthetic construct
  misc_feature 1..2625: note = Description of Artificial Sequence: Synthetic coding sequence
  source 1..2625: mol_type = other DNA
atggacgaggaagaggacaacctcagcctgctgactgccctgctcgaggaaaatgagtccgcactggattgcaattctgaggaaaataactttctaactcgcgagaacggagagcctgacgcttttgacgaactgtttgacgcagatggtgacggagaatcttatacagaagaggccgacgacggcgagaccggggagacccgggacgagaaagaaaatctcgccaccttgttcggggacatggaggaccttacagatgaagaggaggtgccggcaagtcagagcacagagaatcgggtgttgccagcgcctgcaccacgccgagagaagaccaacgaagaattgcaagaggaactcaggaatttgcaggaacaaatgaaggcccttcaggagcagctgaaggtgaccactataaagcagaccgccagtccagcgcgcctacagaaaagtcctgaaaagagcccgcggccacctctgaaggagcgccgcgtgcaaagaatacaagagtccacatgcttttcagccgagctggatgtgccggctttgccccggaccaagagggtcgctagaactccaaaggctagcccccctgaccctaagtcctccagctctaggatgacctcagcccccagccagccacttcagactatttcccgtaataagccttctggcataactagagggcaaatcgtcggtaccccaggttctagtggcgagacaacacaacctatctgcgtggaagcatttagcggcctcaggctcagacgcccccgggtgagttccaccgagatgaacaagaaaatgaccggtaggaagctgatacgtctttctcaaatcaaggaaaaaatggcccgggagaagttagaggaaattgattgggtcacctttggcgtcattctgaagaaggtcacccctcagagcgtaaatagcgggaagacgttctccatttggaaacttaatgacttacgggatctgactcagtgcgtgtccctatttttgtttggagaagtccataaggcactgtggaagactgaacagggcacagtcgtaggcatcctaaatgcgaatccgatgaagccgaaggacgggagtgaagaagtgtgcctctctattgatcacccacagaaagtgctgatcatgggtgaagcactggatttgggcacctgtaaggccaaaaagaagaatggcgagccctgtacacagaccgtcaatctgagggattgcgaatattgtcagtaccatgtccaggctcagtataagaaactgagcgcgaagcgcgctgatctgcagagtactttcagtggcgggcggattcctaaaaagtttgcacggagaggcacctccctgaaagagcggctttgtcaggacggcttctattacggtggcgtcagctcagccagctatgccgccagcattgccgccgccgttgcgccaaaaaagaaaatacagactaccctatcaaatctggttgtgaaggggaccaatctcatcattcaagagacacggcagaagctgggtattccccagaaatcattgtcctgcagcgaggaattcaaagaacttatggatctccccacctgcggagccaggaatttgaagcagcacctggcgaaagcgacagccagtggcattatgggttcaccgaaacctgctatcaagagcatctccgcctcagcactgctgaaacagcagaagcagcgcatgctcgagatgcgaaggcgcaaaagcgaggagattcagaaacgctttctgcagagttcatccgaagtggagagtcccgccgtcccgtccagcagccggcagccccctgcccaacccccaagaactggaagcgagtttccacgactagagggcgccccggcaactatgacacctaagcttggcagaggagtgctcgaaggagatgatgtcctattctacgatgagagccctccaccacggccaaaactaagcgcattggctgaggccaagaaactggccgccataacaaaactccgcgccaaaggccaggtgttaaccaaaaccaatcccaactccattaagaagaaacaaaaggatccccaagacatcctggaggtaaaagagagggtggagaagaataccatgttcagcagccaggccgaagacgaactcgaaccagccaggaagaaacgtcgtgaacagcttgcatacctggaaagcgaagaatttcaaaagattctcaaagccaaatccaaacacaccgggatcctcaaagaggcggaggccgaaatgcaagagcgttacttcgagcctctggtgaaaaaggagcagatggaagagaaaatgcggaacattagagaggtgaagtgtagagtggtgacatgcaaaacgtgtgcttatacccactttaagttgctggaaacctgcgtttcagagcaacacgagtaccattggcacgatggcgtcaagcggttcttcaagtgcccatgtggtaatcgctccatcagcctcgatcgactgcctaataaacattgtagcaattgtgggctctataaatgggaaagagatggaatgttgaaggagaagacagggccaaaaattggtggcgagaccttgctgcccaggggcgaagagcatgcaaaatttcttaattcgctcaaatag

SEQ ID NO: 124421 - DNA, 2628 bp, synthetic construct
  misc_feature 1..2628: note = Description of Artificial Sequence: Synthetic coding sequence
  source 1..2628: mol_type = other DNA
atggatgaggaagaagataacttaagtctgctgaccgcattgcttgaagagaatgagagcgcgctcgattgtaattcagaggaaaacaacttccttacgcgggagaatggcgaaccagacgcttttgacgaattgtttgatgctgatggtgacggcgaatcctatacagaagaagctgatgacggtgagaccggggagacccgggatgaaaaggagaacctcgccacgctgtttggcgacatggaggacctgactgatgaagaggaagtgcccgcgtctcaatctaccgaaaaccgggtcctccccgctccagcccctcgtcgtgagaagacgaacgaggaactccaagaagaactcaggaaccttcaagaacagatgaaagctctccaggaacagttaaaagtcacgaccatcaagcagacagcatctcccgcccgactgcaaaagtcacccgtagagaagtcaccaagaccaccacttaaggaaagaagggtgcagcggatccaggagagcacctgtttttctgctgagctggatgtccctgccctcccaagaacaaaaagggtggcccgtacccctaaggcatcacccccagatccaaagtcgagctcttcaaggatgacgagcgctccatcccaacccctgcagaccattagtcgcaacaagccatctgggattacacggggccagatcgttgggacacccggaagctcaggcgaaacaacacagccgatctgcgtggaggcgttttctggactgcggctaagacgaccgcgcgtcagttctacagaaatgaacaaaaaaatgactgggcgcaagctaatccgcttgtcccaaattaaagagaaaatggccagggagaaattggaagagattgattgggtcaccttcggtgtcattctgaaaaaagtgaccccccagtctgtgaattccggcaagaccttcagcatttggaaactgaacgacctgcgtgaccttactcagtgtgtctcacttttcttgttcggcgaggtgcacaaagcactgtggaaaaccgagcaggggacagtggtgggcatcctgaatgccaatcctatgaaacctaaagatggcagtgaagaggtctgtttatctatcgatcatcctcagaaggtgctcatcatgggggaagccttggacctggggacctgcaaagccaagaagaagaacggggaaccatgtacacagaccgtgaatttgcgtgactgcgagtattgtcaataccatgttcaagctcaatataaaaaactctccgccaagagagctgacctgcaaagtaccttcagcggcgggcggatcccaaaaaaattcgcccgtcggggcacctctctcaaagaaaggttgtgccaggacggtttttattacggcggcgtaagcagcgcgagctacgctgcctccatcgccgccgcagtcgcccctaagaagaaaattcagactaccctgagcaacctggtcgtcaaaggtactaaccttatcatccaggaaacaagacagaaactaggcattccgcagaaatctcttagttgcagcgaggagttcaaagagctcatggacctcccgacatgcggcgcaaggaaccttaagcagcacctggccaaggcaacagccagtggcattatggggtccccaaaaccagccatcaagagcatttctgcctctgctctattgaagcagcagaaacagcggatgttagaaatgcgccgcagaaagagtgaggagatccagaagaggtttctccaatcttctagtgaggtggagagtcccgccgttcccagctcgtcaagacagccccccgcccagcctcctaggactggcagcgagtttccccgcttggagggcgcccctgccactatgactcctaaattgggaaggggtgtgttagagggcgacgatgtactgttttacgacgagtcaccgcctcctaggccgaaattgtccgcgcttgcagaagccaaaaaattggccgctataaccaagttacgggcaaaaggccaagtgttgacaaagaccaaccccaacagcattaagaagaagcagaaggatccccaagatattctcgaggtgaaggaaagagttgagaagaataccatgttctcttcccaggccgaggatgaactggagcctgccaggaaaaagcgtcgagagcagttggcctatttagagtcagaggagttccaaaaaatcctcaaggccaaatcgaagcatactggcattctgaaggaggccgaagctgagatgcaggagcgctactttgagcctctggtgaaaaaagagcagatggaggaaaaaatgcgcaatattcgggaggtgaagtgtcgagttgtcacatgcaaaacatgcgcgtacacccacttcaagctgttggaaacctgcgtgagcgaacaacacgagtatcactggcatgatggggttaaacgcttcttcaagtgtccatgcggcaaccgcagcatttctttggatagattgccgaataagcattgctcaaattgcggtctgtacaagtgggaacgggatggcatgttgaaggagaaaaccggtcccaaaatcgggggtgagaccctgctgcctagaggcgaagagcacgcgaaattcctcaactccttgaagtag

SEQ ID NO: 124422 - DNA, 2466 bp, synthetic construct
  misc_feature 1..2466: note = Description of Artificial Sequence: Synthetic coding sequence
  source 1..2466: mol_type = other DNA
atggatttggcagcagctgcagagccgggagcgggtagtcaacatctggaggtgagagatgaggtcgccgagaagtgtcagaaactcttcttggatttcctcgaagagttccaaagtagcgatggcgagataaaatacttgcagctggcagaagagctgattcgtccagagcggaataccctggtcgtgtctttcgttgatctggagcagttcaatcagcagttaagcactacaatccaggaggaattctatcgcgtttacccttacctgtgtagagccctcaagacattcgtgaaagaccgaaaggaaatccctctggccaaggacttttacgtggccttccaggatttgccaacccgacacaagattagggaattgacttcctccaggatcggcctcctgacacggatttctggtcaggtggtgcggacccacccggtgcaccccgagcttgtgtctggcacattcctttgcctggactgccaaacggtgattcgggacgtggagcagcagtttaaatacacccagcccaacatctgtaggaacccagtttgcgctaaccggagaaggttcttgctagatactaataagagtaggttcgtcgacttccagaaagtgagaatccaagagacgcaagcagaactgccccgagggtccataccacggtcattggaggtgattctcagggcagaagcagtcgagtctgcacaggctggagataagtgcgactttactggcacgttaatcgtcgtccccgatgtgagtaaattgtccacacccggtgctagagcagaaacaaattccagggtttcaggcgtggatggatatgagacagagggcattcgtggactgcgcgcattgggcgtgagagacctatcctatcgcctcgtgttcctcgcttgttgcgttgctcctacaaatcctaggttcggcggcaaagagctccgcgatgaggagcagacagccgaatccatcaaaaaccagatgaccgttaaggagtgggaaaaagtgttcgagatgtcccaggacaagaatctttaccataatctgtgtacctcccttttccccaccatccacgggaatgacgaggtcaagcgcggcgtgctgctgatgctcttcggaggcgtccctaaaacaaccggcgagggcacaagcctgcgaggagatattaatgtgtgcatcgtgggggatccatctacagcaaagtcacagtttctgaaacacgttgaggaattcagccctcgcgccgtttacaccagtggcaaggcctccagcgccgcggggttgactgccgccgtggtgagagatgaggaaagccacgaattcgtgatcgaagcaggcgcattgatgctcgcagacaatggcgtgtgttgtatcgatgaatttgacaaaatggacgtgagagaccaggttgccatccatgaggccatggaacagcagactatatccattacaaaggccggagtgaaggcaaccctgaacgcccggaccagcatcctggctgccgccaatcccattagtggacactacgaccggtctaaatcattaaaacagaatataaacctgtccgcacccatcatgtctcggttcgacttatttttcattctggtcgatgaatgcaacgaggtaacagactatgccattgctcgaagaattgtcgacctgcactctcggattgaggaatctattgaccgagtatattcgcttgacgacatcaggcgatatttgctgtttgcaaggcagttcaaaccaaaaatcagcaaggaaagtgaagacttcattgtggaacagtacaaacacctgagacagcgggatggctctggtgtgacaaaatccagctggcgtattacagttcggcagctggaatccatgatccggctctccgaggccatggcccgcatgcactgctgtgacgaagtgcagcctaagcacgtcaaggaggctttccgattattgaacaaaagcattatacgggtggagacccctgatgtgaatcttgatcaggaggaggagatccagatggaagtggacgagggtgccggcgggattaacggacacgccgattccccggctcccgtgaacggtattaatggatacaatgaggacatcaaccaggagagtgcccctaaggctagcctccgactgggcttttccgagtactgtcgaattagcaatctcatagtgctgcatctccggaaagtcgaagaagaagaggacgaaagcgccctgaaacgctctgagctcgtgaattggtatttgaaagagattgaatccgagatagactcagaggaggaactgattaacaagaaaaggatcatagagaaggtgatccatcggcttacacattatgaccatgtactcatcgagctcacccaggcgggcctcaagggatccaccgagggttccgaatcatacgaggaggacccatatctggtagtgaatccgaactacctgcttgaggattag

SEQ ID NO: 124423 - DNA, 2160 bp, synthetic construct
  misc_feature 1..2160: note = Description of Artificial Sequence: Synthetic coding sequence
  source 1..2160: mol_type = other DNA
atggcactgaaggattacgctctcgaaaaagagaaagttaagaaattcctgcaggaattttaccaggatgacgaactggggaagaagcaattcaagtacggcaaccagctggtgcgactggcacacagggagcaggtagcgctctacgtggatctcgacgacgtcgctgaggacgacccagaactggttgattccatatgtgagaacgcaaggcggtacgccaagctgtttgcagatgctgtccaggaattgcttccccagtacaaggagcgggaggtggtcaataaagacgtacttgacgtgtacatagagcaccgccttatgatggaacaacgctctagggatcctggcatggtcagatcaccccagaaccagtatcccgctgagctaatgcggcgatttgaattatacttccaggggccttcctcgaacaaaccccgggttattagagaagtaagagctgactcggtgggcaaattagtgacagtgcggggtatcgttacacgcgtttccgaggtaaagcctaaaatggtggttgcaacctacacgtgcgaccagtgcggcgccgaaacctatcaacccatccagtcgccaacattcatgcccctaataatgtgccccagtcaggagtgccagacgaacagatcaggagggaggctgtacctccaaacccgcggttcccggtttatcaagttccaggaaatgaaaatgcaggaacattcagatcaggtccccgtcgggaatattccgcgcagcattacggtgttggtggaaggcgagaacacccggatcgcccagcctggcgaccatgtgtctgtgacaggcatcttcctcccgattctaaggacgggctttcgacaagtggtccagggcctcttgtctgagacttatttggaggcacacaggattgttaagatgaataaatccgaagacgatgagtccggcgccggagagctaacacgggaggaactcaggcagatcgcggaggaggacttttacgagaaactggccgcttcgatagctcccgaaatttacggacacgaagacgtgaagaaggctctcctgttgctcctggttggcggggttgaccagagccccagaggaatgaaaataagaggcaatattaacatctgcctcatgggcgacccaggggtcgcaaagagccagctgctgtcatacatcgatcgcctcgcccctcgatctcagtacaccacgggccgagggtctagcggcgtggggctgaccgcagctgtgttgagggacagcgtcagcggagaattgactctcgaagggggagcattggttctggcagatcagggcgtctgttgcatcgatgaatttgacaagatggccgaagcagataggactgccattcacgaggttatggagcagcagaccatctcgatcgctaaggccgggatccttactacactgaacgcccgctgctctatattggcggccgctaatcccgcatatggccgttataacccgaggcgcagcctggagcagaacatccagttgccagcggctttgctgagcagattcgatctgctgtggcttattcaggacagaccagatcgggataacgatttgcgcctggcacagcatataacctatgtgcatcagcacagtcgccagcctcctagtcagttcgaaccgctggatatgaagctaatgcgcagatatatagccatgtgccgtgagaaacaaccaatggttccagagagtctcgctgattatatcacggccgcctacgtggaaatgaggagagaggcttgggctagcaaagatgcgacgtacacgtccgctcgtaccctcttggcaattttgagattgtcgaccgctctagcacggctgcggatggtggatgtcgtggagaaggaagacgttaacgaagcaattaggctgatggagatgtctaaggactccctgctcggcgacaagggacaaacagctcgcacacaacggcccgctgacgtcatctttgctaccgtgagagagttagttagtggtggtcggtccgttagatttagcgaggccgagcagagatgcgtttcgcgggggtttacaccagcgcagttccaggctgctctcgacgaatatgaggaactgaacgtgtggcaggttaatgcgtctcgcacacggattacctttgtatag

SEQ ID NO: 124424 - DNA, 1170 bp, synthetic construct
  misc_feature 1..1170: note = Description of Artificial Sequence: Synthetic coding sequence
  source 1..1170: mol_type = other DNA
atggcactcaaggattatgctctggagaaggagaaagtcaagaagttcctgcaggaattttaccaggatgacgaactgggcaaaaagcagttcaaatacggcaaccagttggttcgcctcgctcatcgggaacaggtcgccctttacgtcgatttggatgacgttgctgaggacgatcccgaattggtcgatagtatctgcgaaaacgccagaaggtacgctaaactgtttgccgatgcggtccaggaactcctgccacagtataaagaacgagaagttgtcaataaggatgtgctcgacgtgtatatcgagcaccgtctcatgatggaacagcgttccagagaccccggaatggtcagaagtcctcagaatcagtacccagcagagctgatgcggcgcttcgaactctactttcagggccccagcagcaacaagccgcgggtcatccgtgaggtgagagccgactcggtgggcaaacttgtgaccgtgcgggggattgttacccgagttagcgaggttaagccgaagatggtggttgcaacatacacatgcgaccagtgcggcgccgagacctatcagcccatacagtcaccaaccttcatgcccctgatcatgtgccccagccaagagtgccaaaccaaccgcagtggggggcgcttgtacctgcagacccgtggttcacgcttcatcaaattccaagagatgaagatgcaagaacactccgatcaggtgcccgtcggtaacatccctcgctcaatcacagtgctggtggaaggtgagaacaccaggattgcccaacccggcgaccatgtgtccgtgacggggatcttcctcccaatcctgcggacgggctttagacaggtggtacaaggactgttgtctgaaacatacctggaggctcaccgcatagttaagatgaataaatctgaggacgatgaatctggggctggagaactgacgagggaggaactccgccaaattgcggacgtgatctttgcaacagtccgggagctagtatccggtggtcgaagcgtaagattctctgaagctgaacagcgttgtgttagtagaggattcacacctgctcagttccaggcggctcttgacgagtacgaggaactgaatgtatggcaagtgaacgcttctcgcacacgcatcacttttgtctag

SEQ ID NO: 124425 - DNA, 1632 bp, synthetic construct
  misc_feature 1..1632: note = Description of Artificial Sequence: Synthetic coding sequence
  source 1..1632: mol_type = other DNA
atggtcgttgcaacttacacatgcgaccagtgcggtgccgagacctatcaacccatccagtccccgacgtttatgccactgattatgtgcccatctcaggaatgccagacgaacagatctggcggtcgcctgtacttgcagacaagaggatctaggtttatcaaattccaagagatgaagatgcaggaacactctgatcaggtgcctgtcgggaatataccgagatcaataaccgtcctggttgaaggggagaacacaaggatcgcacagcctggtgaccacgtgagtgtaaccggaatattcttgcctatcttaagaaccgggtttaggcaagtggtgcagggcctcctgagtgagacatatctggaggcccatcgcattgtcaaaatgaataagagcgaggatgacgagagcggcgcgggagaactcactcgcgaggagttgcggcagatcgcagaggaagatttctatgagaagctcgctgccagtatcgccccagagatctatggtcacgaagacgtcaagaaagccctgctgctgctgctcgtcggcggcgtggaccagagtccgcgcgggatgaagattcggggaaacattaatatctgcctgatgggggatcccggggtggcgaaatctcaattactgtcttacattgatcgtctggccccaagatcccagtacaccacggggcgcggttcatcaggcgtaggcctcacggcggccgtgctgcgagatagtgtaagcggtgaactcacacttgagggcggcgccctggtgttggccgaccagggagtgtgttgcattgatgagtttgataaaatggctgaggctgatcgcaccgcaattcacgaggtcatggagcagcaaactattagcatcgccaaagcaggtatccttacaaccttgaatgctaggtgcagcattctggccgcggcgaatccagcttatggtagatacaatccacgccggtcgttagagcaaaacattcagttacccgcagctctcctgtctcgcttcgacttgctctggctgatccaggataggcccgatcgagacaatgatctgagacttgcacagcatatcacgtatgttcaccagcacagtcgtcagccgccatctcagtttgaacctctggacatgaaattgatgagacggtatattgctatgtgcagagaaaagcagcccatggtgccggagtcccttgctgactacataacggccgcctacgtggagatgagaagggaggcttgggccagcaaagacgccacttatacgagcgcacgaacgctgttagcaatcctgcggctgtctacagccctcgcaaggttgagaatggtggatgtggtcgagaaggaggatgtcaatgaagccatccggctgatggaaatgtctaaggattctctgctgggggataaaggacagactgcccgcactcagaggccagccgacgtcatctttgcaaccgtccgggaattggtgtctggtggccggtctgtgcgtttttccgaggcagaacagcggtgtgtttcacgcggcttcactcccgcccagtttcaggccgccctggatgaatatgaggagctcaacgtatggcaagtcaatgcaagccgcaccagaatcaccttcgtgtag

SEQ ID NO: 124426 - DNA, 1839 bp, synthetic construct
  misc_feature 1..1839: note = Description of Artificial Sequence: Synthetic coding sequence
  source 1..1839: mol_type = other DNA
atgatggagcagagatccagggatcccggaatggtgagatctccccaaaatcaatacccggccgaactgatgcgtcgattcgaactatattttcaaggaccttcttccaataagccccgggtgatcagagaggttagggccgactctgttgggaagctggtgaccgtgaggggtatcgtgacgcgggtgtccgaggtgaaacccaaaatggtagtcgccacctacacctgtgaccaatgtggggccgagacttaccaaccaatccagagtcccacattcatgcctcttatcatgtgtcctagtcaggaatgtcagactaacaggtccggaggaaggctttacctccaaactcgaggcagtcggttcatcaagtttcaggaaatgaaaatgcaggaacactcggatcaagtgcctgtgggcaacatacccagatccattaccgtcctagtggaaggggagaacacccgcattgcccaacctggcgaccatgtgtcagtgacaggaatctttctccctatcctcagaactggcttccgacaggtggttcagggcctgctgtccgagacttatctagaagcgcaccggattgtcaaaatgaacaagtctgaggacgacgagtctggagcgggagaattgactagagaagaactcaggcaaatcgctgaggaagatttctacgagaagctggccgccagcatcgctcccgagatctacgggcacgaggacgtgaagaaagccctgttactcctgttagtgggaggcgttgaccaatcgccccggggcatgaaaataaggggaaacattaatatatgtcttatgggagatcccggggtggcaaagtcccagctactttcatatattgataggctcgctccgcggtcccagtacaccacagggcggggatcttccggggtaggcttgaccgccgcagtcctccgggactcagtcagtggggagctcacattagagggtggcgctctggttttggcggaccagggcgtctgctgtattgatgagttcgacaagatggcggaggcggacaggacagccatacatgaagtcatggagcagcagacaatcagcattgccaaagcaggtatcctgactaccctgaacgctcgatgcagcatcctggccgcggccaaccctgcctacgggagatacaatccgcggcgtagtttggaacaaaacattcagttgccggcagctctgctcagtaggtttgacctgctgtggcttatacaggatcggcctgacagggataatgacctgaggctagcccaacatattacgtatgtgcatcaacactccagacagcctccaagtcagttcgaacctctcgatatgaagctcatgcgtcggtacatcgcaatgtgccgggagaaacagcctatggtacctgagagtctcgcggactacatcactgcagcttacgtggaaatgaggcgcgaggcttgggctagcaaagacgcgacatacacctccgccagaacactccttgcaattctccgcctgtctacggctctcgcacggctccgcatggtagacgtcgttgaaaaggaggatgtgaacgaagccatcagactgatggagatgtcgaaggactcacttctcggggataaaggccagaccgcacggactcagagacctgcggatgtgatcttcgctaccgtccgagagttagtgtctggcgggaggtctgtaaggttcagtgaggccgaacaacgttgtgtatctcgcggatttactcctgcccagtttcaggccgctcttgatgaatacgaagagttaaatgtgtggcaggtcaacgcaagccgcacgcggattacttttgtgtag

SEQ ID NO: 124427 - DNA, 1971 bp, synthetic construct
  misc_feature 1..1971: note = Description of Artificial Sequence: Synthetic coding sequence
  source 1..1971: mol_type = other DNA
atgactccctcttggtggactcagtttgtgagaatgccaggtgctacgcggagttctcttctgatgccttattacaaagagcgcgaagtcgtgaacaaggacgttctggacgtctatattgaacatagactgatgatggaacagcggtcccgtgaccccggcatggtgaggagcccacagaatcagtaccccgccgaactgatgcgtcgttttgagctctacttccaaggaccctcttccaataagcctcgagtgatcagagaagtgagggctgatagtgtgggtaaactcgtgacagtgcggggaatcgtgacccgcgtcagtgaggtaaaacctaagatggttgtggctacatacacgtgcgatcagtgcggggctgagacttaccagccaatccaatcccccacctttatgcccttgatcatgtgtccttcccaggagtgtcagaccaaccggtcgggcggacggctctatttgcaaacacgggggtcccgcttcattaaatttcaggaaatgaagatgcaggagcacagcgaccaggtccctgtcggaaacattccgcggtcaatcaccgtgctggttgagggtgagaatacaagaatcgcgcaaccgggagatcacgtgtctgttactgggatctttctgccaatacttaggacaggtttccgccaagtagtgcaggggctgctatcagagacttacctggaagctcacagaatcgtcaagatgaataagagcgaagacgatgagtccggcgccggcgaactaacccgggaggagctgcggcagattgccgaagaggacttttacgagaagctggcagcatcaatagcccctgaaatctatggacatgaggacgttaaaaaagctctactcctcctgctcgtcggtggagtggatcagtcacctcggggcatgaaaataaggggaaatatcaatatctgcctcatgggtgaccccggggtggctaagtctcagctcctgtcatacatcgaccggcttgcccctaggagtcagtacactacaggtcgcggctcatcgggcgtcggtctcacagctgcggtgttgcgggattcagtctccggagaattaaccctggaaggtggggccctcgtactagcagaccagggtgtctgctgtatcgatgagtttgataaaatggcagaggctgacagaacagcaatccacgaggttatggaacaacagacaatcagcattgctaaagctggtattctgaccaccttgaacgcgaggtgttctatcctagctgccgccaaccctgcttacgggcgctacaacccccggaggtctctcgagcaaaatattcagctgcctgctgctttactgtcgaggtttgatctgctctggctaatacaagataggcctgaccgtgacaacgacctgcggcttgctcagcacatcacatacgtccaccaacatagtcggcagccccccagccagttcgaaccattggacatgaagttgatgcggcgttacatcgctatgtgtagggagaagcaacctatggtgcctgagtctttggccgattacattaccgctgcctacgtcgaaatgagacgggaggcctgggcctctaaggatgctacatatacatcagcacggaccctgctggcaatcttgcgccttagcacggctctggcaagactgaggatggtagatgtcgtggagaaagaggacgtgaacgaggccatccgccttatggagatgtcgaaagattccctgttgggggataaagggcaaacagctagaacccaacgtccagcagatgtaatttttgctactgtgcgcgagctcgtttccggagggcgaagcgtgaggttctccgaggctgagcaacgttgtgtttccaggggctttacacccgcacagttccaagcagcacttgatgaatacgaagagcttaacgtatggcaggtaaatgcgagtcgtaccaggattaccttcgtatag

SEQ ID NO: 124428 - DNA, 2475 bp, synthetic construct
  misc_feature 1..2475: note = Description of Artificial Sequence: Synthetic coding sequence
  source 1..2475: mol_type = other DNA
atgaatggagagtataggggaaggggcttcgggagaggcaggttccagtcttggaaacgggggagaggaggcggcaacttttccggcaaatggcgcgagcgggaacatcgcccggatctgtcaaagactaccggaaagaggacctcagagcagacccctcagtttctgctttccacgaaaactccccaatcaatgcagtccacactggaccgtttcatcccctataaagggtggaagctgtacttttccgaggtgtactccgattcctctccactcatcgaaaagattcaggccttcgagaaatttttcacccgccacattgatctctatgataaggatgaaattgaacgaaaggggagtattctggttgacttcaaagaactaaccgagggaggagaagtgacaaacctcatacccgatatagccactgaactgagggacgctcccgagaaaactttagcctgtatgggtctggccatccaccaggtgcttactaaagatctggagagacacgcagctgagctgcaggcacaggaagggctgtccaacgacggagaaacaatggtcaacgtacctcatatccatgcccgcgtctataattacgagccactcacacagcttaagaacgtccgcgcgaactactacggaaaatatatcgccctgagagggactgtggtgcgcgtgtccaatatcaaaccattatgtactaagatggctttcctttgtgcagcatgtggtgagatccagagcttcccgttaccggatggtaaatactcccttcccaccaagtgccctgtgcccgtgtgccgcggccgctccttcaccgccctgcggagctctcccctcactgtaactatggactggcagagcatcaagatccaggagctgatgagcgacgatcagagagaggcaggccgcatccctcgcacaatcgaatgtgaactggtacacgaccttgtggattcatgtgtccccggcgacaccgtgacaataactggcatcgtgaaggtcagcaatgctgaagaagcgaattcgatctctaactccaaagggcagaaaactaaaagctccgaggatggatgtaaacatggtatgctgatggaatttagcttaaaggacctttacgctattcaggaaatccaggctgaggaaaacctgttcaagctaatcgtgaattctctgtgtccagtaatttttggtcacgaattagtcaaagctggattggcactggctttgttcggaggcagtcaaaagtacgcagacgacaaaaataggattcccattaggggagatccccacattctcgtcgttggcgacccaggactgggcaagagtcagatgcttcaggctgcatgcaatgtggccccgcgtggcgtatatgtgtgtggaaataccaccacgacaagcggtttgaccgtcacattgtcaaaagactctagcagcggagacttcgccttggaggcgggggcacttgtgctgggcgatcaaggcatatgcggcattgatgaattcgataaaatgggcaaccagcaccaggcactgctggaggccatggagcaacagagcatctcgctagcgaaggcaggcgtggtgtgcagcctaccagctcggacatcaattatcgccgccgccaatcccgtaggcgggcattataacaaggccaaaaccgtgtccgaaaacctgaaaatgggatcagctctcctcagccgttttgacctcgtctttatccttcttgacaccccaaatgagcatcatgatcatctacttagcgagcacgtaatagctatccgggcaggcaagcagcgcactatctcttcagctacagttgctaggatgaactcccaggattccaacacctccgtactggaagtggtgagcgaaaagcccctcagcgagagactgaaggtggtgcctggcgaaaccattgatcctatcccacaccaactgttgcgcaagtatatcgggtatgctagacagtacgtctacccgcgcttgagcacagaggcagctagagtcctgcaggacttttaccttgagcttcggaagcagtcgcagcgactaaacagctcacctatcacaacccggcagttggagtctctgatacgactcacagaggcacgcgcccgacttgaattacgggaggaggccacaaaagaagacgctgaggacatcgtggagatcatgaaatacagcatgttaggtacctactcagacgaattcggaaatttggacttcgagcgcagtcagcacggttcaggtatgtccaacaggtccacagcaaagcggtttatcagcgctctgaacaatgttgccgaaagaacgtacaacaatatatttcagtttcaccagctgaggcagatcgcgaaagaacttaacattcaagttgcagactttgagaattttattggcagtctgaatgaccagggatatttgctgaaaaaaggtccaaaagtctaccagctgcagaccatgtag

SEQ ID NO: 124429 - DNA, 2382 bp, synthetic construct
  misc_feature 1..2382: note = Description of Artificial Sequence: Synthetic coding sequence
  source 1..2382: mol_type = other DNA
atgaatggcgagtataggggacgcgggttcggcagagggagatttcagagttggaaaagaggtagaggtgggggtaatttcagcggcaagtggcgcgaacgcgagcaccggcctgacctgagcaaaactactggcaagcgcacatctgaacagactccgcaatttctcctgagtaccaagaccccccagagcatgcagagcacgttggaccgatttatcccctataaaggatggaaactgtacttctccgaagtgtactcagatagttctccgctcatagaaaagattcaagcgttcgagaaattcttcactagacacattgacctgtacgacaaagacgaaattgaacgcaagggatccatattggtggattttaaggagctgactgaaggtggagaggtgaccaatctgatacctgacattgctacagaactgagagacgccccggagaaaacgcttgcctgtatgggcctggctatccaccaggtgctgacaaaggacctcgagagacacgccgccgagctgcaggcacaggaaggccttagtaacgatggagagaccatggtaaacgtgcctcacattcatgcccgcgtctataattatgagccactcactcagctgaaaaacgtcagagctaattattatggaaagtatattgccctcagaggtactgtggtgcgcgtctccaatattaagcctttgtgcaccaagatggcctttctctgcgccgcctgcggcgagatccagtccttccctctgccagatggcaagtacagcctccccaccaagtgccccgtcccagtctgtagagggaggagtttcacagcccttcgctcttcccctctgactgtaaccatggattggcagtcaatcaagatccaggagctgatgtccgacgaccaaagggaagctggtagaattcctaggaccatcgaatgcgagctcgtacacgatctcgttgactcctgcgttcccggagacacggtgaccatcacggggatcgtcaaggttagcaacgcagaggagggttcccggaataaaaacgacaagtgtatgtttctgttgtatattgaagccaacagcatcagcaatagcaaaggtcagaaaacaaagtcttctgaggatggttgcaagcacgggatgctgatggaattctcgctcaaagatctgtacgccattcaggaaattcaggccgaggagaacttgttcaagctgatagtgaatagcctctgcccagtaatttttggccatgaagctgcctgtaacgtcgcaccgaggggcgtgtacgtatgcggaaataccacgaccacctccgggctgacagttactctcagcaaagattcatcctcaggcgattttgccctggaggccggcgcgctggtgcttggcgaccaaggaatttgtggtatcgacgaatttgacaaaatgggcaaccagcaccaagccctccttgaagctatggaacagcagtcgatctcactcgcgaaggccggtgtggtctgctcccttcccgccaggacatctatcattgccgccgcaaatcctgtcggggggcactacaataaggcaaaaactgtctctgaaaacctgaagatggggtccgccttgctgagtcgcttcgatctcgtgttcatcctccttgacacccccaacgagcatcacgatcatctgctgtccgaacacgtgatcgccatccgggcaggcaagcagagaaccatatcaagcgccaccgtggctcgtatgaactcccaagactcaaacacgtccgtgttggaggtcgtgagcgagaaacctttgtccgagcgcttgaaggttgtcccgggagaaacaatcgatccaatcccacatcaactgctgaggaagtatataggctacgccaggcaatatgtgtacccaaggctgtcgaccgaggccgcgagggttctgcaggatttctacctagagctccgcaaacaatcacaacgtctcaatagcagccctatcactacacgccagctggagagtttaattcgccttaccgaagctcgggctcggctggaacttagggaagaggccaccaaagaggacgctgaggacattgtcgagattatgaagtacagcatgctgggaacctattccgacgagtttgggaatttagatttcgagcgttcccagcacgggagcggaatgagcaaccgcagcaccgcaaaacgctttatctccgccctgaacaatgtggcagaacgaacctataacaatattttccagtttcatcaactgcgtcagatcgccaaagaactgaatattcaggttgccgatttcgaaaatttcatcggatccttaaacgaccaaggatatttgttgaaaaaggggcctaaagtttaccaactccagactatgtag

SEQ ID NO: 124430 - DNA, 2643 bp, synthetic construct
  misc_feature 1..2643: note = Description of Artificial Sequence: Synthetic coding sequence
  source 1..2643: mol_type = other DNA
atgaacggagaataccggggaagaggcttcggaagaggacgctttcagtcttggaagagggggcggggagggggaaacttctctgggaagtggcgagagcgcgaacacagaccagatttgagcaaaaccacagggaagcgcacctctgaacagacaccccaattcctgctatccacaaagactcctcagtccatgcagagcaccctggaccggtttatcccctataaggggtggaagctctatttttcagaggtgtactcggattctagcccccttatcgagaaaatccaggcgtttgaaaagttcttcactagacacatcgatttatatgacaaagatgagatcgagcggaagggtagcatcctcgtagactttaaggaactcaccgagggcggcgaagtaaccaatctgatccctgatatcgccaccgaactccgcgacgccccggagaaaactctagcctgtatgggcttagcaatccatcaggtcctgacgaaagacctcgaaagacacgcggctgagttgcaagcacaggaaggacttagcaacgacggtgagacaatggtgaacgtccctcatatccacgctagagtttataactacgagccactgactcaactgaagaacgtacgggctaactattacggcaagtatattgccttgcgcggtacagtcgtcagagtgtccaacatcaaacctctctgtactaagatggccttcctctgtgccgcatgcggagaaatccagagctttcctttgccagatggtaagtactcccttccaaccaagtgtccggtgcctgtgtgtcgggggagaagcttcacggcactccgatcatcaccactgaccgtcacaatggattggcagagtattaagattcaggagcttatgagcgacgatcagcgggaggcgggtcggatcccacgcaccatcgagtgcgaactcgttcatgacctggttgacagctgcgtgcctggcgatacagttactatcactggcatagttaaagtcagcaacgcagaagaaggctcccgaaacaagaatgataaatgtatgttcctcctttacatagaagccaattccatctctaattccaagggacagaagaccaagtcgagtgaggacggctgtaagcacggcatgctcatggagttctccctcaaagacctgtatgcaatccaggagatccaggcagaagagaacctgttcaaactgattgtcaaatggtcccttgccttgtcaccccgtttggagtactccggagcaatatctgctcattgcaatctgcacctcccgagttcaaactcctcacctacatccgcttgtagggttgctggtacaaccggcatgcgccaccagactcagctcctgctattggtgaaggctggactggccctggccctgtttggaggttcgcaaaaatacgccgacgataagaaccgaatcccgattcggggggatcctcacatccttgttgtaggagatcctggtctggggaagagccagatgctgcaggccgcatgtaatgttgccccaagaggagtgtatgtttgcggaaataccacaactactagtgggctgacagtcaccctgtctaaagatagctccagtggcgactttgcgttagaggctggagctctcgtactcggggatcagggaatctgcggaattgatgagttcgacaagatgggcaaccagcaccaggcactcctggaggccatggagcagcaaagtatttcactagcgaaagcgggagtggtgtgctccctgccagctcgaacgagcatcatcgccgctgcaaatcctgtcggaggtcactataataaggcaaagaccgttagtgaaaacctcaaaatgggcagtgcactactctctagattcgacctagtattcatactgctggatacccccaacgaacaccatgatcatctgcttagcgaacacgtgatcgcaatccgggcagggaagcagcgtactatttcatccgcaacagttgcccgcatgaattcccaggatagcaacactagcgtgctcgaggtggtctccgaaaaacctctttccgagcgtctgaaagtggtccccggagaaacaattgaccccatcccccatcaactactgcggaagtacatcggctacgctagacagtatgtctatccaaggttgtctactgaagctgcacgcgttctccaagatttttacctggaacttcgcaagcaaagccagcgtctcaacagcagcccgattaccaccagacagctcgagtcattgattagactcacagaagctagggcacgcctagaactgcgagaagaggcaacaaaagaagatgccgaggatatcgtggaaataatgaagtactctatgcttgggacctattccgacgagttcggcaatctggacttcgagcgatcccagcatggcagcggaatgagcaacagatccacagctaaacggtttatttccgcgctgaataatgtggcggagaggacatataacaatatatttcagttccatcagttaaggcagattgctaaggagctgaatatacaggtggccgactttgaaaacttcatcgggagtctgaacgaccagggctaccttttgaagaagggaccaaaggtgtaccagcttcaaacaatgtag

SEQ ID NO: 124431 - DNA, 2523 bp, synthetic construct
  misc_feature 1..2523: note = Description of Artificial Sequence: Synthetic coding sequence
  source 1..2523: mol_type = other DNA
atgaatggggagtatcgcggccggggctttgggagagggcggtttcagtcctggaagaggggacgcgggggcggcaacttcagtggcaagtggagggaaagggagcaccggcctgatcttagtaagaccactggtaagcgcactagtgaacagactccgcagttcctgctgtccacaaaaacgcctcagagcatgcagtccaccctcgataggttcatcccctacaaaggctggaaactgtacttcagcgaggtgtattccgacagtagcccactcatcgaaaagattcaggccttcgagaagtttttcactaggcatatcgatctttacgacaaagatgaaattgagaggaaaggcagcattttggtagattttaaggaactaaccgagggcggggaggtgacgaacctaattccggatatcgcaactgaacttagggatgcccctgagaagactttagcatgtatgggtttggcaattcatcaagttctcaccaaggatctggaaagacacgccgccgaactccaggcccaggaaggcctctcaaacgacggtgagactatggtgaacgtgccgcatattcacgcccgcgtttacaattacgagcctttgacccagctgaaaaatgtgcgggcgaactactatggcaaatatatcgcacttcggggcactgtggtgcgggtgagcaacatcaagccattgtgtactaagatggccttcctctgcgccgcttgtggggagattcagtcatttcctttgcctgatggtaagtacagtctacccacgaagtgcccagtacctgtttgcagaggacggtccttcaccgcattgcggtccagcccgctgaccgtgaccatggattggcagtccatcaaaatacaggagctgatgtcagatgaccagagggaggctgggcgtatccccagaactattgagtgcgagctggtccacgatctcgtggacagctgtgtacctggagacaccgtgacgatcaccggcatcgtcaaagtgagtaacgccgaagaaggcagccgcaataagaatgacaaatgtatgttcctcttgtatatagaggcgaactccataagcaatagcaagggacagaaaacaaaaagcagtgaggacgggtgcaagcacggaatgctgatggagttctcactgaaagacctatacgctatccaggagattcaggccgaggaaaacttatttaagctgatcgtgaacagtctttgccctgttatcttcggccacgagctagttaaggctggcctcgctctggctctcttcggcggttcccagaagtacgctgatgataagaataggattcccatcagaggtgatcctcacatccttgtggtcggtgaccctggcctcggcaagtctcagatgttacaagcagcttgtaacgtcgcccccagaggtgtgtacgtgtgcggcaatactactaccacaagtgggcttacagttacattgtccaaagacagcagctcgggcgattttgccctcgaggcaggggctctagttctgggggaccagggtatctgcggcatagacgaattcgacaaaatggggaaccaacatcaggccctgcttgaggccatggagcagcaaagcatctcactcgcaaaagctggagtcgtgtgcagcttgcctgctaggacaagcattatagcagccgcgaatcctgtaggtggccactataacaaggccaagaccgtgtcggagaacctcaaaatggggtcagctttgctgtctcgtttcgatctcgtttttatactgctagacacgcctaacgagcatcatgaccatctgctgagcgagcatgtgatcgccatcagggccgggaaacagcggactatctcctcggccaccgtagcaagaatgaatagccaagacagtaacacatctgttttagaagtggtttccgagaagccactgagcgagcgcctgaaagtcgtgcccggggagaccattgatcccattccacaccagcttctccggaaatacattggttacgctcgacagtatgtatatcctaggctcagtaccgaagctgccagagtgctgcaggacttctacctcgaattgcgcaaacagagtcaacgcctcaatagctcacctatcacgacgcgccagctggagagcctaatcaggcttactgaggctagggcacgcttagaactgcgggaagaggccactaaggaagatgctgaggacattgtggagatcatgaagtactctatgttaggtacatactccgacgagtttggaaacctggattttgagagatcccagcacggcagcggaatgtcaaacagaagcacagcgaaacggtttatctctgctctgaacaacgtggctgagaggacctataataacattttccagtttcaccaactacgacagattgccaaggagctcaacatccaggttgccgacttcgagaactttatagggtctctgaatgaccagggttaccttttgaagaaaggtcctaaggtctaccagcttcagactatgtag

SEQ ID NO: 124432 - DNA, 612 bp, synthetic construct
  misc_feature 1..612: note = Description of Artificial Sequence: Synthetic coding sequence
  source 1..612: mol_type = other DNA
atgaacggggagtaccggggcaggggctttggtagaggcaggtttcagtcgtggaaacggggtcgcggaggaggcaacttctctggaaaatggagagaacgggagcatcgcccggacctaagtaagaccacaggtaagcggacaagcgaacagactccacaatttctactcagcacaaagacaccccaaagtatgcagtccacactggacaggttcattccttataaggggtggaagctgtatttcagcgaagtctactccgactcttcacccctgatcgaaaagattcaggcatttgaaaaattttttacaagacatattgatttgtacgacaaggacgagattgaacgtaagggatccatactggtggactttaaagagctcaccgaggggggcgaagtgacaaaccttattccagacattgccacagaactgcgagatgcccctgagaaaactttggcgtgtatgggcctggcaatacatcaagttctaactaaagatttagagagacacgccgcggagctgcaagcccaagaagggctgtccaatgacggggagacaatggtgaatgttcctcatattcactttctaaagaagaaaaagaagatctag

SEQ ID NO: 124433 - DNA, 1329 bp, synthetic construct
  misc_feature 1..1329: note = Description of Artificial Sequence: Synthetic coding sequence
  source 1..1329: mol_type = other DNA
atggaaaattggagcaaagatatcacgcactcctatttggaacaggaaacaaccggaattaataaatccacacagcctgacgaacagctgaccatgaacagcgagaagtccatgcatagaaagtccacagaattggtgaacgaaatcacctgcgagaacacagagtggccaggacagaggtcaaccaattttcagattatctcaagctaccccgacgatgagagcgtgtactgtaccacggagaagtataatgtgatggagcacaggcacaatgacatgcattacgagtgtatgaccccctgccaggttacatctgactctgataaagaaaaaactattgcgtttctgctgaaggaactggatattctgcgcacttctaacaaaaaattacaacagaaactagccaaagaggacaaggaacagcgtaaattgaagttcaaattagagctgcaggagaaagaaactgaagctaagatcgccgagaaaaccgctgccctggtcgaagaggtgtacttcgcccagaaggagagggacgaagccgtcatgagtcggctccagctcgcaatcgaggaacgggatgaagctatcgcacgcgccaagcacatggagatgtcactgaaagtccttgaaaacattaaccctgaggagaatgacatgacactacaggagcttctgaaccgcatcaataatgctgataccggaattgctatacagaagaacggggcaattatagttgaccgcatttataagaccaaggaatgtaaaatgaggattacagctgaagagatgtctgctctcatcgaggaacgggatgccgcactctctaaatgcaagagactcgaacaggagctgcaccacgtgaaagagcagaatcagacatccgccaacaacatgcggcatttaactgctgagaataatcaggaacgcgcgttaaaggctaagctgctgagcatgcaacaggcgagagagacagcagtgcagcagtataagaagctggaggaggagatccagaccttacgggtgtattactccctgcataagagcctatctcaagaagagaacctgaaggatcagtttaactacacattgagcacatatgaagaagccctgaaaaacagggagaacatagtgagtatcacccaacagcagaacgaggagctggcgacccagttgcagcaggccctgaccgagcgcgcaaacatggaactccaattgcaacacgccagggaagcctctcaggttgccaatgagaaggtgcaaaagctggaacggttggtggacgttctcagaaagaaggtgggaaccgggaccatgcgcacggtaatctag

SEQ ID NO: 124434 - DNA, 1329 bp, synthetic construct
  misc_feature 1..1329: note = Description of Artificial Sequence: Synthetic coding sequence
  source 1..1329: mol_type = other DNA
atggagaactggtcaaaggatattactcactcctatcttgagcaggaaaccacagggataaacaagtctacccagccagatgagcagctgacaatgaacagtgagaaatctatgcaccgcaagtccacggagttggtgaatgaaatcacttgcgagaacacagaatggcccgggcaacgatccaccaatttccagattatctctagctacccggatgacgagtcggtttattgtactacagagaaatataatgtgatggaacacagacacaatgacatgcactatgagtgtatgacaccctgtcaggtgaccagcgatagcgataaagaaaagacaatagccttcctgcttaaggaacttgacatccttcgcacttccaataagaaactacagcaaaagctggccaaagaggataaggaacagaggaagctaaaattcaagctggagttgcaggaaaaagagacggaagcaaagatcgccgagaagacagccgcactagtggaagaagtatactttgcacaaaaagagagagacgaggctgtgatgtcaaggctgcaactggctatcgaggaacgggatgaggccattgcacgcgctaaacacatggaaatgagcctgaaagtgctggaaaatataaatccggaggagaacgacatgacgctgcaggaattgctgaatcggattaacaacgccgacaccggcattgctatccagaaaaatggcgccattatcgtggatagaatttataaaacaaaagagtgcaagatgcgtattaccgctgaggagatgtctgctcttatagaggagcgggacgccgcgttatctaagtgtaaacgacttgagcaggagctgcaccacgtcaaggagcagaaccagacatccgcaaacaacatgcgccacctgaccgccgaaaacaaccaagagcgggcactgaaggcaaaactactgagcatgcagcaagccagagagacggcagtgcaacaatacaaaaagctcgaagaggaaatccagaccttaagggtctactactccctgcacaaatctttgagccaggaagaaaacctcaaagatcagttcaactatactctgtcaacttatgaagaggcactgaagaatagagagaacattgtgagcatcacacagcaacagaacgaggagctggcgactcagctgcagcaggccctcacagagcgcgctaatatggagctgcagctgcagcacgctcgcgaggcgagccaagtggccaacgagaaagtccagaaacttgaaagattggttgatgtgctgcgcaaaaaggttgggacgggaaccatgcgaacagtgatatag

SEQ ID NO: 124435 - DNA, 786 bp, synthetic construct
  misc_feature 1..786: note = Description of Artificial Sequence: Synthetic coding sequence
  source 1..786: mol_type = other DNA
atgtccagactccagcttgctatcgaggaacgggacgaggctatcgccagagcaaaacatatggagatgtcactcaaagtactagaaaacataaaccccgaggagaacgatatgacattacaggaattactcaacaggataaataacgccgatactggcatcgctatacaaaagaatggggccatcattgtggaccgaatctataagactaaggagtgtaagatgcggatcactgcagaggagatgtctgcccttatagaggagcgggatgccgcactgagcaagtgcaaacgcctggagcaagagctgcaccatgttaaagagcaaaaccagacttctgctaacaatatgaggcatctcacagccgagaacaaccaggaaagagccttgaaggccaagctgctgtccatgcaacaggccagggagacagcagttcaacagtataaaaaactggaagaggagatacagactctgagagtctattatagcctgcataaatctctatctcaagaagaaaatctgaaagaccagttcaactacactttgtcaacttacgaggaggctctgaagaatcgcgagaacatagtgtccatcacacaacaacagaatgaggagctggccacccaactgcaacaggccctgacagagcgagcaaatatggaactccagctccagcatgctcgggaggcctcccaggtggctaacgaaaaagtgcaaaagttggagaggctagttgatgtgctacgtaaaaaagtcggtacagggactatgaggacagttatctag

SEQ ID NO: 124436 - DNA, 1329 bp, synthetic construct
  misc_feature 1..1329: note = Description of Artificial Sequence: Synthetic coding sequence
  source 1..1329: mol_type = other DNA
atggagaattggtcaaaggacataacccatagttacctcgagcaggagaccacagggatcaataaaagcacgcagcccgacgaacagctcaccatgaacagcgagaaaagtatgcatcgcaaatccactgagctggtcaatgagattacctgtgaaaataccgagtggccaggacagcgctcgaccaatttccagattatatcgagctaccctgatgatgaaagcgtctactgcaccaccgaaaaatacaacgtgatggaacaccgtcataatgacatgcactacgagtgcatgaccccgtgtcaggtgacatctgatagcgataaagagaaaactatcgcattcctccttaaggagctcgacatccttcggactagcaacaaaaagctgcagcagaaattggcaaaggaggataaggaacagagaaagctaaaattcaaacttgagctgcaggagaaggaaaccgaggccaagattgctgagaagacggccgccctcgtggaggaggtgtacttcgcccagaaggaaagggatgaggcagtgatgtcaagactgcagttggccattgaagagcgcgatgaagcaattgcgcgagctaaacacatggaaatgtcactgaaggtactggaaaatattaatcctgaagagaacgacatgactctgcaggagttactcaacagaataaacaacgccgatacaggtatcgcgatccaaaaaaatggcgcaatcatcgtagatcggatctacaagactaaagagtgtaaaatgaggataacagctgaagaaatgtcagccctcatcgaggagagagatgcagcactatccaagtgcaaaagacttgaacaggagctccatcacgtcaaggagcagaatcaaacgtccgcaaacaacatgcgccatctaactgcagaaaataaccaggagcgggccctgaaagctaagttgcttagcatgcagcaggcccgcgaaaccgccgtgcagcagtacaagaagctggaggaggaaatccagacgctccgggtatactactcactgcacaagagtttgtcacaagaagagaatctcaaggaccagtttaattacacgctgagtacttacgaagaagcgctcaaaaatagagagaatatcgtgagcataactcagcagcagaacgaagaactggccacacaactacaacaggcactgactgagcgagccaacatggaactgcaattacagcacgcacgtgaggcctcacaggtagcaaatgagaaagtgcagaagctggaaaggctggtggatgtgctccgaaaaaaggtggggacggggactatgcgcacggtgatttag

SEQ ID NO: 124437 - DNA, 1275 bp, synthetic construct
  misc_feature 1..1275: note = Description of Artificial Sequence: Synthetic coding sequence
  source 1..1275: mol_type = other DNA
atgaacagtgaaaaatcaatgcaccgcaaatcaacagaactagtgaacgaaataacctgtgagaacactgaatggcctggacaacgcagcaccaattttcaaatcatttcttcttatcctgacgacgaatcagtgtactgcaccaccgaaaagtacaatgtgatggagcaccgacataacgatatgcactatgaatgtatgactccatgtcaggtcacttccgactcggacaaggaaaagacgattgcattccttctgaaggaactcgacatactgcggacctctaacaagaagctgcagcagaaactggccaaggaggataaggagcagaggaaactcaaatttaagttggagcttcaagagaaggaaactgaggccaagatcgccgagaagacggcagctctagttgaagaggtatacttcgctcagaaggagcgggacgaggcagttatgtcccgcctccagcttgctattgaagagagggatgaggctatcgctagggcaaaacacatggaaatgtctctgaaagttctagaaaatatcaatccagaggaaaacgatatgaccctgcaggaactcctgaatcggatcaacaatgcagacacaggtattgccattcagaagaatggtgctattatcgtcgataggatctacaagacgaaggaatgcaaaatgcgtattacagccgaggaaatgagtgccctcatagaggagcgagatgccgctctgtctaagtgtaagaggcttgaacaggagctgcatcatgtgaaagaacaaaaccagactagcgctaacaacatgcgtcatctaacagccgaaaacaaccaggaacgtgccctgaaggccaaactgcttagcatgcaacaggcgcgcgagacagccgtgcaacagtacaaaaagctggaagaggagattcagacactccgagtgtactactcactacacaagtctctgtcccaggaggagaatctgaaggatcagttcaattacactctcagtacatacgaggaagcccttaagaaccgcgagaacatcgtgtctataacacagcagcaaaacgaagaactcgccactcagctccagcaggcactcaccgagagagccaatatggagctgcagctacagcacgcacgggaagcgtcacaggtggccaacgagaaagtgcagaagagccagatccaaatctattttatccctaacaagaaggatgaaagagaaaaatttctcatggacaagaggagaaaaattgtggcacactcaaagcagaattcatag

SEQ ID NO: 124438 - DNA, 315 bp, synthetic construct
  misc_feature 1..315: note = Description of Artificial Sequence: Synthetic coding sequence
  source 1..315: mol_type = other DNA
atggagaattggtccaaggatataacccactcttatctcgaacaggaaaccaccgggatcaacaaatctacccagcctgacgagcagctgactatgaattccgaaaagagcatgcatcgaaagtcaacagagcttgtcaacgagatcacatgcgagaatacggaatggccggggcagcggtccactaatttccagatcatcagtagctatcctgatgacgagagtgtgtactgtaccaccgaaaaatataacgtcatggaacaccggcacaacgacatgcactacgagtgtatgacaccttgccaggtaacctag

SEQ ID NO: 124439 - DNA, 387 bp, synthetic construct
  misc_feature 1..387: note = Description of Artificial Sequence: Synthetic coding sequence
  source 1..387: mol_type = other DNA
atggagaactggtcgaaagacatcacccactcctacttggaacaggaaacaaccggaattaataagtccacgcagcccgacgagcagctgaccatgaattcggaaaagtccatgcaccgtaaatctacagagctggtaaacgagatcacatgtgagaacactgaatggcccggacagaggagcacaaatttccaaattatcagtagttatcccgatgatgaatcagtatattgcacaacagagaagtataacgtgatggaacaccgccataatgacatgcactacgagtgcatgactccctgccaggtcacaagcgattccgacaaggaaaagaccatcgcatttctcctgaaagaactggacatcttgcggacatcaaacaagtag

SEQ ID NO: 124440 - DNA, 3912 bp, synthetic construct
  misc_feature 1..3912: note = Description of Artificial Sequence: Synthetic coding sequence
  source 1..3912: mol_type = other DNA
atgggcgaccccgctccagcacggtctctggatgacattgacctttccgctctcagggatcccgccgggatattcgaactggtggaggtggttggtaatggcacctacgggcaggtgtataaagggcgacacgtcaagaccggccaactggcagctattaaagttatggatgtgacggaagatgaagaagaagaaatcaaacaggagattaacatgctgaagaagtactcccaccatcgcaacatcgcgacatattatggcgccttcattaagaaatctccgcccgggaacgacgaccaattgtggctcgtcatggagttctgcggggcaggcagcgtaaccgatttagtgaagaatacgaagggcaacgcccttaaggaagattgcattgcctacatctgtcgagaaattcttcggggtctggcccacctgcacgctcacaaagtgatacaccgcgacatcaaggggcaaaatgtgcttctaaccgagaacgctgaagtgaagttagtggactttggcgtgagtgcccagctagacaggaccgtgggacgccgcaatacatttatcggaactccctattggatggctccagaagtcatcgcttgtgatgagaacccggatgctacctatgattacaggtcagatatctggtcccttggcatcactgccattgaaatggctgaaggagcgccaccactctgtgacatgcaccctatgcgggccctgtttctcataccccgtaacccaccacctcggttaaagagtaagaagtggagtaagaaatttatagattttattgacacttgtctgattaagacttacttgtccagaccaccaactgaacagctgctcaagttcccattcattagagaccagcctaccgaaagacaagtgcgcatccagcttaaagatcatatagatcgctcacgtaagaagcgaggcgagaaggaggaaaccgaatatgagtatagcgggagcgaggaggaagacgactcacacggcgaagagggtgagccatcttctattatgaacgtgcctggcgagagcaccttgagacgagagtttctcagactgcagcaggagaataaaagtaactccgaggctttaaagcagcagcagcaactgcagcagcagcaacagcgtgatccggaggcccacatcaagcaccttttgcaccaacgccagcgcaggatcgaggaacagaaggaagaacgacgcagagtggaggagcagcagcggcgcgaacgagaacagcggaaactacaagagaaggagcagcagagacgtcttgaagacatgcaagccctcaggagagaagaagagcggcgtcaggctgagcgcgagcaggaatacaagagaaagcagcttgaagagcagcgccagagtgagaggttgcagcgccagttgcagcaggagcacgcctatctgaaaagtttacagcagcagcagcagcagcagcaactgcagaagcagcagcagcaacaacttcttcccggagatagaaaaccgttatatcattatggcaggggaatgaatcctgcggataaaccggcttgggccagagaagttgaggagaggacacggatgaacaagcagcagaactctcccctggccaagagcaaacctggatccacaggacccgagccgcccatcccccaggcttcacctgggccccccgggccgctttcccaaacacccccgatgcagcgccctgttgagcctcaggagggcccacacaagagtctggtcgctcatagggtgcctctgaaaccttatgccgcccccgtcccgcgctcacagtccctgcaggatcagcccacgcgcaatctcgctgcgtttcccgccagtcatgatcctgaccctgcaatacccgcccccacagctacgcccagtgccaggggcgccgttatccggcaaaacagcgaccctactagcgagggtccagggccttctccgaaccctccagcgtgggtgcgcccagataacgaggcaccgccgaaggttcctcagcggaccagctctatcgccaccgcccttaacaccagcggcgccgggggcagcagacccgcgcaggccgtgagagcgtccaatcccgatctccgccgatctgatcccggctgggagcgaagtgattcagttctaccagcgtcccatggtcacctgccgcaggctggaagtctggagagaaatagagtgggtgtctcttccaaacctgactcatcgccagtgttgagtcctggaaacaaggctaagccggatgaccatcgaagccggccgggcaggcctgcgtcatataaaagagccatcggcgaggatttcgttcttcttaaagagaggacactggatgaagcacctcgccctccaaaaaaggctatggactactcttcttcctccgaagaggtggaaagcagtgaggatgatgaggaagaaggcgaaggagggcctgcagagggctcccgggatacaccagggggtcggagcgacggtgatactgattcggtgtctacaatggtggtgcacgatgtggaggaaatcaccggtactcaacctccttatggcggcgggacaatggttgttcagcgcactcctgaggaggagcggaatctcctgcacgcggactccaatggatacacaaatttgcccgacgtcgttcagccttcccattctcctactgagaatagtaaaggacaaagcccaccctcaaaagacggatctggtgactaccagtcaaggggtctcgtgaaagccccaggaaaaagttcatttacaatgttcgttgatctgggaatctaccaaccagggggatctggagatagcattccaatcaccgcgcttgtggggggagagggaacaagattagaccagctccagtatgacgtgcggaaggggtcggtggttaatgtaaaccccaccaataccagggctcattctgaaactccggagatccgcaaatataagaagcgttttaattcggagatcctgtgtgccgcactgtggggagtgaacctactagtgggcactgagaacggcctgatgctcctcgaccgatctggtcaaggcaaggtctacgggctgatcgggaggagacgcttccagcagatggacgttttggagggcctcaatctgctgattacaataagcggaaagagaaataagcttcgcgtatactatctgtcttggctaagaaacaagatcctgcataacgaccccgaggtggagaagaagcaaggttggaccactgtgggcgatatggaaggatgtggccactatcgcgtggtaaagtatgagagaatcaagtttctcgtgattgcactcaagagctccgtcgaggtgtatgcgtgggctccaaaaccgtatcataaatttatggcctttaaaagtttcgccgacctccctcaccggcctcttctggtagacctcactgtggaggaaggccagcgtctgaaagtgatctacggctcctcagctgggtttcacgcagtggacgtggattccggtaatagctatgacatctatataccggtgcacattcagtctcagataaccccacatgcaatcatttttcttccaaacacagacgggatggagatgcttctctgttatgaggacgaaggagtctatgtgaacacctacgggagaattatcaaagacgtggtgctacagtggggggagatgccgacctcagtagcgtacatttgttccaatcagattatgggttggggcgagaaggctattgagattcggtctgttgaaaccggtcaccttgacggggtgttcatgcataaacgggcacaacgactaaaattcctgtgtgagagaaacgacaaggtcttttttgcaagtgtgaggtcagggggaagctctcaagtctactttatgacactcaaccgcaattgcatcatgaactggtag

SEQ ID NO: 124441 - DNA, 3999 bp, synthetic construct
  misc_feature 1..3999: note = Description of Artificial Sequence: Synthetic coding sequence
  source 1..3999: mol_type = other DNA
atgggagatcccgcccccgctcgaagcctagacgacatcgatttgagtgccttgagggatccagccgggatcttcgaacttgtggaggtggtgggaaatggtacctacggacaggtgtacaagggacgtcacgtgaagacagggcaactggccgcaattaaagtcatggacgtgactgaggacgaggaggaagaaattaagcaggaaatcaatatgctgaaaaagtactctcaccaccgtaacattgcgacatattacggtgcctttatcaaaaaatctcctcctggaaacgacgatcagctttggctcgtgatggaattctgcggcgccggctccgtgacagatcttgtgaaaaataccaaggggaacgccctgaaggaggattgtatagcttacatttgccgagaaatattacggggcctggctcacctgcacgctcataaggtgattcacagggacataaaaggccagaatgtcctgcttacagagaatgcagaagtgaaactggtcgacttcggtgtctcagcccagctggaccgcaccgtgggtagacgaaacacctttattgggacgccatattggatggccccggaagtgatcgcctgtgacgaaaaccctgacgctacatatgattataggtccgatatctggagtctgggtattacagcaattgagatggctgaaggggcccccccactctgcgacatgcatcctatgagagccttgttcctcatcccgagaaacccccccccccgcctgaagtccaaaaagtggagcaagaagttcatagacttcattgatacctgtctcatcaaaacctacctgtctaggccccccacggaacaactgttgaagttcccgtttattcgtgaccagccaaccgaacgccaagtgagaattcaactgaaggaccacattgataggagcagaaaaaagcgtggcgagaaggaggaaacagagtacgagtattccggctctgaggaagaggatgacagtcacggcgaagaaggcgagcccagcagcatcatgaatgtcccaggcgagagtacccttcgacgcgagttcctgcgcctgcagcaggaaaacaagagtaatagcgaggccctcaaacagcaacagcagctgcagcagcagcagcagagagaccctgaggcacatataaaacacctgttgcaccagcgacaaagaagaatagaagagcaaaaagaagagagacggcgcgtggaggagcagcagcgccgagagcgtgaacagcgcaaacttcaggaaaaagagcagcagcgtcgtttagaggacatgcaggctttgaggagggaagaggaaagacggcaggccgaaagggagcaagagtacaaaagaaaacagctcgaagagcagcggcagtcggagcgtctgcaacggcagctgcagcaggaacacgcttacctgaaatcccttcagcagcaacagcagcaacagcagttacagaagcaacagcaacagcagttgctgcctggggaccgcaagccactttatcactatggaagaggtatgaatcctgctgacaaacctgcttgggcgagggaagtcgaagagagaactcgaatgaataagcagcagaacagtcctttggctaagtccaaacccggtagcactggccctgaacctccgattccacaggcttctcctggccctcctggacccctgtcacagaccccccccatgcagcgccccgtggagcctcaagaggggccccacaaatccttggtcgctcatagagtgcctctgaaaccatacgccgctccggtgccccggagccaatctctgcaagaccaacccacgagaaacctcgcggcattccccgcctcgcacgatcccgatcccgctatacctgcccctactgccaccccatcagcccgcggcgccgtcattcggcaaaatagcgaccctacctcggaggggcccggccccagtcctaatcctcccgcctgggtacggcccgataacgaggcacctcccaaagtgccccagcgcacttcaagtattgcaacagccctgaataccagtggggccgggggctcacgccccgcccaggccgtcagggcccggccacgctccaactcagcttggcagatttatttgcaaagacgagccgagcgtggcacccccaaacctcccgggccccctgctcagccaccaggaccacctaacgccagcagcaaccctgacctccggcggtcagaccctgggtgggagaggtccgattcagtcctcccagccagccacggtcatttgccccaggccggaagcctcgagcgcaatcgggtcggtgtgtcttcaaaacccgactccagccccgtgttgagccctgggaataaggctaagccagacgaccatcgaagtaggccgggcaggccagccgactttgtgctcctgaaggagagaaccctggatgaggctcctagaccaccaaaaaaagccatggactacagcagctcaagcgaggaagtggaaagctccgaagatgacgaggaagagggcgaaggcggacctgctgagggatcacgggatacacctggaggaaggtccgatggcgacacggactcggtcagtactatggtagtccacgatgttgaggaaatcaccggaacgcaacctccttatggtggcggcactatggttgtacaacgtactcccgaggaggagcggaacctcctccacgctgacagcaatggatataccaatctacccgacgtggtacaaccttcacattcgccaacagagaattctaaagggcagagccccccaagtaaggatggctcgggtgattatcagtctagaggattggtcaaggcccccggaaaatctagctttactatgttcgtcgaccttggcatatatcagcccgggggcagtggagactcaattccaatcacagctctcgtgggaggtgagggcactcgattagaccagctgcagtatgacgtgcggaagggatccgtggttaacgttaatccaaccaacacaagagctcactctgaaacaccagagatccggaagtataagaagagattcaattccgaaatactctgcgcagccctgtggggcgtgaatctcctggtcggaactgagaatggcctgatgctcctagaccggtccggccaggggaaggtctacggactgatcggcagacgaaggtttcagcagatggatgtgctcgaaggtttaaaccttctgatcaccatcagcggaaaaaggaataagctgcgcgtctactatttatcatggctgcggaataaaatcttacataacgacccggaagtagagaaaaagcagggatggaccacagtgggggacatggaaggctgcggacattacagagtggtgaaatatgaacgaatcaagttcctagtcatcgcattgaagtcatcagtggaggtgtatgcgtgggctccaaaaccctaccataaatttatggcttttaagtcgtttgccgacttgccacacaggccattgctggtggacctaaccgttgaagagggacagcggctaaaggtcatctacgggagctccgccggcttccatgcagtggatgtagacagcggtaactcgtatgacatttatatacccgtgcacatacaatctcagattacaccacacgccatcatttttctgcccaataccgacggaatggaaatgctgctgtgctatgaggatgagggcgtgtacgtaaatacttatggaaggattatcaaggacgtggtgcttcagtggggtgaaatgcctacttccgtggcttatatatgttcaaaccagatcatgggttggggagagaaggccatcgaaatcagatccgtggagaccgggcatctagatggcgtgttcatgcataaaagagcccagcgattgaaatttctgtgcgagcggaatgacaaagtgttctttgcctcagtgcgctcaggaggttctagccaagtttactttatgaccctcaacaggaattgtatcatgaattggtag

SEQ ID NO: 124442 - DNA, 3939 bp, synthetic construct
  misc_feature 1..3939: note = Description of Artificial Sequence: Synthetic coding sequence
  source 1..3939: mol_type = other DNA
atgggagacccagctcccgcccggtctcttgacgatatagacctgtccgccctgagagacccagcggggatttttgaactggtcgaggttgtcggtaacggaacctatgggcaggtgtataaggggagacatgttaaaacgggtcagctggcagcgataaaagtgatggacgtgactgaggatgaagaagaggagattaagcaagaaattaacatgcttaagaagtactctcatcaccggaatatcgccacatactacggggcattcattaaaaagtcacctcccggaaatgacgatcaactgtggctcgtgatggaattctgcggtgctggaagcgtaaccgaccttgtcaaaaacaccaaggggaacgctcttaaagaagattgtatcgcctacatctgcagagagatcctgcgcgggctggcccacttacacgcgcacaaggtgatccatcgggacattaagggccagaatgtgttgctcaccgagaacgcagaagttaaattggtggactttggggtcagcgcccaactcgacaggactgtgggcagaagaaacaccttcatagggaccccctactggatggcaccagaagtgatagcctgcgacgagaatcctgatgccacgtatgattataggagtgatatctggtcactgggcatcacggctatagagatggctgaaggcgcgccaccactgtgcgatatgcacccgatgcgggctcttttcttgattccacgaaaccctcctcctcggctgaaatcaaagaaatggtccaagaagtttatcgacttcattgacacatgcctgatcaagacctatctgagcaggccccccaccgagcagctgttgaagtttcctttcattcgcgaccaaccgactgaaagacaggtacgtatccagctgaaagaccacatcgaccggtcaaggaagaagcggggggagaaagaggaaacagagtatgaatactctggatcagaggaagaggacgactcgcatggcgaggagggcgaaccctcttcaatcatgaacgtccctggggaaagcacactgcggcgagaattcctgcgtctgcaacaagagaacaagtctaactctgaggctcttaaacagcagcaacaactccaacaacaacagcagcgcgaccctgaagcccacataaaacacttgctccatcaacgtcagaggaggatcgaggaacagaaagaggagcggcggcgagtggaagagcaacagcgcagagaacgagagcagcgcaaactgcaggaaaaagagcagcagcggagactagaggacatgcaggccctgcgccgcgaggaggagcgtaggcaggccgagcgtgaacaagaatacaagcgcaagcaattagaggagcagcgtcagtcagagcgcctacaaaggcagttgcagcaggaacacgcctaccttaaaagtctgcagcagcaacagcagcaacagcagctgcagaaacagcaacagcaacagctgctgcccggtgacaggaaacccctgtatcattatggcaggggcatgaaccctgcagacaagcccgcttgggccagggaagtagaagagcggacaagaatgaataaacaacagaacagccccttggccaagtcaaagccaggatctaccggccccgagccgcccatcccacaagccagtcccggcccaccgggtccactgagccagacccccccaatgcagcggcccgttgagccgcaggaggggccccataaaagcctccaggaccagcctacgagaaatttagccgcattccccgccagtcacgatcccgatcccgcgatccctgcgcctaccgctacaccttccgcacgtggggcagttattagacagaatagcgatcctacctcagaggggcccggcccgtcccccaatccgcccgcctgggtgcgccctgacaacgaggccccacctaaggtgccccaacgcacgagctcaatcgccaccgccctaaatacatccggagccggaggttcacggccagctcaggccgtgagggcaaggcctagatcgaattcagcctggcagatatatctgcaacgaagagctgagcggggtacacctaagcccccgggtccacccgcacagcccccaggaccccccaatgcctctagcaatcccgacttaaggcgatccgatccaggctgggagcggtccgactcagtgttacctgcatctcacggacatctgccccaagctggttcgttggaaagaaacagagtcggcgtcagcagcaaaccagacagcagtcctgtcctgagccctggcaacaaggcgaagccagacgaccaccgcagtcgacccggtagacctgctgacttcgtgttgctgaaagaaagaacactggacgaagcgcctcgacctcccaaaaaagctatggattactccagctcatctgaggaagtggagagtagcgaagacgacgaagaggaaggagaggggggcccagcggaaggttccagggatacgcctggcggacgttccgacggggacaccgactcagtgagcactatggtcgttcacgatgtggaggagataaccggaacccagcctccttatggcggtggcaccatggtggtgcagaggacaccagaggaagaacgcaacctgcttcacgccgactccaacggctacaccaatctgcctgatgtggtacaaccgagccactcccccactgagaactcaaaaggccagagcccgcctagcaaagacggaagcggagactaccagagccgcgggttggtaaaggcacctggcaagagcagtttcacgatgtttgtcgacctcgggatttaccagcccggcgggagcggggatagtatccctataacagccctggtcggcggcgaagggaccaggctagatcagctgcagtacgatgtgcggaagggttcggtagtgaatgtaaaccctactaatactcgggcgcactcagagacccccgagattaggaagtacaaaaagcgctttaatagtgagatactttgtgcagccctgtggggcgtgaaccttttggtcggcacagagaatggactaatgctgctcgacagatccggccagggtaaagtgtatggcttgatcggccgtaggagatttcagcaaatggacgtcttggaaggacttaatctcctgataacaatttcaggcaaacgtaataaattgagggtgtactacctcagctggctccgcaacaagatcctgcacaacgacccagaggtggagaaaaaacagggctggacaacagtgggagatatggagggatgtggtcactaccgggtggtaaaatacgagagaattaaatttcttgtcatcgccttgaaatcttccgtagaggtgtacgcgtgggccccaaagccgtaccacaagttcatggctttcaaatccttcgcggacttaccacataggccccttctcgtcgacctgactgtggaagagggtcagcggcttaaggtgatttacggttcaagcgccggttttcacgctgtggatgtagatagcggcaattcgtacgatatctatattccagtacatatccagtctcagattaccccacacgccatcatttttttgcccaataccgacggtatggagatgctgctttgttacgaggacgagggcgtgtatgttaatacctacggtcgcataatcaaggatgtcgtgctccagtggggcgaaatgcccacatcagtggcctacatctgctctaatcaaataatggggtggggggagaaagcaatcgagatacggagcgtggagactggccatctggatggcgtgttcatgcacaagcgggctcaaaggctgaagttcctctgcgagaggaatgataaagtgttcttcgcatccgtccggagtggcgggtcaagccaagtgtatttcatgaccctgaatcgcaactgtataatgaattggtag

SEQ ID NO: 124443 - DNA, 879 bp, synthetic construct
  misc_feature 1..879: note = Description of Artificial Sequence: Synthetic coding sequence
  source 1..879: mol_type = other DNA
atgctactagatcggtcgggccaagggaaagtgtatgggctcatcggtaggcgaagattccagcagatggatgtactcgagggcctgaatttacttatcaccatctcaggcaaaagaaacaaactgcgcgtgtactatctatcttggctgcgaaataagatcctccacaacgaccctgaggtcgagaaaaagcaggggtggaccactgtgggagatatggaaggttgtggccattacagggtggtgaaatatgagcggattaagtttttggtaattgccttgaaatctagcgtggaggtgtatgcgtgggcaccaaaaccctaccataagttcatggcttttaagagctttgctgatctcccccatcgacccctcctcgtcgaccttacagtcgaggaaggccagagactgaaggtgatttacgggagttccgctggctttcacgccgtggatgttgattccggtaactcttatgacatttatatcccagtgcatatacagtcacagattacgcctcacgcgattatcttcctccccaacaccgacggcatggaaatgctcctgtgttacgaagatgagggtgtgtacgtcaatacttacgggcggatcatcaaagatgtggtgcttcaatggggcgagatgcctacgtctgtcgcctatatctgcagcaaccagataatgggctggggggagaaagcaatcgagattcggtccgtggaaactggccacctcgatggcgtgtttatgcataaaagggctcagcgtctgaagttcttatgcgaaagaaatgacaaagttttcttcgccagtgttcgctccggtggcagctcccaggtgtactttatgaccctcaatcggaactgcattatgaactggtag

SEQ ID NO: 124444 - DNA, 336 bp, synthetic construct
  misc_feature 1..336: note = Description of Artificial Sequence: Synthetic coding sequence
  source 1..336: mol_type = other DNA
atgggcgatccagctcctgcgcggagcttagacgacatcgacttgtcagccctccgcgcactttggttccagtttttttaccactcgggcagctcactcgaatcacctggcatgctaaacggaccctttcagcacaggaattctagaattatgacccataggagtgcagagaaaacgctcctcggcagcttatcgctgtggagatggtcggctatggaacccactgatcggtgcactagggtgggcatgtccaggcgcgggagttggctaccaagtcggtcgtggatgtctcgccggactaggagaaaaaggtccaacaggagatctacttgttag

SEQ ID NO: 124445 - DNA, 1014 bp, synthetic construct
  misc_feature 1..1014: note = Description of Artificial Sequence: Synthetic coding sequence
  source 1..1014: mol_type = other DNA
atgggggctgcggggagctcagccctcgctagattcgtccttttggcgcagtcccggcccggctggttgggggtagccgccctcgggctcaccgccgtcgctcttggtgccgtggcatggagaagagcatggccaactaggagacgtaggctgctgcagcaggtgggaaccgtcgctcagctgtggatctacccagtcaagagttgcaaaggggtgcctgtcagtgaggctgaatgtacagcgatgggtctgcgttcaggcaacctccgagatagattctggttggtgattaatcaggagggcaatatggtgacagcccgtcaggaaccaaggttggtgcttatatcactcacatgtgacggggatactctgaccttatcggcagcttacaccaaagacctgctcctccccatcaaaacaccgacaactaacgcagttcataagtgcagagtccatgggttggagatcgaagggagggactgcggggaggccaccgcccaatggattacatcctttttaaaatctcaaccttacaggttggtgcattttgaaccccatatgcgccccaggcgtcctcatcagattgcggatctgtttcggcctaaagaccagattgcctactcagatacttcgcctttcctgattcttagcgaggctagtctggctgacctgaatagtcgactggagaagaaggtgaaggcaaccaacttccgtcccaatatagtcatttctggctgcgatgtttacgcagaggatagttgggacgaactgttgattggagatgtggagctcaagcgcgttatggcctgttcccgctgcatacttacaaccgtagatccggacactggggttatgtcacggaaagagccgctggagacccttaaatcttatcgacagtgtgatcctagcgagcgcaaattgtatgggaaatctccgctctttgggcagtacttcgtgcttgaaaaccccggcactataaaagtcggcgaccctgtgtacctgcttggccagtag

SEQ ID NO: 124446 - DNA, 774 bp, synthetic construct
  misc_feature 1..774: note = Description of Artificial Sequence: Synthetic coding sequence
  source 1..774: mol_type = other DNA
atgggggcatcttcttcctctgcactcgccagattgggactgcccgcccggccctggcctagatggctaggggtagccgcactcggcctagccgccgtggccctcgggaccgtggcctggcggagagcgtggcctcgacggcgccgtaggctgcagcaagtgggaacggtcgccaaactgtggatttaccccgtgaaaagttgtaagggagtgccagtctccgaagctgagtgtaccgctatggggcttaggtcagggaatctgcgtgatcgtttctggttggtaataaaagaggacggacatatggtaaccgctaggcaggagcccagattggtactgatatcaatcatttacgagaacaactgcctgatttttcgcgctccagatatggatcagctcgtccttccttccaagcagcccagctcaaataaacttcataactgtagaatctttggactggacattaagggtcgcgactgcggcaacgaagccgcaaaatggttcaccaattttctgaaaaccgaggcatatcgtctggtccagttcgagactaatatgaagggccgtacatcccggaaacttctccccactctcgatcagaacttccaggttgcttatcctgactactgccccctcctgattatgactgacgcttcactggtggatctcaacacacggatggagaaaaaaatgaagatggagaatttccgcccaaacatagttgtcacggggtgtgatgcattcgaggaagcttcggctaccagacgcgactag

SEQ ID NO: 124447 - DNA, 1008 bp, synthetic construct
  misc_feature 1..1008: note = Description of Artificial Sequence: Synthetic coding sequence
  source 1..1008: mol_type = other DNA
atgggagcatcttctagttcagcactggcgcgcttaggtttgccagcgaggccatggcctcggtggctgggagtcgctgctctggggcttgccgctgttgccttggggactgtggcttggagacgggcttggccccggaggaggaggcgcctgcagcaggtgggtactgtagctaaactttggatctacccagtgaagagctgcaaaggcgtgcccgtttcggaggctgaatgcacagccatgggacttcggtctgggaacttgcgggacaggttttggctcgtgatcaaagaggatgggcacatggtgactgcccgacaggagccccgcctggtgttgatctccatcatatatgagaacaattgtcttatctttagggcgcccgatatggaccagctggtgctcccatcaaaacaacctagctcaaacaaactgcataattgccgaatttttggactcgacattaaaggacgcgactgcgggaacgaggccgctaaatggttcaccaatttcctcaaaaccgaagcctaccgcctggttcagtttgaaacaaacatgaaaggccggacatccagaaaactactccccacactcgatcagaatttccaggtcgcctatccagactattgcccacttctcatcatgactgacgcatcattagttgacctaaacacccgtatggagaagaaaatgaagatggagaactttagacccaacatcgtggtgacgggatgcgacgcctttgaggaggacacctgggacgaattgcttatcggctcggtcgaggtgaagaaagttatggcctgcccacgctgtatactaactacggttgatcccgatacaggcgtcatcgatcgcaagcaaccgcttgacactctgaaatcgtacaggctgtgtgacccctccgaaagggagctgtataaacttagtcctctgttcggaatttattactctgtggagaaaatcggttcccttcgggttggcgaccctgtttatagaatggtgtag

SEQ ID NO: 124448 - DNA, 519 bp, synthetic construct
  misc_feature 1..519: note = Description of Artificial Sequence: Synthetic coding sequence
  source 1..519: mol_type = other DNA
ggtcatatggttactgcccggcaagaaccacgtttggtcttaatatccatcatttatgagaacaattgtctgatcttccgggcgcctgatatggatcaattggtgctgcccagtaaacaaccttccagtaataagctacataactgccgaatttttggtctggatattaagggccgggattgcggaaacgaagcagcgaagtggttcactaacttcctcaaaacagaggcctaccggttagtgcagtttgaaactaacatgaaaggccgcacgtcacgcaagctgttgccgacactggaccagaattttcaagtcgcgtaccctgactattgccctcttctgatcatgactgacgctagtttagttgacctgaacactcggatggaaaaaaaaatgaagatggaaaacttcagaccgaacattgtcgtaacagggtgtgacgcttttgaggaggatacttgggacgagttgctgatcggttctgtagaggtgaagaaggtaatggcatgtccgaggtag

SEQ ID NO: 124449 - DNA, 447 bp, synthetic construct
  misc_feature 1..447: note = Description of Artificial Sequence: Synthetic coding sequence
  source 1..447: mol_type = other DNA
atgcccttcgccgaggataagacctacaaatacatatgtcgcaatttctccaatttctgtaatgtagacgttgttgagatcctcccatacctaccttgcttaactgcccgggaccaggacaggcttcgcgccacatgtaccctgtccggaaatcgtgacactctctggcatttattcaatactcttcagctgccaacctgggctggcgaggaaactcctggtgggcaaagctctggacgcggattagacttcagcagcctcacttcaggtgctgtgtggctgtggcaaatgtcagacttctggtcgtgcttctcaacatggactgtcagcatttggcttatcttgcattgggtgctactgaggctgaatcttcaagtcttcgccaagtgtctcgcccagagtaaatggccccttctcttgcctagtctgtcctgtccaacatggtag

SEQ ID NO: 124450 - DNA, 375 bp, synthetic construct
  misc_feature 1..375: note = Description of Artificial Sequence: Synthetic coding sequence
  source 1..375: mol_type = other DNA
atgcccttcgctgaggataagacgtataagtatatttgccgaaacttcagcaatttttgtaatgtggacgtagttgaaatcttgccttacctgccatgcctgaccgctcgcgaccaggatcgccttagggccacgtgtactttgagcgggaatcgggacaccctttggcatctgttcaacacgcttcaaagacgacctggctgggtagagtacttcattgcggccctccggggttgtgaactcgtcgatctggctgatgaggtagctagcgtttaccagtcctaccagccacagtttagagcttctccagccgacgcacaacctcaaagccaccctaaggaatcacgttggtggccaccaggagtcctcctttag

SEQ ID NO: 124451 - DNA, 1200 bp, synthetic construct
  misc_feature 1..1200: note = Description of Artificial Sequence: Synthetic coding sequence
  source 1..1200: mol_type = other DNA
atgcctgttcaggagacccaagccccggagagtcctggggagaacagcgaacaagctctgcaaacattgagccctcgcgcaattcccagaaatccggacggtggcccgcttgagtcaagctcagacttggccgccctgtcacccctgacctcatcaggacaccaggaacaggacaccgagctgggtagtacacatacggccggcgcaacaagctccctgaccccttcacggggtccagtcagccccagtgtgtcctttcagcccttagctcggagtacaccacgggcctctaggttgcccgggccgaccgggagcgtcgtgtctaccggcacatccttttcatcctcctcccccggattggcttctgcaggtgccgccgagggaaagcagggggccgagagtgaccaagcggaacctatcatttgttctagcggtgccgaagcccctgccaattctctgcctagcaaagttcctacgactctgatgcctgtcaatactgtggcactaaaggtgcccgccaaccctgcatccgtgtctacagtcccttcaaaactgccaacatcgtctaaaccccccggagctgtgccgagcaacgccctaacaaatcccgccccaagtaagctgcccatcaatagcactcgcgccggcatggtgccaagcaaggtgccaacatccatggtcctcacgaaggtgagtgcaagcaccgttcctaccgatgggtctagcagaaatgaggagaccccagctgcacccaccccagcaggcgcaacaggaggatctagcgcttggctggacagctctagcgagaaccggggactgggttccgaacttagtaaacctggcgtgttggccagtcaggtggattctccctttagtgggtgttttgaggatcttgcgattagtgcaagtacctccctggggatgggaccctgtcatggacccgaagaaaacgagtacaagtcagagggcacctttggcatccacgtggcagagaaccccagcatccaactgctggagggaaacccgggacctcctgccgaccccgacggcggccccagaccgcaggccgacagaaagtttcaggagagagaggtgccatgtcatagacccagtccgggggccctctggttgcaggtggccgtcactggggtgcttgtggtgactctgttggttgttttataccggagacgattgcattag

SEQ ID NO: 124452 - DNA, 1623 bp, synthetic construct
  misc_feature 1..1623: note = Description of Artificial Sequence: Synthetic coding sequence
  source 1..1623: mol_type = other DNA
atgcccttcgcagaggataaaacttacaagtatatctgtcgcaatttttcaaatttctgcaatgttgacgtggtggagattctgccgtatttgccatgcctgacggccagagaccaggaccggttgagagccacgtgtacactttcggggaacagagatacactttggcacctctttaacacactccagcgtagacccgggtgggtggaatattttatagccgcgctgcggggatgcgagcttgtcgatttagccgacgaagtggccagcgtctaccagtcctatcagccacgtacgagcgacaggccacccgaccccctggagcctccttctttgcctgctgaaaggccaggtcctcctacccccgcagccgcacatagcatcccatataactcctgtcgcgagaaagagccatcatacccaatgccagttcaggaaactcaggcacccgagtctccaggcgagaatagcgagcaagctttgcagactctcagcccacgcgctattccaagaaatccagatggcgggcctcttgagtcatctagcgatctggccgcactgtctcccctgacctcatccgggcaccaggagcaggataccgagctgggcagcactcacaccgcaggagccacttcttctctgactccttcccgggggccagtatccccatcagtgtcattccaacctcttgcgcgcagtacaccccgggcttcccgccttccgggcccaactggatccgtcgtatctaccggaaccagttttagtagttcttcccccgggcttgcaagtgcaggagccgccgaagggaaacagggcgccgagagcgatcaggctgagcccatcatttgctccagcggagctgaagccccagccaatagccttccgagcaaagtgccaaccacattaatgccagtgaacacagtggctttgaaggttcccgcaaatcccgcctccgtctcaaccgtgccatctaaactccctacatcatcaaagcccccaggcgccgttccatctaacgctctgaccaaccccgccccatccaaactgccaatcaattccacccgcgcaggcatggttccctccaaagtacccacaagtatggtgctcaccaaggtgtccgcttcgactgtgccgacggacgggagttcaaggaatgaggaaactccagccgcgccgactccagcaggggccacaggaggctcttccgcttggctggacagcagcagtgagaaccgagggcttggcagcgagctgtcgaagccaggagtcttagcctctcaggtcgattctcctttcagcgggtgtttcgaagatctggcaatttctgccagtacgtctctgggcatgggcccttgccacggacccgaggagaatgagtacaagtccgagggcactttcgggatccacgtggccgagaacccctcaatccaactgctcgaagggaaccccggaccacccgccgacccggacggcggcccaagaccacaggcggaccgtaagtttcaggagagagaggtcccatgccaccgaccaagcccaggggcactgtggctgcaggtagctgtaaccggggttcttgtggtgacactgttagtggtactatacaggagaagactccactag

SEQ ID NO: 124453 - DNA, 993 bp, synthetic construct
  misc_feature 1..993: note = Description of Artificial Sequence: Synthetic coding sequence
  source 1..993: mol_type = other DNA
atggccgccgcagctggcaggagtctgctcctcctgctcagctcaagaggtggaggcggcggcggcgcaggagggtgcggggcactcacagcagggtgctttcccggactgggagtgtctaggcaccgccagcagcagcaccaccgtactgtacatcagcgcattgcttcatggcagaacctgggagcagtatactgctccaccgtagtgccatcggacgatgtgactgtagtgtaccaaaatggactgcccgtaatttctgtgaggctgccaagccgtcgcgagcgttgccagttcaccctgaagccaattagtgatagtgttggcgtctttctgagacagctgcaggaggaggaccgtgggattgaccgagtcgcaatttatagcccggacggcgtacgtgttgccgcatccaccggcatcgatctgctgttgctggatgactttaagctggtcataaatgacctcacatatcatgttcgtcccccaaagagagttgaaatggggttctgccatgttggccagaacggttttgagttacttaccagcagctatctccccgccagtgccagccagtcagctgaaattattgccgtcagaattgaaatcagccgtaaggcagaaaaacggactactctagtgctgtgggggggcctggcatacatggctacccaattcgggatactggccaggctgacttggtgggagtacagctgggatatcatggagccggtcacatacttcattacatatggtagcgcgatggctatgtacgcctatttcgtgatgacacggcaggagtacgtctaccccgaggcacgtgacagacagtatctgctcttttttcacaaaggcgcaaagaagagcaggtttgacctggagaagtataaccaactgaaggacgcgatagcacaggccgagatggatctcaaacggctgcgggatcctttgcaagtccatctgcccctccgccagatcggagaaaaagactag

SEQ ID NO: 124454 - DNA, 1056 bp, synthetic construct
  misc_feature 1..1056: note = Description of Artificial Sequence: Synthetic coding sequence
  source 1..1056: mol_type = other DNA
atggctgcagccgctggtcggtcgctactgctgctcctcagcagtcgcggcggtggcggcggcggtgccggggggtgtggcgcacttacagcgggctgtttccctgggctgggggtctcaaggcaccgccaacagcagcatcacagaacggttcatcagagaattgccagctggcagaatctgggcgctgtgtattgcagcacagtcgtcccctcagacgatgtaaccgtggtgtatcaaaacggacttccggtgattagcgtgcggctgccttctcggagggaacggtgtcagttcactctgaaacctatctcagattcagttggcgtgtttctgcgccagctgcaggaggaggataggggtatcgaccgggtggcaatctatagccccgacggagtgcgggtagccgcctcgacaggaattgatctgttgttactagatgatttcaagctcgtgataaacgatctgacctaccacgttaggccacccaagcgggatctgctatcacacgaaaacgcagcgacactcaacgatgtcaagacactggtccaacagctgtacacgactctgtgtattgagcaacaccaattaaacaaagagcgggagcttatcgagagactcgaggatttaaaggaacagttggcacctctggaaaaagtccggatagagatatctcgaaaggctgagaaacgcaccacactcgtgctttggggcggactggcctacatggccacacaattcgggattctggctagacttacgtggtgggagtatagctgggacattatggagcccgtgacatacttcatcacatacggatcagccatggctatgtatgcttacttcgtcatgacgcgtcaagaatatgtgtaccctgaggcgcgagacagacaatatctgttattttttcataagggggccaagaagtccagattcgacctggaaaagtacaatcagcttaaggatgcgatcgcgcaggctgaaatggacctgaagagactgcgagatcccctgcaggtgcacctgcccctgcgccagattggcgaaaaggactag

SEQ ID NO: 124455 - DNA, 909 bp, synthetic construct
  misc_feature 1..909: note = Description of Artificial Sequence: Synthetic coding sequence
  source 1..909: mol_type = other DNA
atggtgcaccaacgaattgccagttggcaaaacctgggcgccgtgtattgttccacagttgtcccatctgatgacgtaaccgtcgtgtaccaaaacggcctgccagtcatctccgttaggctgccaagcaggcgtgagcggtgtcagttcacactcaagcccatctcagactctgtaggagtgtttttgcgccagttacaagaagaggataggggcatcgatcgggttgcaatctacagccctgatggcgttcgggtcgcagccagtaccggcattgatctcctgctcctagatgattttaagctcgtcattaacgatctgacttaccatgtccggccccccaaaagagacctgcttagccatgagaatgcagctacactgaacgatgtcaagacactggttcagcagttgtacacaactctttgcatcgagcaacatcagctgaataaagagcgagagctgatagaaagactcgaagaccttaaagaacaactggcacctctggagaaagtgcgtattgaaattagcaggaaagctgagaagcgcactaccctggtcctctggggcggactggcctatatggccacacagttcggcattctcgctaggttgacatggtgggagtattcctgggatatcatggagccagtgacatatttcattacctatggctccgcgatggctatgtacgcctactttgtcatgacgagacaggaatatgtgtaccctgaagcgcgggatagacagtatcttctcttctttcacaaaggtgctaaaaaatctagattcgaccttgagaaatataaccagctgaaggacgccatcgcacaggcagagatggatctgaaaagactgcgggacccactccaagtccaccttcccctgcggcagatcggtgaaaaagactag

SEQ ID NO: 124456 - DNA, 912 bp, synthetic construct
  misc_feature 1..912: note = Description of Artificial Sequence: Synthetic coding sequence
  source 1..912: mol_type = other DNA
atggctgacgctgccagtcaggtccttttggggtctgggctcactatcctgagccaaccgctcatgtatgtcaaggtgcttatccaagtcggctatgagcccctgccaccgacaatcggacgcaacatttttggccggcaagtttgccagttacccggcctgttcagctacgcccaacatatcgcgtctatagatgggcggcggggactcttcacaggcttgacccctcggctctgttcaggtgtactggggaccgtcgtgcatggtaaagttctccagcattatcaagagagtgacaaaggagaggaactcggaccaggtaatgtgcagaaagaagtgtcatcaagtttcgaccacgttattaaggagactactagagagatgattgcaagatcagctgcgaccctcatcacccatccattccatgtgattactttacgtagtatggttcagtttattggccgcgagagcaaatattgcggcctgtgcgactccatcatcactatatatcgggaagagggaattctcggttttttcgcaggactggttcctcggctattgggtgatatcctaagcctgtggctctgtaatagtcttgcgtacttagtcaacacctacgcattggacagcggcgtgtcaaccatgaatgagatgaaatcgtacagccaagcggtcacgggatttttcgcctccatgctgacttacccgtttgttctcgtgagtaatctgatggctgttaataactgtggcttggcagggggttgtccaccttactcaccaatttacacaagttggattgactgctggtgcatgctgcagaaggaggggaatatgagtcgaggcaatagtcttttcttcagaaaggtcccatttggtaaaacatactgttgtgacctgaagatgctgatctag

SEQ ID NO: 124457 - DNA, 468 bp, synthetic construct
  misc_feature 1..468: note = Description of Artificial Sequence: Synthetic coding sequence
  source 1..468: mol_type = other DNA
atggtgcagtttatcggtcgagaatccaagtattgtggactgtgcgattcaattattacaatctaccgtgaggaggggatcctgggattcttcgctggactggtgccacggcttctgggcgacatactgagtctatggctatgcaattcccttgcatacctggtgaatacctatgctcttgattccggcgtcagcaccatgaacgagatgaaaagctacagccaggcggtcactgggttttttgcatctatgttaacgtaccctttcgtgctggtatccaacctgatggccgtaaacaattgcgggctagcaggagggtgccccccctattcgccaatatacacaagttggattgattgttggtgcatgctgcagaaagagggcaacatgtcaagagggaactccctgttctttcgaaaggtgcccttcggcaaaacctactgctgtgacctcaaaatgttgatctag

SEQ ID NO: 124458 - DNA, 360 bp, synthetic construct
  misc_feature 1..360: note = Description of Artificial Sequence: Synthetic coding sequence
  source 1..360: mol_type = other DNA
atggttctgccacttccttggttaagcagataccacttccttcggctgttactgccatcttggagcctcgccccccaggggtctcatggttgttgttcacaaaacccaaaagcctccatggaagaacagacttccagcagaggaaatggcaaaatgactagcccccctcgcgggcccgggacccatcgtacagcagaactagccagagcagaggagcttctcgagcagcagctcgagctctatcaagccctgctcgagggacaggagggcgcctgggaggcccaggcactggtcctgaagatacagaaactaaaggagcagatgagacggcaccaggagagtcttggcggaggggcatag

SEQ ID NO: 124459 - DNA, 360 bp, synthetic construct
  misc_feature 1..360: note = Description of Artificial Sequence: Synthetic coding sequence
  source 1..360: mol_type = other DNA
atggtgttaccacttccttggctgtccagatatcatttcctgagattgcttctccctagctggtctctggcccctcaggggagtcatgggtgttgctcccagaatcccaaggcgagtatggaagaacagacaaactcccgggggaacggtaagatgacctctcctcccaggggaccaggaacccaccgcacggcagaacttgccagagcagaggagcttctggaacaacaactggagctgtatcaggcactgctcgagggccaggagggcgcctgggaggctcaagcactcgtgctgaagatccaaaagctgaaggagcagatgagaaggcaccaagaatctctcggcggaggcgcttag

SEQ ID NO: 124460 - DNA, 360 bp, synthetic construct
  misc_feature 1..360: note = Description of Artificial Sequence: Synthetic coding sequence
  source 1..360: mol_type = other DNA
atggtgctgccactcccttggctgagcaggtaccacttcctcaggcttctgctgccatcttggtctctggcacctcagggaagtcacggctgctgctctcaaaaccctaaagcctccatggaagagcagaccaactccagaggaaatggcaaaatgacttcaccccctcgggggcctgggacacatcggaccgctgaactggcaagagctgaggagttgctggagcagcagcttgaactttatcaggcacttttagagggtcaagaaggtgcctgggaggctcaggctttggtgctaaaaatacagaaactgaaggagcagatgcgacgacatcaagaatccctcggtgggggcgcctag

SEQ ID NO: 124461 - DNA, 360 bp, synthetic construct
  misc_feature 1..360: note = Description of Artificial Sequence: Synthetic coding sequence
  source 1..360: mol_type = other DNA
atggtcctacctctcccctggttgagcagataccactttctgaggctcttattgccatcttggtcacttgctcctcagggctctcatggctgttgctctcaaaatcccaaggccagcatggaggagcagacaagttctaggggaaacggaaagatgacaagtcctccacggggaccaggcacgcaccggaccgcagagctcgccagagcagaggagctgctggaacagcagctcgagttatatcaagccctgcttgagggccaggagggcgcttgggaggcacaagcattagtgctgaaaatccaaaaactgaaggaacagatgagaagacatcaagagtccctcggggggggtgcctag

SEQ ID NO: 124462 - DNA, 360 bp, synthetic construct
  misc_feature 1..360: note = Description of Artificial Sequence: Synthetic coding sequence
  source 1..360: mol_type = other DNA
atggttctgccactcccttggctgagtagataccatttcctccggttgctcctacctagctggtccttggccccacaaggctcccatggctgctgcagccagaaccccaaagctagcatggaagagcaaacctcatctagggggaatggcaagatgacttccccacctcgtggacccgggactcatcgcacggctgagcttgcacgcgcagaggaactgctcgaacagcagctcgaactctatcaggcgctcctggaaggacaggaaggagcctgggaagctcaggctttggtccttaagattcaaaagctcaaggagcagatgcggcgccaccaggagtccttaggagggggagcctag

SEQ ID NO: 124463 - DNA, 360 bp, synthetic construct
  misc_feature 1..360: note = Description of Artificial Sequence: Synthetic coding sequence
  source 1..360: mol_type = other DNA
atggtgctccctctgccctggttaagtagataccactttttgcgcctgctcctgccatcttggtccctagcaccccagggtagccacgggtgttgcagtcagaatcccaaggcaagtatggagaagcagaccaacagtaggggaaatggcaaaatgacatcacccccacgtggtcccggaactcacaggactgcagaattggcacgcgcagaggagttactagaacagcagcttgagctgtaccaggcactgcttgaaggacaagaaggagcctgggaggcacaagctctggtgctgaagatacaaaaattaaaagaacagatgcgcagacatcaagaatcccttggaggaggggcctag

SEQ ID NO: 124464 - DNA, 360 bp, synthetic construct
  misc_feature 1..360: note = Description of Artificial Sequence: Synthetic coding sequence
  source 1..360: mol_type = other DNA
atggtccttcctctcccctggctcagtaggtatcacttcctccgcttgctgttgccaagctggtccctagcaccacaaggcagtcatggatgctgctcacagaatcctaaggcctctatggaagagcagacaaactcaagaggcaatggaaagatgactagtccacctaggggacccggcactcaccgaacagctgaactagctagggcagaggaactgctcgaacagcagctcgagctctaccaggcactgctggaaggccaggagggagcatgggaggctcaggctctggttcttaagattcaaaagttgaaggagcagatgaggcgccaccaggaatctctgggcggtggcgcttag

SEQ ID NO: 124465 - DNA, 360 bp, synthetic construct
  misc_feature 1..360: note = Description of Artificial Sequence: Synthetic coding sequence
  source 1..360: mol_type = other DNA
atggtgctgcccttgccttggttgtcgcggtaccattttctgagactgctgctacctagctggagtctggcaccccagggctctcacgggtgctgtagtcagaatccaaaggcttctatggaggagcagacaaattcccggggtaacggcaagatgacctcgccaccccggggaccaggaacacacagaactgctgagctcgccagggctgaggagttgctggaacagcaactggagttatatcaggccctactggaaggacaggagggggcatgggaggcccaggctctggtgttgaagattcagaaattgaaagaacagatgcgtaggcaccaggaatctctcggaggtggagcttag

SEQ ID NO: 124466 - DNA, 1059 bp, synthetic construct
  misc_feature 1..1059: note = Description of Artificial Sequence: Synthetic coding sequence
  source 1..1059: mol_type = other DNA
atggagtccggaggaaggccaagcttgtgccagttcattctccttggcacaacctccgtggttacagcggctctgtacagcgtatatcgacaaaaggccagagtttcacaggagctgaaaggcgccaagaaggtgcacctgggtgaggacctgaagtccattctatctgaagccccagggaaatgtgtgccatatgccgtcatcgagggcgccgttcggagcgtgaaggagaccctcaattcacagttcgtggaaaactgtaaaggagtaattcagcgtttgactcttcaagaacacaagatggtttggaacagaaccacccacctttggaacgattgttctaaaattatccatcagaggaccaacacagttccctttgacttggtgccacacgaagatggcgtggacgtggctgtgagagtgctgaagccccttgacagcgtggacctgggccttgagacagtatatgaaaagttccatccctccattcagtcttttacagatgtgattggacactatatctctggagagcgccctaagggtatacaagaaaccgaggagatgcttaaagtcggggcgaccttaactggggtcggggagctggtcttagacaacaacagtgttcgtctccagcctccgaaacagggcatgcaatactatctaagctcccaggatttcgactcgctcttgcagagacaagagtcctcagtccgactctggaaagttctggccttggtctttgggttcgctacctgtgcaacattgttttttatcctcagaaaacagtaccttcagaggcaggagcgactccgactgaaacagatgcaagaagaattccaagagcatgaagcccaactcttgagtcgcgccaagcccgaggatagggagtcgcttaagtctgcctgcgtggtttgccttagctcatttaaaagctgcgtgttccttgagtgtggtcatgtttgttcatgtaccgagtgttaccgcgccttgcccgagccgaagaagtgtcccatctgtaggcaggctattactagagttataccactgtataactcctag

SEQ ID NO: 124467 - DNA, 2142 bp, synthetic construct
  misc_feature 1..2142: note = Description of Artificial Sequence: Synthetic coding sequence
  source 1..2142: mol_type = other DNA
atgttatgcgtgggccgccttggaggcttaggggcacgcgccgcggcattacccccgagacgggctggccggggatctctggaggccggtattcgagcccggcgggttagcacatcctggagtcctgtcggcgctgcatttaatgtgaagcctcagggcagccggctggatttatttggggagaggcgcggattattcggcgtcccagagctttcagctcccgaagggttccatatcgcacaggaaaaggcgcttagaaaaaccgagctgctcgtagaccgcgcctgctcaacccctcccggcccgcagaccgttctcatctttgatgagctctctgactcactttgcagggttgctgacttggccgatttcgtgaaaattgcacaccctgagccagcatttagagaagcagcagaagaggcttgccgttcaatagggaccatggtggaaaagttgaacacaaacgtggatctttaccagtccctacagaagctgttggcggacaagaagttggtggacagcctagaccccgaaacaaggcgcgtcgccgagttatttatgttcgacttcgagatcagcggcatccacctggataaggagaagcggaaaagagccgtggacctcaacgtgaagatactggacctttctagtacctttctaatgggcacaaactttccaaacaaaatcgagaagcacctccttccggagcacataaggcggaatttcaccagcgcgggtgaccatattatcatcgacggcttacacgccgaaagtcccgacgatctggtgcgtgaagccgcatataagatctttctttatcctaacgctgggcagttgaaatgtctcgaggaactgttgtcctcccgtgacctgctcgctaaactagtcggctattctactttcagccaccgcgcattacagggcacaattgctaagaatcctgagacagtgatgcaatttctggagaagctgtcagacaagttgtcagaacgcaccctcaaggactttgaaatgataaggggcatgaaaatgaagctcaacccccagaattctgaagtcatgccctgggaccctccctattactctggcgtgatcagagcagagcggtacaacatcgagccaagcctgtactgtcctttcttcagcctgggtgcatgtatggaggggctaaatattttactaaaccggctcctgggcatcagcctgtatgctgagcagcctgctaagggcgaggtttggagcgaggacgtgcgcaaactagccgtggtacacgaatctgaggggttgctcggctacatttattgcgacttttttcagcgcgccgataagccgcaccaggattgccattttaccatccggggtggccgactcaaggaagacggagactaccagctgccggtagtggtactgatgttgaatttgcctaggtcctcacggagctcgcccactctgttaacacctagtatgatggaaaacctgttccacgaaatgggtcatgcgatgcactccatgctcggaagaacacgctatcaacatgtgaccggcaccagatgccctacagacttcgcagaagtcccctccatcctaatggaatattttgccaatgactaccgcgtggtgaaccaattcgccaggcactatcaaaccggacaacccctgcctaagaacatggtgtcaagactctgcgagagtaaaaaggtgtgcgcagctgcagacatgcagttacaggtgttttacgctactctcgaccagatctatcacgggaagcaccccctgcgaaacagtacaaccgacatcctgaaggagacccaggagaagttttacggcctgccctacgtccccaatacagcctggcagctcagattctcacacctcgtagggtatggcgcccgatactattcctatcttatgtctcgggcagttgcttcgatggtttggaaggaatgcttcttacaagacccattcaacagggctgccggggagaggtaccgacgggagatgctggcacacgggggtgggcgagaacctatgctcatggtagaaggaatgctgcagaaatgcccatctgtggacgattttgtctctgccctcgtttctgatctggacctggactttgagacgttcctaatggactcggaatag

SEQ ID NO: 124468 - DNA, 1353 bp, synthetic construct
  misc_feature 1..1353: note = Description of Artificial Sequence: Synthetic coding sequence
  source 1..1353: mol_type = other DNA
atgtccgccatccaagcagcctggccttcaggtaccgagtgtatcgccaagtacaacttccacggaactgccgagcaggacctgccattctgcaagggagacgtgctcacaattgttgctgttactaaggatcccaactggtataaagccaaaaataaggtgggaagagaagggatcatccctgctaactatgtgcagaaaagggagggcgtgaaagccgggaccaagctgtccctgatgccatggtttcacgggaagattaccagggaacaggcagagagattgctgtaccccccggagaccggcttatttttggtacgtgaaagtactaattatccaggcgactacaccctgtgtgtgagttgcgacggtaaggtcgagcactacaggatcatgtatcatgcctctaaactctcaatcgacgaagaagtgtattttgaaaacctgatgcagcttgtggagcactatacgtccgatgcagatgggctgtgtacacggcttatcaagcccaaggtgatggaggggaccgtggccgctcaggacgagttttaccgaagcggatgggctctgaacatgaaggagctgaaactgctccagaccatcgggaagggggaatttggcgacgtcatgttaggagattatagggggaacaaagtggccgtcaagtgtataaagaatgacgctacggcgcaagctttcttggcagaggcgagtgtgatgacacaactgaggcactctaatttagtacagctcctgggggtgattgtagaggagaaaggggggctctatatagtgacggaatatatggccaagggatccctcgtcgactatctgcgttctaggggtcgcagtgttttaggaggagattgtctcctgaagtttagcctggatgtgtgtgaggccatggaatatctggagggcaacaatttcgtgcaccgcgaccttgcagcaaggaatgtactcgtgagcgaggataatgttgccaaggtaagcgactttggtctgacgaaggaagcgtcatctacacaagacacaggcaaactgcctgttaaatggaccgctcctgaggctctgagagaaaagaagttctctacaaaaagtgatgtctggtctttcggaatcctgttgtgggagatttactcttttggtcgcgtgccgtacccccgcatccctctcaaagacgtcgttcctagggttgagaaggggtacaagatggatgctcccgatggctgccccccagcagtctacgaggtcatgaaaaactgttggcatctggacgccgccatgaggcccagttttttacagctgcgagaacaactggagcacattaagacacacgaattacatctgtag

SEQ ID NO: 124469 - DNA, 1170 bp, synthetic construct
  misc_feature 1..1170: note = Description of Artificial Sequence: Synthetic coding sequence
  source 1..1170: mol_type = other DNA
atgcgcgtacttgtgagaaggtgttggggccctccgctggctcacggagctagaagaggacggccttccccccagtggagggcactggctagactggggtgggaagactgccgggattcccgtgtccgggagaaacctccctggcgggtcctttttttcgggacggaccagttcgcaagagaagccctgagggctttgcacgccgctcgggagaacaaggaagaagaactcatagacaagctggaagtggtcacaatgcccagcccgagcccgaaaggactccctgtgaagcagtacgcggtacagtctcaactgccagtctacgagtggccagacgttggctctggcgagtacgatgtgggagtagttgcatcctttggcaggctactgaacgaagcactaatcctgaagtttccttacggcatcctgaacgtgcacccttcttgtttgccccgctggcggggtcccgcccctgttattcacaccgtactgcatggcgataccgtcaccggggtgaccattatgcagatccgccccaaacggtttgatgtgggccccatcctcaagcaagagacagtccctgttccccccaagtctacagccaaagagctggaagcggtcctgtccaggctaggagcaaatatgttgatttctgtgctgaaaaatcttcccgaaagcctgtctaacggcaggcagcaacccatggaaggggccacgtatgcgcctaaaatctccgccggaacgtcgtgcatcaagtgggaagaacagacatccgagcaaattttcagactgtacagggctatcggcaatatcattcctctgcagaccctatggatggccaataccattaaattgctcgatctcgtcgaagtgaacagctccgtcttggctgacccaaaacttacgggccaggcactcatcccaggatcagtcatctatcataagcagagccagattttgttggtatactgcaaagatgggtggattggagtgcggagtgtcatgctgaagaagagcctcaccgcaactgacttctataacgggtatcttcacccttggtaccagaagaatagccaagcgcaaccgagtcaatgcagattccagacattgagactgcccacaaaaaagaaacaaaagaagactgtggcgatgcagcagtgtatcgaatag

SEQ ID NO: 124470 - DNA, 1749 bp, synthetic construct
  misc_feature 1..1749: note = Description of Artificial Sequence: Synthetic coding sequence
  source 1..1749: mol_type = other DNA
atggccgtccctggggttggacttctgacccgactgaatttatgtgcacgccggagaacccgtgtgcagagaccgattgttaggctcctctcttgtcccggaacagtggctaaggaccttcgacgagatgagcagccctcaggatcagtggagactggattcgaagataaaatacctaaacggcggttctcagagatgcagaacgaacggcgtgagcaggcgcaacggactgtgctgatccactgcccggagaaaattagtgaaaataagttccttaagtacctatctcagttcggacccatcaataaccacttcttctatgaaagcttcggcctctatgccgtggtggaattttgtcaaaaggagtccatagggtctctgcagaatggcacacacactccttctacggcaatggagactgcaatacctttcaggagccggtttttcaacctaaagctgaagaatcagacctccgagaggagcagagtgagatcctccaaccagttgccacgctccaataaacagctattcgagcttctgtgctatgcagaatccattgatgatcaattgaatactctcctgaaggagtttcagctgacagaggagaatacaaaactcaggtaccttacgtgttctctgattgaagatatggcagcagcttatttcccggattgcatcgtgaggccattcggatcctcagtcaacaccttcgggaagctgggatgcgacttagatatgttcttagaccttgatgaaacgcggaatctgagcgcacacaaaatctcagggaactttcttatggaattccaagtaaagaacgtcccctccgagcggatcgctactcagaaaatactgagcgttctgggggaatgtcttgatcatttcgggcctggatgtgtgggagtccagaagatcttgaatgcacgctgtcccctggtcaggttcagccaccaggcatctggctttcagtgcgatctgactactaataatcgtatcgcactaacatcctccgagctcctgtacatatacggagcattagacagtcgggtgcgagctcttgtgttttcggtgcggtgctgggcccgcgcccactccctcaccagctcgattccaggggcgtggattacaaatttctctctgaccatgatggtcattttcttccttcagcgtagatcccccccgatcctgcctacacttgattctctcaaaacactggctgatgccgaagataagtgtgtcatcgagggcaataactgcactttcgtgcgggatctatcccggatcaaaccatcccagaataccgagacacttgaactgctcctgaaggagttcttcgagtatttcggcaatttcgcatttgacaaaaatagtattaacatcaggcaaggcagggagcagaataaaccagactcatcacctctatacatccagaatccgttcgagaccagcttaaacatcagcaagaacgtttcacagagtcaactccagaaattcgtcgatctggcaagggagtcagcgtggatactccaacaggaggataccgaccgtccgtcaatctctagtaatcgcccctggggcttggtttcattactccttccctccgcaccaaatcggaagtcttttacaaagaagaaatccaacaagtttgcaattgagacagttaaaaatttactggagagcctcaaaggaaaccggactgaaaacttcacgaagactagcggcaagagaacaataagcacacaaacatag

SEQ ID NO: 124471 - DNA, 2139 bp, synthetic construct
  misc_feature 1..2139: note = Description of Artificial Sequence: Synthetic coding sequence
  source 1..2139: mol_type = other DNA
atggcctgggcgaagaaggttggcgggagagctgggcagggtcgttctttgtcacgatgcgacccaattattctggaccccgaatggctctacggtccacccgaaggggagggagggcccgaaggggtaggaggagaaacccgggcatcaatccatcccccgcttcgcactggaaggcaccaccagaaggtcaatcacaacatcagaggacctgagggaagtgccaaggacgccgctccggggggcggcgggcaccatcaggccggcccaggccaaaggggcgacgaagatggagcactgcaacacctatgtggtggcggcggtggagtcggtgtgtcagtcgggagagggaccggtactagcgtggccgctgagcacccaagcctgcaggtcaagttactggaactacaggagcttgtgctcagactggctggagaccacaacgagggacacgggaagtttctcgccgcagcccagaacccggctgatgaccccgcacccggtgcacccgcccctcaggaacttggcgccgccgacaaacagggcggattcgaggataagatcccaaagaggcggttttccgagatgcagaatgagaggagggaacaggcccagaggaccgttcttatccactgccctgaaaagatcagcgaaaataaattcctgaaatacctatcccaatttgggcctataaacaaccacttcttttatgagtcctttggcctctacgctgtggtcgagttctgtcagaaggagtctatcggcagcctccagaatggaacccatacaccgtccaccgcaatggaaactgccatcccctttcgtagtaggttcttcaacttgaagttgaagaatcaaacttccgaacgttctcgagtccggtcttctaatcagctgccacggtctaataaacagctctttgaattgctttgctacgcggaatcaatcgatgatcagctgaacaccctgcttaaggagttccaactcacagaggagaataccaagctccgctatttaacatgttcattaatcgaagatatggctgccgcttatttcccagactgcatcgtaaggccctttggctccagcgtgaatacctttggcaagctcggatgcgacctggatatgtttttggacctggacgagaccagaaatctgtccgcccataagatctcgggtaatttcttgatggaatttcaggttaagaatgtcccaagcgagaggattgccacccagaagatcctttctgtactcggcgagtgtctggaccattttgggcccggttgtgtgggtgtccagaaaattttgaacgcacgttgtcctctggtgagatttagccatcaagccagcggcttccagtgcgacctcacaaccaacaatcggatcgcactgacttcttcggagctcctttacatttacggtgcgctcgacagtagggtacgggcactggtgtttagcgtgcggtgctgggccagggctcactcactcacatcctctatcccgggcgcctggatcactaatttcagccttaccatgatggtaatattttttctacaaagacggtcccctcctattctacctactctggactctctgaagacactggctgatgcagaggacaaatgcgtgatcgaggggaataactgtacctttgtgagagatctctcacgaatcaaaccatctcaaaacactgaaacccttgagctgcttttaaaggaattcttcgagtatttcggaaactttgcctttgataagaatagcattaacatccgccaaggcagagaacagaacaaacctgattctagtccattgtacattcagaacccttttgaaacctccctcaacatctctaagaacgtctcccagagccagctgcaaaagttcgtggatctggcccgagaatcagcttggattctacagcaagaagataccgatagacctagcatctcttctaatcgcccttggggcctggtctcactgctgctgcctagcgccccgaacaggaaatcctttaccaaaaagaagtccaacaagtttgcgattgagactgtcaagaatttgctggagagcctgaaagggaaccggactgagaactttaccaagacaagtggcaagcggacaatctctacccagacatag

SEQ ID NO: 124472 - DNA, 660 bp, synthetic construct
  misc_feature 1..660: note = Description of Artificial Sequence: Synthetic coding sequence
  source 1..660: mol_type = other DNA
atgcaaaacgaacggcgggagcaggctcagaggactgttcttattcattgtcctgagaagatatcggaaaacaagtttttgaagtatctgagtcagttcggacctattaacaaccacttcttctacgagagctttggcctgtatgcagtcgtcgaattctgtcagaaagagtccatcgggagtcttcagaatggcacccatacgccatctactgctatggaaacggccatcccatttcgaagtcgtttctttaacttaaaattaaaaaatcagaccagcgagcgcagcagggtacgctcctccaatcagttacctcgcagtaataagcagcttttcgagctgctgtgttacgccgagtcaatcgacgaccagctgaatactctgctcaaagaatttcaactgactgaggaaaacacgaaactcagatacttgacatgcagtttgatcgaagacatggcagcggcttacttccctgattgcattgtgcggcctttcggatcctctgtgaacactttcgggaaactggggtgcgacctcgatatgttccttgatctcgatgaaactcgcaacctctctgctcacaagatctcggggaatttcttgatggagtttcaggttaagaacgtaccgagtgagagaatcgccactcagaagatatag

SEQ ID NO: 124473 - DNA, 453 bp, synthetic construct
  misc_feature 1..453: note = Description of Artificial Sequence: Synthetic coding sequence
  source 1..453: mol_type = other DNA
gatctgcggcgggatgaacagccttccgggtccgtggaaacaggctttgaagataagattccaaaacggagattctccgaaatgcagaatgagagaagagagcaggctcagaggaccgtattaatccactgtccagagaaaattagtgagaataaattcttaaaatatctatcacagtttggacccataaataaccactttttttacgagtcctttggcctttatgccgtcgtcgagttctgccaaaaggaaagtatcggttcccttcagaacggaacccacacaccaagcaccgctatggaaactgccataccgtttagatctcggttcttcaatctgaagcttaagaaccagaccagtgaacgtagccgcgtgaggtcttccaaccagctgcctagaagcaacaaacaactattcgagctgttgtgctatgctgagtctgtatccttctag

SEQ ID NO: 124474 - DNA, 309 bp, synthetic construct
  misc_feature 1..309: note = Description of Artificial Sequence: Synthetic coding sequence
  source 1..309: mol_type = other DNA
atgtttttgaccgcgttgctttggcggggacgtatacctgggcggcagtggatcggcaagcataggaggcctcgctttgtatcactcagagcgaagcaaaacatgatcaggcgcttggagatagaagcagaaaaccattattggctcagcatgccatacatgacacgggagcaggagaggggccatgcagccgtccggcgccgagaagctttcgaagccatcaaggcagccgcgacctccaaatttccaccccacaggttcattgccgaccagttggatcatctgaatgtcacgaagaagtggagctag

SEQ ID NO: 124475 - DNA, 978 bp, synthetic construct
  misc_feature 1..978: note = Description of Artificial Sequence: Synthetic coding sequence
  source 1..978: mol_type = other DNA
atggcggccgccgtgaggtgcatggggcgggctctgatccatcatcagcgtcacagtctttctaaaatggtttaccagacttcactctgtagctgctccgtaaacatccgagtacctaatcgccatttcgccgcagcaactaagagcgccaagaagacaaagaagggagccaaggagaaaacgcctgatgagaaaaaggatgagattgagaagataaaggcttacccctacatggaaggcgagcccgaagatgacgtgtatcttaaacgactctacccacgacagatttacgaggtggagaaagctgttcacctgttgaaaaaatttcagatcctggactttactagtcccaaacagtctgtgtacctggatctaaccctcgacatggccctaggcaaaaagaaaaatgtagaaccttttacaagtgtcctgagtctcccttatcccttcgcatcggaaattaacaaggtggcagtctttaccgagaatgcctctgaagtgaagatcgctgaggaaaacggggccgcgtttgcaggtggtacatcgctgatacagaagatttgggacgatgaaatcgtcgctgacttttacgttgccgtaccggagatcatgcctgaactgaacaggctccgaaagaagttaaataagaaataccctaaactcagtcgaaactctattggccgtgatatccccaagatgctggaactgtttaagaacggccacgagataaaggtggacgaggagagagaaaactttctgcagaccaaaattgcaacacttgacatgtcatcagatcaaattgccgcaaacctccaggccgtgattaatgaagtgtgcagacacaggccgcttaatctggggccgttcgtcgtccgggcctttctccggtcttccaccagtgagggacttctgctgaagatcgaccctttactgcccaaggaggtcaagaacgaagaatctgagaaagaggatgcctag

SEQ ID NO: 124476 - DNA, 909 bp, synthetic construct
  misc_feature 1..909: note = Description of Artificial Sequence: Synthetic coding sequence
  source 1..909: mol_type = other DNA
atggtgtatcagactagtctatgcagctgtagtgtgaacatcagagttcccaaccgtcactttgcagccgccacaaaaagtgccaaaaagaccaagaagggcgccaaggagaagacacccgatgaaaaaaaggatgagatagaaaaaattaaggcctacccatatatggaaggggagcccgaggatgatgtgtatcttaagaggctataccccagacagatctacgaggtagaaaaggccgtacatctgttgaaaaagtttcagatcttagactttacctcacccaaacaaagcgtctacctggatctgactctcgatatggctttgggaaaaaaaaagaacgtggaaccttttactagcgtgctctcgctcccttacccgtttgcgagtgagatcaataaggttgctgtgtttaccgaaaatgctagtgaggtaaaaattgctgaagagaatggagctgcgtttgccggagggacgagtctgatccaaaaaatctgggatgacgaaatagtcgccgacttttatgtggctgtcccggaaataatgcccgaactgaacaggctccgcaagaagctgaataaaaagtaccccaaactgtctcggaacagtattgggcgtgacatcccaaaaatgctcgaactgtttaagaacgggcacgagatcaaggtagacgaagaacgtgagaacttcctgcagactaagatagcaactctggatatgagtagcgatcagattgccgccaacttgcaggccgtgattaacgaggtttgccgccaccgccccctgaatctgggaccctttgtggtaagagcttttctgcgctccagtacttctgaaggccttttgttaaagatcgatcccctgttaccaaaggagatcaaatcccagcctaagaaaaagaaaaactag

SEQ ID NO: 124477 - DNA, 816 bp, synthetic construct
  misc_feature 1..816: note = Description of Artificial Sequence: Synthetic coding sequence
  source 1..816: mol_type = other DNA
atgatttcagcacactgcaacctccatttaccaggttcatccgacagccctgccagcgcaagccaggttgctgggatcaccggcaggctcccgacacttcagactgtccggtacggctccaaagctgtcacgcgacacaggagggtgatgcatttccagcgacagaaactgatggctgtgacagaatatatcccacccaaaccagccatacaccccagctgtttacccagcccacccagtcctccacaggaagaaattggtctcatcaggctgttgcgcagggagatagcagcggtgtttcaggataataggatgattgccgtctgtcaaaatgtcgccctgtctgccgaggataaactcctgatgcgccatcagttgcgtaaacataaaatcctgatgaaagtgttcccaaatcaggtgctaaagcccttcttggaagactcgaaatatcaaaacctgctccccttgttcgtgggtcataatatgctactagtctccgaggagcctaaggtcaaggaaatggtgcggatccttagaactgtccccttcctgccgctgctgggcgggtgcatagatgacacaatattatccaggcaaggctttataaactatagcaagctaccttctctccctctagttcagggcgagctcgtgggcggtctgacatgtctaaccgctcagacccatagtctgcttcagcatcaaccgctgcagctcacaaccctgctagaccagtacatccgggagcagcgagaaaaagacagtgttatgagtgcgaatggtaagccggaccctgatacggtcccggactcatag

SEQ ID NO: 124478 - DNA, 786 bp, synthetic construct
  misc_feature 1..786: note = Description of Artificial Sequence: Synthetic coding sequence
  source 1..786: mol_type = other DNA
atggccgctgcagtcgctggcatgcttcgcgggggccttctccctcaggcaggacgcttgccgacactgcaaactgttagatatggttccaaggctgtaacacgtcacaggcgtgtgatgcactttcagcgccagaagctgatggcagtgacagagtatattcctccgaaaccagctattcatccgtcctgtctgccatctcccccgtctccaccacaggaggagatcggcctcatcagactgctacgacgcgagatcgcagccgtctttcaggataatagaatgatagctgtctgtcagaatgtggcactttcagccgaagataaacttctgatgagacaccagcttcgtaaacataagatccttatgaaagttttccccaaccaggttctgaagccattccttgaggattccaaatatcagaatctgttacctttgtttgtcggtcataatatgctcctggtcagcgaagaaccaaaagtcaaggagatggtacgtatactgcgaactgtccctttcctaccccttcttgggggatgtatcgacgatactatactgtcacgccagggattcattaactactccaaacttccatctcttcctcttgttcaaggcgaactggtcgggggcctgacgtgtctgacagcccagactcattctctcctgcagcaccagcctctgcaactcacgaccctactggatcagtacataagagagcagagggagaaagactcagtcatgtccgcgaacggtaagccagacccagacaccgtgccggatagctag

SEQ ID NO: 124479 - DNA, 816 bp, synthetic construct
  misc_feature 1..816: note = Description of Artificial Sequence: Synthetic coding sequence
  source 1..816: mol_type = other DNA
atgatttcagcacattgcaacctgcacctcccggggtcttcagacagccccgcttccgcctcacaggtagccggtatcactggacgcctacccaccctccagaccgttcggtacgggtccaaggctgtgacacgccatagaagggtgatgcactttcagcggcaaaaattgatggcagttactgagtatattcccccaaagccagccattcatccgtcatgtctgcccagtcccccgagtccaccccaggaggaaattggactcattcggttgctgaggagggagatcgcagccgtctttcaggacaacagaatgatcgcagtctgtcaaaatgtggccttgtctgctgaggacaaacttcttatgagacatcagctgcgtaaacacaagatcctgatgaaggtattcccgaatcaagttctgaagccgttcctggaggattcaaagtatcaaaatctgttgcccctcttcgtcgggcataacatgctgctcgttagcgaagagccaaaggtcaaagaaatggtgcgcatcctcaggaccgtgccattcctgccgcttctcggcggctgcatagacgacaccattctctcccgccagggcttcattaattacagcaagctgccctcattgccactcgtccagggagagctagtgggaggcttgacatgcttaactgcgcagacacatagcctccttcagcatcagccactgcagttgacgacactattagatcagtacatccgggagcagagagagaaggatagcgtgatgtctgctaacggaaagccagatccagataccgtcccggactcctag

SEQ ID NO: 124480 - DNA, 579 bp, synthetic construct
  misc_feature 1..579: note = Description of Artificial Sequence: Synthetic coding sequence
  source 1..579: mol_type = other DNA
atgagtaaactgggaagagctgcgcggggtctgcggaagccagaagtcggtggggtgatccgggccattgtcagagcagggcttgctatgccaggcccccctttggggcctgtgctgggccagcggggggtgtccatcaatcaattttgcaaggagttcaatgagaggaccaaggacatcaaagagggcatcccactacctaccaagatcctggtaaaacctgatcgtaccttcgaaattaagattgggcaacccaccgtttcttacttcctgaaagctgccgccgggatagaaaagggcgctaggcagacgggcaaggaagtcgccgggctggtgaccctgaagcacgtctacgaaattgctcgaattaaagcgcaggatgaggctttcgcacttcaggatgtaccattaagctccgtggtgcgctctatcattggttccgccagatccctcggaattagagtggtgaaggatctttcttccgaagaactggccgcttttcagaaagagcgcgcgatttttctggcagcccagaaagaggctgacctggcagcgcaagaggaagccgccaaaaaatag

SEQ ID NO: 124481 - DNA, 546 bp, synthetic construct
  misc_feature 1..546: note = Description of Artificial Sequence: Synthetic coding sequence
  source 1..546: mol_type = other DNA
atgtccaagctggggcgagctgcccgcggcctgcggaagcccgaagttggtggcgtgatcagggctatagtacgagcagggctggcaatgccaggcccgccactgggccccgtcctgggacagcgcggtgttagcattaatcagttctgcaaggagttcaacgaacggaccaaggatattaaagaggggatcccactaccaactaaaattctcgtaaaacccgataggacgttcgagatcaagataggccagccgacagtgtcatactttctgaaagccgcagcagggatcgagaaaggagccagacagacagggaaggaagttgccggcctggtgacgctgaaacatgtctacgagatcgccaggattaaggcacaggacgaggcttttgccttacaggacgtacctctgtcttctgttgtgagaagcatcatcggttccgctcgcagcttgggcattcgcgttgttaaggaacggtgctccgctaatgtactgcgtaacggaaaaatttccatgaaagatccatcaggacggagctctgtgtag

SEQ ID NO: 124482 - DNA, 501 bp, synthetic construct
  misc_feature 1..501: note = Description of Artificial Sequence: Synthetic coding sequence
  source 1..501: mol_type = other DNA
atgtctaaactggggcgggccgcgcgcggactgcgcaagcccgagcggggcgtgagcattaaccaattttgtaaggaattcaatgagcgaacaaaggatattaaagaaggaatccctttaccaactaagatcttagttaagcccgaccggacctttgaaatcaaaattggacagcccactgtcagctatttccttaaagcagcggctggcattgagaagggagcacgacaaacaggaaaggaagtggccggattggtcaccctgaagcatgtatacgagatcgcccgcataaaagctcaggacgaagcttttgcgctccaggacgtccctttgagctccgttgtgaggtcgatcattgggtccgctaggagcttgggtattcgggtggtaaaagacctgagctccgaagagctcgctgcttttcagaaagagagggctatcttcttggctgcgcagaaagaggccgacctggcggctcaagaggaggccgctaaaaagtag

SEQ ID NO: 124483 - DNA, 891 bp, synthetic construct
  misc_feature 1..891: note = Description of Artificial Sequence: Synthetic coding sequence
  source 1..891: mol_type = other DNA
atggcagctgaggcaagagtttcgaggtggtattttggcgggctggcttcctgtggggcagcctgctgcacgcatccactagacctgttgaaggtgcatctgcagacacagcaggaggtgaaactacgcatgacggggatggccctcagagtggttaggactgacggtatcctggcgttatactcgggactgtcagccagcctctgccgacagatgacctatagccttactagatttgcaatctatgagaccgtgcgcgatagggtggccaagggctctcagggccccctgccatttcatgaaaaagtgctcttagggtccgtctccggacttgccggcgggttcgtgggcactccagctgatttggtcaacgtccgcatgcagaacgacgtgaagttgccccagggtcagcgtcgcaattacgcccacgctctggatgggctctatcgtgtggcacgcgaggaggggttgagacgactcttcagcggggctaccatggccagcagccgaggggcactggtcacagtgggccagctctcctgttatgatcaggccaagcaattagtgctatcgacgggctacctgagcgacaacatatttacgcacttcgtcgccagttttatagccgctgcaggcgacgagccgccgccgcagggcggttgtgctaccttcctctgtcagcctctggacgtcttgaaaaccagattgatgaattcaaagggggagtatcagggggtgtttcactgtgcagtggaaactgccaaattgggcccgctggcgttttacaagggcctggtgcctgctggcattcgtctcatcccccatacagttctcacattcgtgtttctggagcagcttagaaagaattttggcattaaggtgccgagttag

SEQ ID NO: 124484 - DNA, 537 bp, synthetic construct
  misc_feature 1..537: note = Description of Artificial Sequence: Synthetic coding sequence
  source 1..537: mol_type = other DNA
atgctcccagcggctgccaggcctttgtggggcccgtgtctcgggctcagagccgcggccttccgtctcgcccggaggcaggtgccatgcgtgtgcgctgtccgacatatgaggagttccggccaccaaaggtgtgaagccttggcaggcgcaccactggataatgctcccaaggagtacccgccaaagatccagcagctcgtgcaggacatcgcttcgctgacgctgctggagattagtgaccttaacgaactccttaaaaagaccctgaagatacaggacgtgggccttgtcccaatgggaggagttatgtccggagccgttcccgccgcggccgcccaggaggccgtcgaagaagatatccccattgcaaaggaacggacacacttcacagtacgtctaaccgaagctaaaccagtcgataaagtgaaactcattaaagaaataaagaattatatcaaagcttccacttcgtcccggcagcgcagctggtggagcccctgtccaggcaatcagtcccaatgccggcagtcctag

SEQ ID NO: 124485 - DNA, 597 bp, synthetic construct
  misc_feature 1..597: note = Description of Artificial Sequence: Synthetic coding sequence
  source 1..597: mol_type = other DNA
atgctgcctgctgctgctaggcctctctggggtccctgtctggggcttcgtgcggctgctttcaggttagcccgacgacaggtgccttgtgtctgcgccgtgaggcatatgcggtcctcagggcatcagaggtgcgaggctttggccggcgctcctctggacaatgcgccaaaagaatacccccctaagatccaacagctggtccaagacatcgctagcttaacactgctggagatttctgatctgaacgagctgcttaagaaaaccctcaaaattcaggacgtggggctggtccccatgggaggagtgatgtccggagctgttcccgcagcggccgctcaggaagccgtagaggaggatatcccaattgctaaagagagaactcattttactgttaggctcaccgaggccaagcctgtcgataaagtgaaactgattaaagaaataaagaattacattcaaggaattaacctcgtgcaggcaaagaaattagtcgagagcctaccacaggaaatcaaagcgaacgtggcaaaggccgaggcggagaaaatcaaggccgcgctcgaggccgttgggggcacagtggtcctagaatag

SEQ ID NO: 124486 - DNA, 864 bp, synthetic construct
  misc_feature 1..864: note = Description of Artificial Sequence: Synthetic coding sequence
  source 1..864: mol_type = other DNA
atggccgctgaggcacgagtcagcagatggtatttcgggggcctggcctcatgtggcgccgcatgctgcacccaccctctggacctactgaaagtgcatttgcagacgcagcaggaggtcaagttgcggatgaccggcatggctcttcgggtcgtgagaactgatggcattctggcgctgtatagcggcctgtctgcaagcctgtgccgccagatgacatattccctgactaggtttgctatttacgagacggtgcgggatagggtggccaagggtagtcaaggaccgctgcctttccatgagaaggtcctgctgggctcagtaagtggcctggctggaggctttgtagggacacccgctgacctagttaacgtgaggatgcagaatgatgtgaaactgccccaggggcaacggaggaactatgcccatgctttagatggcctgtacagagtcgcgcgcgaggaaggtctgaggaggctttttagcggcgcgacgatggcctcctcccgtggtgccctggtgacggtgggacagctgagctgctacgatcaggctaaacagttggtgctgtctactggctatctgtccgacaatatttttacccattttgtggcgtcttttatcgccggaggatgcgcaacttttctttgtcagccactcgacgtcctgaagacacggctgatgaattccaaaggtgaataccaaggcgtctttcactgcgctgtggagacagcgaagttgggacctcttgccttctataagggtctcgtgccggctgggattcggctgatccctcacacagtgctgactttcgtattcctcgagcaactccgaaagaatttcggcatcaaggttccctcatag

SEQ ID NO: 124487 - DNA, 1329 bp, synthetic construct
  misc_feature 1..1329: note = Description of Artificial Sequence: Synthetic coding sequence
  source 1..1329: mol_type = other DNA
atgctccctgcagcagcccgcccactgtggggaccgtgtctaggcctgcgggcggctgccttcagactggctcgtcgccaagtgccctgcgtttgtgcagtgcgacacatgagatcgagtgggcaccaacgctgtgaggcactggctggcgctcctttggataatgccccgaaggagtacccccccaaaattcagcagcttgtgcaggacatcgccagtcttaccctgctggagatatccgatctgaacgagctgttgaagaaaacccttaagatccaggatgttggcctcgttcctatggggggggtcatgagcggtgcagttcccgcggcagcggcccaagaagccgtagaagaggatattcctatcgcaaaggagcggacccacttcaccgtgcgtctgaccgaggccaagccagttgacaaggtgaagctgataaaggaaatcaaaaactacatccagggaatcaacctggttcaggccaaaaagttagtggagtcattgccacaggaaatcaaagccaatgtggccaaggcggaagccgaaaagatcaaagcagcactggaggcgacacaacaggaagttaagctccgaatgacaggcatggcactgcgcgtcgtccggactgatggcattttggcactgtactcaggtctgtccgccagcctgtgccggcagatgacctactccctcacaagattcgctatttacgagacagtcagggacagggtcgcaaaaggcagccagggaccactgccgttccatgaaaaggtcctgctcgggtcagtcagcggcctggcaggagggtttgtcggcaccccagctgacttggtgaacgtcaggatgcagaatgacgtaaaattgccccagggacagcggcgtaactacgctcacgctcttgacggcctttatcgagttgcaagagaagaagggctgcggcgactgttttctggagccacaatggcaagcagtcgcggtgcactggttacggttggccagctgtcctgctatgaccaggcaaagcagctggtgctgagtacagggtacctgtccgataacatatttactcacttcgtggcctcattcatcgccgggggttgcgctactttcctttgtcagcccctggatgtgctcaagacaaggttgatgaactcaaagggggaatatcagggcgtatttcactgtgccgtggaaacagccaaattaggtcccctggcattttacaagggactggtgcctgctgggattagactgattccccacaccgttctcacgtttgtgtttcttgagcaactgcgcaaaaacttcggcatcaaggtcccctcctag

SEQ ID NO: 124488 - DNA, 735 bp, synthetic construct
  misc_feature 1..735: note = Description of Artificial Sequence: Synthetic coding sequence
  source 1..735: mol_type = other DNA
atgacaggcatggcattgcgggttgtccgaactgatggaattctcgctctgtattctggtctgtctgcctccttatgccgccaaatgacatattccctgacccggttcgccatctacgaaaccgtgcgagatagagtagcgaaaggctctcagggtccattgcccttccacgagaaggtattattgggttcagtgtcaggtctggctgggggatttgtcggtacccctgctgacttagtgaatgtgcggatgcagaacgacgtgaagcttccccagggccagcgaaggaattatgcccatgctctcgatggattatacagagtcgcccgggaagagggcttgagaaggctgttcagtggtgcaaccatggccagcagtcgaggtgccctagtaactgtggggcaattgtcttgctacgaccaagccaagcagttagttctgtctaccggatatttgtccgataatatcttcactcattttgtggccagcttcatcgctggcggctgcgctaccttcctctgtcagccgcttgacgtgctgaagacccgccttatgaacagtaaaggagagtatcagggtgtgtttcattgtgctgtggagaccgccaagctgggtcctctggcattctataagggattggtgccagccggcattcgtctgatcccacacactgtcctaaccttcgtgtttctcgaacagctgagaaagaattttgggattaaagttccatcttag

SEQ ID NO: 124489 - DNA, 438 bp, synthetic construct
  misc_feature 1..438: note = Description of Artificial Sequence: Synthetic coding sequence
  source 1..438: mol_type = other DNA
atggcctttttcacgggcctctggggacctttcacctgcgttagtcgggtgctgtcccaccactgcttttcaaccacgggatctttgtctgctatccagaagatgacccgggtccgggttgtagacaattctgccctgggcaattcgccctaccacagggcccccagatgcattcatgtgtataaaaagaatggggtaggcaaagtgggtgatcagatccttctagctataaagggtcagaaaaagaaggcgctcatcgttggacactgtatgccggggcccagaatgacgcctaggttcgactccaataacgttgtgctcattgaggacaatgggaatcctgtgggcacaagaattaagacacctatcccaactagcctgaggaaacgtgagggggagtactcaaaagtgctggcgattgcccaaaactttgtatag

SEQ ID NO: 124490 - DNA, 891 bp, synthetic construct
  misc_feature 1..891: note = Description of Artificial Sequence: Synthetic coding sequence
  source 1..891: mol_type = other DNA
atggccgggccgctgcaggggggtggcgctcgggccctcgatctacttcgcggcctcccccgcgtgtcgctcgccaaccttaaacccaatcccggaagtaagaaaccagagcggaggcctcggggacggcggcgggggcgcaaatgcgggcgcgggcacaagggggaaagacagaggggcacccgcccccgccttggcttcgagggggggcagactcccttttacattcgcatccctaagtatggctttaatgaggggcattcattcagacggcagtacaagcccctatcactgaaccgactacagtatctcattgatctgggacgcgtcgacccatcacaacccatcgacctgacacagctagtgaatggaaggggggtgacaattcagccactcaaacgcgattatggcgtccagctggtggaggagggcgcggatacatttactgctaaagttaacatagaggttcagctcgcaagcgaattggctattgctgctatcgaaaagaacggaggggtggttaccactgcattctacgacccccgatccctggatattgtctgcaagccagtaccatttttcttgcggggccagcccataccgaaaagaatgctgccaccagaggagctggtgccatattatacagatgccaagaaccgcggataccttgctgaccccgccaagtttccagaggcccggttggaactcgccaggaagtacgggtacatcctgcctgatataaccaaggatgaactgttcaaaatgctgtgtactagaaaagatcctcgccaaatcttttttggactagctcccggttgggtagttaacatggctgacaaaaagatcctcaagcccaccgatgaaaacctgctgaagtattacacatcctag

SEQ ID NO: 124491 - DNA, 756 bp, synthetic construct
  misc_feature 1..756: note = Description of Artificial Sequence: Synthetic coding sequence
  source 1..756: mol_type = other DNA
atgtggagactgctagcaagggcctccgccccactgctgcgcgtcccactgtcagactcatgggcactgctgcccgctagtgccggagtgaaaaccctgctaccagtcccttccttcgaggatgtctcaattccagagaagcctaagctccggttcatcgagagagctccactggttccaaaagtgagacgagaacccaagaacctgagcgacattcgcggtccaagtacggaggcaaccgaattcacagaggggaatttcgccattctggcactgggcgggggctacctgcactggggtcattttgagatgatgcgccttacgattaaccgatccatggaccccaagaatatgtttgctatctggcgggttccggcccccttcaaacccatcacgcgtaagagtgtcggacatagaatgggggggggcaagggggctatagaccattacgtgaccccggtgaaggccgggcgcctggttgtggagatgggcggacggtgtgaatttgaagaagtccaaggttttttggaccaggtagctcataagttgccgttcgcagctaaggccgtcagccgcgggaccttagaaaaaatgcggaaagaccaggaagagcgggagaggaacaaccaaaatccatggacctttgagcggatagccaccgccaatatgctagggatacggaaggtcctgtccccttatgatctcactcataagggaaaatactggggcaagttctatatgcccaaacgtgtgtag

SEQ ID NO: 124492 - DNA, 528 bp, synthetic construct
  misc_feature 1..528: note = Description of Artificial Sequence: Synthetic coding sequence
  source 1..528: mol_type = other DNA
atgaggttaagcgtggccgcggcgattagccatggaagggtgttcaggcgaatggggctcggtccagaatcgcggatacatcttctccgaaacctcctcacgggcctggtgcggcacgagaggattgaggccccttgggctcgcgtggacgagatgagaggttacgctgagaagctgatcgactacggaaaactgggcgacacaaacgaacgcgccatgcgaatggccgacttttggttgaccgagaaagacctgatacccaaacttttccaggtccttgcaccgagatataaggaccagactggcggttacaccagaatgctgcagatcccaaaccggagcctggatcgggccaaaatggccgtgatcgagtataaggggaactgcctgcctcccctaccattacctcgtagagattcgcatttgaccttactcaatcagctgttacagggactgagacaggacctcagacagagccaggaagcaagtaatcattcatcccataccgcccagacccccggaatctag

SEQ ID NO: 124493 - DNA, 543 bp, synthetic construct
  misc_feature 1..543: note = Description of Artificial Sequence: Synthetic coding sequence
  source 1..543: mol_type = other DNA
atggctctacgcagtcggttttggggcctgttttctgtttgcaggaatcctgggtgtcgatttgccgcgttgtcaacaagtagtgaacctgccgccaaaccagaggtcgacccagttgagaatgaagcagtggcacccgagtttaccaaccggaacccccggaacctcgagctcctgagcgttgccaggaaagagcggggatggaggaccgtgtttccaagtagggaattttggcataggctcagggtgattcgaacacaacaccatgtggaggctcttgtcgagcatcaaaatggtaaagtggtggtgtctgccagcaccagagagtgggctataaaaaagcacctatactccaccagaaacgtggtcgcctgcgagtcgatcggtagggtgctcgcccagcgctgcctggaggccggaatcaattttatggtttaccagcccactccatgggaggctgcttctgactcaatgaaaaggttgcagtcggctatgaccgaaggcggcgtagtcctccgtgaaccccagaggatttacgaatag

SEQ ID NO: 124494 - DNA, 879 bp, synthetic construct
  misc_feature 1..879: note = Description of Artificial Sequence: Synthetic coding sequence
  source 1..879: mol_type = other DNA
atggcggcctgtatcgctgctgggcactgggcggccatggggctggggcgaagctttcaggctgcccgcaccttacttcctccacctgcttccatcgcgtgtcgtgtccacgcaggtccagtccgacagcagagtacaggaccttccgagccgggggccttccaaccaccccccaagccagtcattgtcgataaacatcggcccgttgaacctgagcggcgattcctgagtcctgagtttattccccgaaggggccgcactgatcctctgaagttccaaattgagaggaaggatatgctggagagaaggaaagtactgcacattcccgagttttatgtcggatcaatcctgagggtcacaacagctgacccttatgcttcaggcaagatatctcagtttttaggcatttgcatccagaggtcaggaaggggactgggtgccacttttatcctccgaaatgtgatcgaaggtcagggagtggagatctgctttgagctctacaacccccgggttcaggaaatccaggtcgtgaagctcgaaaagagactggacgactctcttctgtatctgcgggatgccttgcccgaatactctacgtttgatgtgaatatgaagccagttgtccaggagccgaatcagaaagttcccgtgaatgaactcaaagtgaaaatgaagcctaagccatggagtaagcgctgggaacgtcccaatttcaatatcaagggcatccggttcgatttgtgcctgactgaacagcagatgaaagaggcacagaagtggaaccagccctggctcgagtttgatatgatgcgggaatacgataccagtaaaattgaagccgcaatctggaaggaaattgaggcctcgaaaagatcatag

SEQ ID NO: 124495 - DNA, 879 bp, synthetic construct
  misc_feature 1..879: note = Description of Artificial Sequence: Synthetic coding sequence
  source 1..879: mol_type = other DNA
atggcagcctgtatcgcggccggccactgggctgccatgggcttgggccgctcttttcaagcagctaggacactgctgccaccacccgcctccatcgcttgccgggttcatgccgggcctgtgcggcagcagtctactggccctagcgagccgggagccttccagccccccccaaagccggtcattgtggataaacatcggcctgtggaacccgaaagacggtttctgtccccggagttcattccccgacgcgggaggacggacccattaaaatttcagatcgagagaaaagatatgctggaacggaggaaggtgttacatatcccggaattctatgtggggagtatcctccgtgtgaccaccgctgacccttacgccagcgggaaaatctcccaattcctggggatttgtatccaacgctcaggaaggggcctgggggcaacgtttatcctcaggaatgttatcgagggacagggggtggaaatctgcttcgaactgtataacccaagagttcaggaaatacaggtggttaagctggaaaaacgcttggatgatagtttgctatacctgcgcgacgctctcccagaatactctaccttcgacgtcaacatgaaacccgtcgtacaagagccaaatcagaaagtgcctgtgaacgagctgaaggtgaagatgaaaccaaagccttggagcaaaaggtgggagaggcccaacttcaatataaaggggatccggttcgatctttgccttacggagcagcagatgaaggaagcacagaagtggaatcaaccctggctcgaatttgatatgatgcgtgaatatgatacaagtaagatcgaagccgcgatctggaaggagatagaggccagcaagagaagctag

SEQ ID NO: 124496 - DNA, 240 bp, synthetic construct
  misc_feature 1..240: note = Description of Artificial Sequence: Synthetic coding sequence
  source 1..240: mol_type = other DNA
aaagtaccagtgaacgaactaaaagttaagatgaaacccaaaccctggtctaaaaggtgggaacgcccgaactttaacataaagggaattcggttcgatttgtgcctaactgagcaacagatgaaggaagcccagaaatggaaccagccctggctggagttcgacatgatgcgtgagtacgacacttctaaaatcgaagccgcaatatggaaggaaattgaagcctccaaaagatcatag

SEQ ID NO: 124497 - DNA, 918 bp, synthetic construct
  misc_feature 1..918: note = Description of Artificial Sequence: Synthetic coding sequence
  source 1..918: mol_type = other DNA
atggcgctgtgcgcactgactagagcccttcgcagcctcaatctcgcgcctcccaccgtggccgctcctgcgccgagtctattccccgccgcacaaatgatgaacaacggccttctgcaacaaccatcagcactgatgctgctgccttgtcgcccagtattaaccagtgtggcgttaaatgccaacttcgtgagctggaagagtcgcacgaaatatactattacacctgttaagatgcgcaagtcagggggtcgcgatcataccggcagaattagagttcacggaattgggggcggccacaaacagcggtaccgaatgattgactttctcagatttaggcccgaagagactaagtctggtccattcgaggagaaggttatccaggtgagatatgatccatgtagatctgcagatattgcactggtagccggaggttcacgaaaaagatggatcatcgccacggagaatatgcaggctggcgatacaatactaaactcaaaccatataggacggatggcagtggccgcccgagagggagacgcccaccctctcggcgctcttccagtgggcacactgatcaacaacgtggaaagcgagcccggacgtggtgctcagtacatccgggctgcaggaacatgtggcgttttgctgagaaaggtaaacggcacagcgatcatccagctgcctagcaaaagacaaatgcaggttctggagacctgcgtggccaccgttgggcgggtgagcaacgtcgaccacaacaaaagagttattggtaaagctggccgcaaccgatggcttgggaaaagaccgaatagtggccgctggcacagaaagggcggctgggcgggacgcaaaatccggccgcttcctccaatgaaaagctatgtgaagttgcctagtgcatccgcccagtcctag

SEQ ID NO: 124498 - DNA, 450 bp, synthetic construct
  misc_feature 1..450: note = Description of Artificial Sequence: Synthetic coding sequence
  source 1..450: mol_type = other DNA
atggtattcctcaccgcacagctgtggttgcggaatcgggtcacagacagatattttagaattcaggaagttctgaagcacgccagacactttcgcggacggaaaaatcgatgctacaggctcgcagtgcggactgtgatcagggctttcgtgaaatgcaccaaggcgcgttatcttaaaaaaaagaatatgcggactctctggatcaatcgcatcaccgccgcatcacaggaacacggtttgaagtaccccgctctgataggaaaccttgttaagtgccaggtggagctgaatagaaaggtgttggctgatctcgccatctacgagcccaagacgtttaagtccctggctgctttggcctctcgacggcgtcacgaagggtttgctgcggctctcggggacggcaaggagcccgaaggtattttcagcagagtggttcagtatcattag

SEQ ID NO: 124499 - DNA, 618 bp, synthetic construct
  misc_feature 1..618: note = Description of Artificial Sequence: Synthetic coding sequence
  source 1..618: mol_type = other DNA
atggccgccagctctctgaccgtgacactgggtcgtctcgcaagcgcttgttctcactccatcctgagaccatcaggaccaggagcagcttctctgtggagcgccagccgaagattcaacagtcaaagcacctcttacttaccaggatatgtccccaagacatccctgagtagcccaccttggcccgaggtcgtcctgccagatcccgtggaggagactagacaccacgccgaggtggtgaagaaagtgaacgaaatgatcgttaccggccagtacgggcggctgttcgccgtggttcacttcgcctcacgacaatggaaggtgacctctgaggatttgattctcattggcaatgagctagatctggcctgtggggaaagaatccggctagaaaaggttctgctagtgggtgccgacaatttcactcttctcggaaagcccctcctgggcaaagacctcgttagggtggaagccacagtgatcgaaaagacagagagctggccaaggatcatcatgcggttccggaagaggaaaaattttaaaaagaagcgtattgtcactacaccccagaccgtcctgaggataaattccattgagatcgctccctgtcttctgtag

SEQ ID NO: 124500 - DNA, 843 bp, synthetic construct
  misc_feature 1..843: note = Description of Artificial Sequence: Synthetic coding sequence
  source 1..843: mol_type = other DNA
atggccgcgtctagcttgactgtgacgctgggaaggctggcatcagcctgctcccactccatactgaggccctctggtcctggtgccgcaagtctgtggtctgcttcccggagattcaatagccagagcacatcttacctccccggttacgtcccaaagactagtttatctagtcccccatggcccgaggtggtcctgcccgacccagtcgaagagacccgccaccacgccgaagtggtgaagaaggtgaacgaaatgatcgtgacagggcagtatgggcgcctttttgccgtcgtgcacttcgcaagcaggcagtggaaagtgacctcagaagatttgatactgatcgggaatgagttggatctggcttgtggggaacggatccggttggagaaagtgctactggtcggagctgataacttcaccctgttaggaaagccgttgctcggtaaagatcttgtgagagtggaggccaccgtgatcgagaaaacagagtcctggccccggatcataatgcgcttcagaaaacgcaagaacttcaagaaaaagcggtctaaattagagaaggttcctttgggccctgtggcgaggtgttggctgccgcggcgcatgagaacggagggcgtgggccatgtggggcttggcactggctcaccaggaaggtcccagcctggatgtcattgcccactggctactcttattctggaaggagcaccgagaggtagcagcctcgctcctttattactgcacgctcccagggtcacaccccctagatctcctagcccccctcgatccgctagggatccaacctccctgcccttttctagcacactccgggcttag

SEQ ID NO: 124501 - DNA, 363 bp, synthetic construct
  misc_feature 1..363: note = Description of Artificial Sequence: Synthetic coding sequence
  source 1..363: mol_type = other DNA
atgattgttactggccagtacggaagactgtttgcagtcgtacatttcgccagccgccagtggaaagtgaccagtgaagacctcatcctgattgggaacgagctggatcttgcctgcggcgaaaggatacggctggagaaggttctgctagtgggcgctgacaactttacactgctgggaaagccactgcttggcaaggatttggtgcgggtcgaggccactgtgattgagaaaaccgagagttggcccaggataattatgagattcagaaaaaggaagaatttcaagaaaaagcgcatcgtgacaaccccacaaaccgtcctgcgcatcaactctattgaaattgccccatgcctgctgtag

SEQ ID NO: 124502 - DNA, 381 bp, synthetic construct
  misc_feature 1..381: note = Description of Artificial Sequence: Synthetic coding sequence
  source 1..381: mol_type = other DNA
atgtggtatcttgccaaactaatccgaggaatgtccatcgaccaggctctggcccaattggagtttaacgacaagaagggtgccaagattatcaaagaagttctccttgaggcacaggacatggcggttcgggaccacaatgtggagttccggagcaatctgtacattgcggaaagcaccagcggtagagggcagtgcctgaaacggatccgctatcatgggcgcggaagatttggcatcatggagaaagtgtactgccactactttgtcaaactcgtcgaaggcccacccccacctcctgaaccccctaagaccgctgttgcccacgccaaggagtatattcaacagctgcggtctcggactatagtgcatacattgtag

SEQ ID NO: 124503 - DNA, 699 bp, synthetic construct
  misc_feature 1..699: note = Description of Artificial Sequence: Synthetic coding sequence
  source 1..699: mol_type = other DNA
atggccgccgccgtcctaggccagcttggtaaagacttcctggtcgttaaaagacaaaaaggcgtggagatggagtccgagctcactgcgtgtgttgatgtggcaggggcactgtggattcacaacctgaggagccgcgggaaactggctctcggcgtcttgccacagtcttatatccacaccagcgcaagcctggatatcagcagaaaatgggaaaagaagaataagatagtgtatcctccccagctcccaggggaacctcggcggcccgccgagatctatcattgcagaagacagatcaaatattcgaaagacaagatgtggtatctcgccaagctcatcagagggatgtctatcgatcaggcactggctcaacttgagtttaatgacaagaagggggcaaaaatcatcaaagaggtgctcctcgaagcgcaggatatggctgttagggaccacaacgtggaattccgctcaaacctgtacatcgccgaatctacgagcggaaggggtcagtgcctgaagagaatacgctatcatggcaggggtcgatttgggattatggagaaggtttactgccactatttcgtgaaacttgttgagggaccccctccgcctccagaacctcctaagacagccgtggcacatgccaaggaatatatacaacaacttcggtcgagaacaatcgtgcacaccctgtag

SEQ ID NO: 124504 - DNA, 639 bp, synthetic construct
  misc_feature 1..639: note = Description of Artificial Sequence: Synthetic coding sequence
  source 1..639: mol_type = other DNA
atggctgcagctgtgctgggccagctcggggccctctggatccataacttgagaagtcgtgggaagctagccctgggactgcttagcttccacagcgtcctgccacaaagctatatacatacctctgcttctctggacatttcccgtaagtgggaaaaaaaaaacaaaatcgtttacccacctcagctgcccggagagccaaggcgccctgccgaaatttatcattgtcgtcggcagatcaagtattctaaagataagatgtggtatcttgccaagctaattaggggaatgtcaattgatcaggctctagcccagctggagttcaacgataaaaaaggcgctaagatcattaaggaggttctgctcgaagcacaggacatggcggtgagagatcacaatgttgagtttcgctccaacttatacattgctgagagtaccagtgggcgtgggcagtgcctcaagaggatccgttaccacggtcgtgggcgttttggaattatggagaaggtctattgccattacttcgtgaagttggtggagggacctcctccccctcccgagccgcctaagaccgcagtcgcccatgctaaagagtatatccagcagctccggtccagaactatcgttcatacactctag

SEQ ID NO: 124505 - DNA, 621 bp, synthetic construct
  misc_feature 1..621: note = Description of Artificial Sequence: Synthetic coding sequence
  source 1..621: mol_type = other DNA
atggctgcggccgtgttaggccagctcggcgccctgtggatccataatctccggagccgcggaaaactagctttgggcgtcctgcctcagtcctacatacacaccagtgcatcccttgacatctcccggaagtgggaaaagaagaacaagatcgtgtaccctcctcaactgccgggtgagcctaggaggcccgcagaaatataccactgtcggagacagatcaagtattcaaaggataagatgtggtaccttgctaagctgatcaggggcatgagcatagatcaagcacttgcgcagctggaatttaatgataagaaaggcgcaaaaatcatcaaagaagtgctattggaagcccaggatatggctgtgagagaccacaatgtagagtttagaagcaacctgtacatcgctgagtcaacaagcggccgtggtcagtgtctcaagcgcatcaggtatcatggccgcggccgttttggaatcatggagaaggtttattgccactactttgtgaaactggttgagggacccccaccaccacctgaacctcctaagacagctgttgcccatgccaaagagtacattcagcaattacgcagccgaactattgttcataccctctag

SEQ ID NO: 124506 - DNA, 462 bp, synthetic construct
  misc_feature 1..462: note = Description of Artificial Sequence: Synthetic coding sequence
  source 1..462: mol_type = other DNA
atggcacggaacgtggtgtatcccctctacagactcggcgggccccagctccgggtttttaggaccaatttcttcattcagctcgtgcggccgggtgtggcacagcctgaggataccgtgcagtttcgaatccccatggaaatgacacgagtagacctgaggaattatctagaaggaatttacaatgttccagtcgccgcagtaagaaccagagttcagcatgggtcgaataagcgacgggaccataggaatgttagaatcaaaaagcctgattataaggtggcatacgtgcaactcgctcatgggcagacattcacattccctgacctgtttcctgaaaaggatgagtccccagaaggcagtgctgctgacgatctgtactcaatgctggaggaggagaggcagcagcgtcaatctagcgacccccggaggggaggtgtgccatcctggttcgggctatag

SEQ ID NO: 124507 - DNA, 462 bp, synthetic construct
  misc_feature 1..462: note = Description of Artificial Sequence: Synthetic coding sequence
  source 1..462: mol_type = other DNA
atggcacgcaatgtggtgtaccccctttacagactgggcggtccacagcttagagtgtttagaaccaactttttcattcagctggttcgacccggagtcgcccagccggaggataccgtccagtttagaatccccatggagatgacccgggtggacctgagaaattaccttgagggcatctacaatgtgcccgtggcagccgtgcgcacccgcgttcaacacggatccaacaagagaagagatcaccgcaatgtgcggatcaaaaagccggattacaaagtcgcatatgtgcagctcgcacacggtcaaacctttacttttcctgatctgtttcccgagaaagatgagagccctgagggctccgcagccgacgatctttattccatgctggaagaggagcgccagcagcgtcagtcatcagatccaagacggggaggtgtgccttcttggtttggattatag

SEQ ID NO: 124508 - DNA, 651 bp, synthetic construct
  misc_feature 1..651: note = Description of Artificial Sequence: Synthetic coding sequence
  source 1..651: mol_type = other DNA
atgcgactgagcgccctgctggcattagcctccaaggtgactttgcccccacattaccggtatgggatgagtccgcccggttctgttgccgataagagaaaaaaccccccatggattcgacgcagaccggtagtcgtcgaaccaatatcagacgaagattggtatcttttctgcggcgatactgtggagatcttagagggcaaggatgctggaaagcagggaaaggtggtccaggtgatccgacagcgaaactgggtggtggttggaggtttgaacacccattataggtatattggcaaaaccatggactatcgaggtacgatgatcccctccgaggctccattgctgcaccggcaggtgaaattggtcgacccaatggaccgcaaacccaccgaaattgagtggagatttaccgaggcgggcgaaagggttcgagtgagtaccaggtccggacgcattatacccaagccagaattcccacgggcagacggcatcgtgcccgagacttggatcgacgggcccaaggacacgagcgtagaggacgccctggagagaacctatgtgccttgcctcaagaccctccaagaggaagtcatggaggccatgggtataaaagagacccgtaaatacaagaaagtttattggtactag

SEQ ID NO: 124509 - DNA, 651 bp, synthetic construct
  misc_feature 1..651: note = Description of Artificial Sequence: Synthetic coding sequence
  source 1..651: mol_type = other DNA
atgcgtctgtccgccctcttggccttggcgtccaaggttaccctaccacctcattatcggtacggaatgtctcctccaggatccgttgccgacaagagaaagaaccctccttggatcaggcggagacccgtggtagttgagccgatctcagatgaggactggtacctgttctgtggtgacacagtggaaatcctggaaggcaaggacgctgggaagcagggcaaggtggttcaggttattagacaacggaattgggtggttgtgggggggctgaatactcattataggtatatcggtaaaactatggattatcgaggaaccatgattccaagcgaagccccacttctgcatcggcaagtaaagttggttgatccaatggatcgcaaacccacagaaatcgaatggaggttcactgaggcgggggagagagtacgtgtctcgaccaggagtggccggattataccaaaaccagagttccccagggcagatggtatcgtgcccgagacttggatcgacggaccaaaagacacatcagttgaagatgcactggagcgaacctacgtgccctgtctgaagacgctgcaggaagaagttatggaggcaatggggatcaaggagacacgtaagtacaagaaagtatactggtactag

SEQ ID NO: 124510 - DNA, 300 bp, synthetic construct
  misc_feature 1..300: note = Description of Artificial Sequence: Synthetic coding sequence
  source 1..300: mol_type = other DNA
atgcggttatctgccttgctggccctggcttctaaagtaactctgcccccccattataggtatggaatgagccctccaggatctgtggctgataagcgaaagaatcctccctggatccgacggaggcccgtggtcgtggaaccaatttcagacgaggattggtacctgttttgcggcgacactgttgagatactggagggaaaagatgccggtaagcagggtaaagtggtgcaagtcatacggcaaagaaactgggtcgttgtcggaggcctgaatacacactacagatatatcggatag

SEQ ID NO: 124511 - DNA, 207 bp, synthetic construct
  misc_feature 1..207: note = Description of Artificial Sequence: Synthetic coding sequence
  source 1..207: mol_type = other DNA
atgcggctttcagcacttctggcccttgctagtaaagtgactctccctccccactatagatatgggatgagccctccaggaagcgtggcagacaagcgcaaaaacccaccctggattagaaggcggccggttgttgttgagccgattagtgatgaagattggtacctgttttgtggggacaccgtggagatactggaaggtaaatag

SEQ ID NO: 124512 - DNA, 522 bp, synthetic construct
  misc_feature 1..522: note = Description of Artificial Sequence: Synthetic coding sequence
  source 1..522: mol_type = other DNA
atgagactgtccgctttgctggcactggcttccaaagttaccctgcccccccattacaggtatggtatgtctccgccaggcagtgtagccgacaagcggaaaaaccccccgtggatcagaagaagaccagtcgtggtggagcctattagcgacgaggattggtacctgttctgcggagacaccgtggaaatcttagagggaaaggatgccggtaagcaaggaaaagtggttcaggttatccgtcagcggaattgggtggtagtcggagggcttaacacccattatcgctatatcggaaagaccatggactacaggggcactatgatcccctctgaggctccgctgcttcatagacaggtgaagcttgtggatcctatggaccggaaacctaccgagatcgagtggaggttcaccgaagctggagaacgagtgcgagtctcaacccgctcgggcaggattatccctaagccagagtttcccagggccgacggaatcgtgcctgaaacctggattgacggctag

SEQ ID NO: 124513 - DNA, 4395 bp, synthetic construct
  misc_feature 1..4395: note = Description of Artificial Sequence: Synthetic coding sequence
  source 1..4395: mol_type = other DNA
atgttctcgttcgtggaccttcgcctgctcctgcttctggccgctactgccctgctcacacatggacaagaagagggacaggtcgaaggccaggacgaggacatcccgcccatcacctgcgtccagaatggacttaggtaccatgacagagacgtgtggaagcccgaaccctgccggatctgtgtatgtgacaacggcaaagtgctgtgtgatgacgttatttgcgacgaaacaaaaaactgtcctggggcagaggtaccggaaggagagtgctgccccgtctgccccgacgggtcagaaagccctaccgatcaagagacaaccggggtagagggaccgaaaggcgacaccgggcctagggggcctagggggcccgcgggaccccctggacgtgatgggattcccggacagcccggcctgccgggaccacccggtccccccggaccgcccggtcctcccgggttgggaggaaatttcgccccccagctgagttatgggtacgacgaaaaaagcacggggggaatcagtgttcctgggcctatgggcccctccggccctagaggtctgcccgggccccccggggcgccgggaccccagggattccaaggccctccaggcgagcccggcgagcctggggcttctggaccaatgggccctagaggcccacctggaccaccagggaaaaatggggacgacggagaagccggcaagcctggcagacccggcgagaggggccccccagggccccagggcgcccgcggactccccgggactgctgggctgccggggatgaagggacatcggggattttccggtttggatggagccaagggtgacgcaggcccggctgggcccaagggtgagccggggtcacctggcgagaatggggcacccggccaaatgggaccacggggactgcctggggagcgtgggaggcctggcgctcctggacccgctggggcccggggaaatgacggggcaaccggagccgccggacctccgggcccaaccgggcccgccgggccacccggctttcctggagccgttggtgcgaagggggaagcaggacctcaagggccgcgcgggtccgaggggccgcaaggcgtccggggggagcctggaccaccaggccccgccggcgcggctgggcccgctggcaacccaggggctgatgggcagcccggggcaaaaggggccaatggcgcccccggaatcgctggagcaccgggattccctggcgcacgaggcccctcagggccccagggtccaggggggccacccgggcccaaagggaattccggagaaccaggagctccaggctccaaaggtgataccggcgccaaaggtgagcccggaccagttggcgtgcagggcccccccggcccagccggggaagaaggaaagcgcggcgctagaggggaacccggccccacaggcctccctggtccaccaggggaacgcggcggacccggttctcggggattccctggggcagacggtgttgctgggcccaaaggaccagcaggagagcggggctcacctgggcctgccggtcccaagggcagccccggcgaggcagggagacccggtgaggccggtttgcctggggcaaagggattgactggatcacctggctccccagggcctgacgggaaaacagggccacccggacctgctgggcaggatggccgtccgggtccacctggtcctccaggcgcacgcggacaagcgggggtcatggggtttccagggccaaagggcgctgctggcgaacccgggaaggcgggggagaggggcgtgccaggccctcccggcgctgtgggccctgcaggcaaagatggcgaagccggggcccaaggacccccagggccagccgggccagctggagaaaggggagagcaagggccagctggaagtcccggcttccagggcctgcccgggccagctggaccaccaggtgaagctggcaagccgggcgagcagggggtgcctggcgaccttggcgcccctggtccctccggggctaggggcgagcgtggattcccgggtgaacggggagtacaaggaccgcccggtcccgccgggccccgcggggcaaatggagccccgggcaatgacggagccaaaggcgatgccggcgctcccggggcacctggtagccagggggcccctggcctgcaggggatgcccggtgagcgtggggccgctggcttgcctggtcccaagggagatagaggagacgccggaccaaagggcgctgacggatctcccggcaaggacggagtgagagggctgacgggcccaatcggcccacccgggccagctggagctcccggtgataaaggggagtccggtccttcgggaccagcaggtccaaccggcgctcggggagcaccaggggatagaggcgaacccggcccacccggacctgctggctttgctggcccacctggtgccgacggacagcctggagccaaaggggagcctggcgacgctggcgccaagggcgacgcaggtccacccggcccagctgggcctgccggtccaccagggcctatcgggaacgtaggggctccaggagccaagggcgcacggggctcagctgggccgccaggcgccactggattccctggcgccgcaggacgggtaggaccacctggcccctcaggaaatgccggccccccaggcccacctggaccagctgggaaggagggcggcaaaggacctcggggcgaaacaggaccagccgggcgccccggggaggttgggccgccgggtcccccaggacccgcaggcgagaaagggagcccaggcgcggacgggcctgccggcgcacccggaacaccaggccctcaaggcatagctggccaaagaggagtggttggccttcctggacagagaggcgaacgcggattccctggcctgcctggcccctccggtgagcctggaaagcagggaccatctggagcatccggcgagcggggccctccgggtcccatgggtcctccagggctggctggaccgcccggcgagagcggtagggagggggcacccggagctgagggatccccaggaagggacgggagcccaggcgctaaaggcgaccgcggtgaaactggacccgcgggaccaccaggagctccaggagcaccaggggcgcctggacccgttggaccggcggggaagtctggtgataggggcgaaacaggcccagccggccctacaggaccagtgggccctgtgggggcgagggggcctgccgggccccaaggccctcgtggagacaagggcgagacaggcgagcagggcgacaggggcattaaaggccacaggggttttagcggtttgcagggccctccaggcccacccggcagccccggagaacagggccccagcggcgcctccggtccggctggccccaggggaccgcctgggagcgccggcgctcctggaaaggacggcctcaatggtttgccaggcccgattggccctccaggtccccgaggccgtacaggggacgctggccccgtcgggcccccagggcctcctggccctcctggaccgcccggaccacccagtgccggtttcgatttcagttttctaccccaaccaccccaggaaaaggcacatgacggaggccggtactacagggccgatgatgccaatgtggtcagagacagagacctcgaggtggatacgacactcaagagtctgagccaacaaatcgaaaatatccgctcacccgaagggtccagaaagaatcctgcgcgtacctgcagggatttgaagatgtgtcattctgactggaaaagcggggagtactggatcgaccccaatcaaggttgcaacctcgatgcaatcaaggttttttgcaacatggagaccggggagacctgtgtgtacccaactcagcccagtgtggcccagaaaaattggtatatctcaaagaatcccaaggataagaggcatgtgtggtttggcgaatctatgactgacggcttccagttcgagtacgggggacaagggtccgaccccgctgacgtcgcaatccaactgactttcttgcggcttatgtcgaccgaggcatcacaaaacatcacataccattgcaagaattctgtggcttatatggaccagcagaccggtaacttaaagaaggcccttctcctccaaggctcaaacgagatcgaaatcagagctgaaggcaactctcgttttacttatagtgttaccgtggacggttgtactagtcacactggtgcatgggggaagacggtgatagagtataagacgacaaaaaccagtaggttgcccatcatcgatgttgcccccctcgacgtgggagcaccagatcaggagttcggcttcgatgtaggccctgtttgctttctgtag

SEQ ID NO: 124514 - DNA, 285 bp, synthetic construct
  misc_feature 1..285: note = Description of Artificial Sequence: Synthetic coding sequence
  source 1..285: mol_type = other DNA
atggcttcagtggttctggcattgaggactagaactgctgtgacctcactcctctcaccaacaccagccactgctcttgccgtccgatacgcctctaaaaagagcgggggctcaagtaagaacctgggcggaaaatcttccggaaggcgtcagggaattaaaaagatggaaggccattacgtccacgccggaaatatcatcgccacccaacggcattttcgatggcaccccggcgctcatgtgagttgctccgtcgcagctccattgtttccattccttgggtag

SEQ ID NO: 124515 - DNA, 282 bp, synthetic construct
  misc_feature 1..282: note = Description of Artificial Sequence: Synthetic coding sequence
  source 1..282: mol_type = other DNA
atggagggacattacgtccacgccggcaacataattgctacgcaacggcacttcaggtggcaccctggcgcccatgttggcgtcggtaagaacaaatgcctgtacgcgctggaggaggggattgtacgttatactaaggaggtgtacgtgccgcacccacgaaacacagaggctgtggatctgattactcggcttcctaagggggccgtgttatacaagactttcgtgcacgtggtgcctgcaaagcccgaaggcaccttcaagttagtagctatgctgtag

SEQ ID NO: 124516 - DNA, 282 bp, synthetic construct
  misc_feature 1..282: note = Description of Artificial Sequence: Synthetic coding sequence
  source 1..282: mol_type = other DNA
atggaaggccactacgtccacgctggcaacattattgctacacagagacacttcagatggcatccaggagcacacgttggggtcggaaagaacaagtgtctgtatgctctggaagagggaatagtccggtataccaaggaggtgtatgttccccatccacggaatactgaggccgtagacctgattaccaggttacccaaaggggccgtcctttataagacatttgtccatgtagtaccggctaaacctgaggggacgtttaaacttgtggccatgctctag

SEQ ID NO: 124517 - DNA, 771 bp, synthetic construct
  misc_feature 1..771: note = Description of Artificial Sequence: Synthetic coding sequence
  source 1..771: mol_type = other DNA
atgcccctgcataaatatccagtgtggctatggaaacgcctccagcttcgtgagggaatatgttcacgcttgccagggcattatctgcggtctctggaggaagaacggactccgaccccggtccactatcggccgcatggagcaaagttcaaaatcaaccccaaaaacggtcagagggagcgcgtagaggatgtgccaatccctatttattttccccctgaaagccagcggggcctgtgggggggcgagggctggattttgggtcagatttacgccaataacgacaaattaagcaagcggctcaaaaaagtgtggaaaccacaactgtttgagcgggagttttattctgaaatattggacaaaaaatttacagtgacggttacaatgcgcacactcgatctgattgatgaggcctatggcctcgacttttatatcctgaaaaccccgaaggaagatctgtgctctaagttcggcatggatctgaagcgcggtatgctgctccgcctggcccgacaggaccctcagctgcaccctgaagatcccgagaggcgggcagctatttatgacaagtacaaggagtttgccattccagaggaggaagcagagtgggtgggtcttactttagaggaggcaatcgagaaacagcgcctgctggaggaaaaggaccctgtacctctctttaagatctatgtagccgaacttatccagcagttacagcagcaggccctctccgagccagccgttgttcaaaaacgggccagcggacagtag

SEQ ID NO: 124518 - DNA, 771 bp, synthetic construct
  misc_feature 1..771: note = Description of Artificial Sequence: Synthetic coding sequence
  source 1..771: mol_type = other DNA
atgccgctccataaatatccggtctggctgtggaaacggctgcagctcagggagggtatctgctcacgtcttccgggtcattaccttcggtccctcgaagaggaaaggacgcctacaccagtgcactataggcctcacggtgccaaattcaaaattaatcccaagaacggccaacgagagagagtagaggacgtgcccatcccgatttatttccccccagagagccagagggggttatggggtggggagggttggatactggggcagatatatgctaataacgataagctaagtaaaaggctgaaaaaagtgtggaagccacagttattcgaacgggaattctacagcgagatcctcgataaaaagtttaccgtgacagtgacgatgcggacccttgaccttattgatgaggcttacgggctggatttttacatccttaagacgcccaaggaggatctgtgttccaaattcggaatggacctgaagcgcggcatgttactgcggttagcaagacaggacccacagttacatcccgaggaccccgagaggagggccgctatttatgacaaatacaaagagttcgccatccctgaagaggaagctgagtgggttggcctaacgttggaggaggccatagagaaacagcgactactggaggaaaaggacccagtgccgctgtttaaaatatatgtcgccgagctcatccagcagttacagcagcaagcgctgagtgaacctgccgttgtgcagaagcgcgcctctgggcagtag

SEQ ID NO: 124519 - DNA, 771 bp, synthetic construct
  misc_feature 1..771: note = Description of Artificial Sequence: Synthetic coding sequence
  source 1..771: mol_type = other DNA
atgccactgcataagtatcccgtgtggctgtggaaacgcttgcagttacgggagggaatttgcagcaggctccccggacattatctgcgcagcttggaagaagagagaacaccaaccccagtgcattaccggccccacggcgccaagtttaaaataaaccccaagaacgggcaaagagaaagagtggaggatgtccctattcccatctactttcctccggagagccaacgcggactgtggggcggagagggatggatactgggacagatttatgctaataatgataaattatcaaaacggctgaaaaaggtctggaaaccgcagttgttcgagagggagttctactccgagatacttgacaagaaattcacagtgaccgtcactatgcgcaccctcgacctcattgatgaagcttacggcctcgatttttatatcctaaaagcttcaggcgaggacctctgttccaaatttgggatggacctcaagcgcggaatgctgctacggcttgcacgccaggacccacagctgcacccagaggacccggagaggagggccgccatctatgacaagtataaagaatttgcaataccagaagaagaggcggagtgggtcgggctgactctggaggaggcaatcgagaagcagagacttctggaagaaaaggatcctgtccccctgttcaaaatttatgttgccgagctgatccagcaactgcaacagcaagccctttctgagcccgctgttgttcagaagagggcaagtggccagtag

SEQ ID NO: 124520 - DNA, 771 bp, synthetic construct
  misc_feature 1..771: note = Description of Artificial Sequence: Synthetic coding sequence
  source 1..771: mol_type = other DNA
atgcctctgcacaagtatcccgtatggttgtggaaacgcctccaattaagagagggcatatgttctaggctaccagggcattacctgcgtagcctagaagaggaacgtactcccacgcccgtccactataggcctcacggggctaaattcaagattaatcctaaaaatggccaaagggagcgagtggaagatgttccgatccctatctactttccacccgagtcacagcgtggcctttggggtggagagggctggattctgggtcagatttatgccaataacgataagctgtcaaagaggctcaagaaggtatggaagccccagctgtttgagagagaattctacagcgaaatcctggataagaaattcaccgtcaccgttaccatgcgcaccctcgatcttattgacgaggcctacggcctggatttttatattctgaaggcaagtggagaagacctttgttctaaattcgggatggatctgaaacgcggaatgcttttgaggttagccaggcaggatcctcagctgcatcctgaagaccccgagaggagggctgctatctatgataagtataaggagttcgctatccctgaagaggaggcagaatgggtcgggctcactctggaagaagccatcgaaaagcagaggcttttagaagagaaggatccagtaccgctgttcaagatatacgtcgcagagttgattcagcaactgcagcagcaggccctgtcggaacctgcagtcgtgcaaaagagagcctcagggcaatag

SEQ ID NO: 124521 - DNA, 147 bp, synthetic construct
  misc_feature 1..147: note = Description of Artificial Sequence: Synthetic coding sequence
  source 1..147: mol_type = other DNA
atgagccgggctggcggcaggggggagcaaagcagatggggccgcagagccgagctgagggggcttggtaggcctgaagcccctcttaggttggggcccgacgtttgtggtagtgttccctgcgctagaggtgctggctcagaatag

SEQ ID NO: 124522 - DNA, 723 bp, synthetic construct
  misc_feature 1..723: note = Description of Artificial Sequence: Synthetic coding sequence
  source 1..723: mol_type = other DNA
atgccactgcacaagtacccagtgtggctgtggaaacgcctccaactgcgggagggaatctgcagcagactgccgggccactacttgcgtagtctggaggaagagcgcacccctacccccgtacattataggcctcatggggccaagtttaaaattaatcctaaaaacggccagcgcgagagagtagaagacgtcccgatacccatctactttccccctgagagccagcgcggtctgtgggggggggaaggctggatcctgggacaaatctacgccaacaacgacaagctttcaaaacgacttaaaaaggtgtggaagccacaactcttcgagagggagttttacagcgagattctcgacaagaagtttacagtcactgtgacaatgcgcacactggatctaatcgatgaggcgtacggcctcgacttctacatcttgaagacacctaaggaagatctctgctccaaatttggaatggatttgaagaggggaatgctgttacgcctggccagacaggacccccaattgcaccccgaggatcccgagcgaagagctgccatctacgacaagtacaaagagttcgccatacccgaggaagaggccgaatgggtcgggctcaccctcgaagaggctattgaaaagcagaggctcctcgaagagaaggatcctgttcctctgtttaaaatctacgtggcagagctcatccagcaactccagcaatag

SEQ ID NO: 124523 - DNA, 657 bp, synthetic construct
  misc_feature 1..657: note = Description of Artificial Sequence: Synthetic coding sequence
  source 1..657: mol_type = other DNA
atgcctttgcataagtatccggtttggttgtggaagaggctccaactgagagaggggatttgtagcaggctcccaggccattacttacgctccttagaagaggagcggacacccacacccgtccattatcgaccacacggcgccaaatttaagatcaaccctaagaatgggcaacgggaaagagtcgaggacgtgccaattcccatttattttccccccgagagccagagggggctctgggggggggaaggctggattttgggccagatttatgccaataatgataaactgagcaaaagacttaagaaagtctggaagccacagctgtttgagcgagagttctacagcgagattttagacaagaaatttactgtgacagtcacaatgcgcacactggacctcatcgatgaagcctacggactggatttctacattctcaagactccaaaggaggatttatgttctaagtttggaatggacttgaaacgcggaatgctgctgcgtttggccaggcaggacccgcagctccatcccgaagacccagaacgccgcgccgccatttacgataagtataaggaattcgccatcccagaggaggaggctgaatgggtaggtcttacgttggaagaggcgatagaaaagcagaggctgctgtag

SEQ ID NO: 124524 - DNA, 585 bp, synthetic construct
  misc_feature 1..585: note = Description of Artificial Sequence: Synthetic coding sequence
  source 1..585: mol_type = other DNA
atgcccctacacaagtaccccgtttggttgtggaaaagattacagctccgcgaggggatatgttcccgactcccaggccattacctgcggtctctggaggaagagagaacaccaactccggtccactatcggccacacggggctaagtttaaaattaacccgaagaatggtcaacgggaaagagttgaggatgtaccaatccccatttacttccctccagagtctcagagaggcctgtggggaggtgaaggatggatcctgggtcaaatctacgctaacaacgacaagctctctaaaagactgaaaaaggtgtggaaaccgcaactgtttgagcgcgagttctactcggagatactcgacaagaagttcacagtcactgtcactatgagaacattagatctgatcgatgaagcctacggactcgacttttacatcctcaagacccccaaagaagacctctgttctaagttcgggatggaccttaagcgaggaatgttgctacggctcgcccggcaagatccccagctgcacccggaggatccggagagacgggctgccatatatgacaaatataaagagttttag

SEQ ID NO: 124525 - DNA, 1047 bp, synthetic construct
  misc_feature 1..1047: note = Description of Artificial Sequence: Synthetic coding sequence
  source 1..1047: mol_type = other DNA
atgccaggctggagactgctgacacaggtaggtgcccaggtgctgggcagactgggcgacggactgggtgccgcccttggaccaggaaacaggacccatatctggctttttgtgagaggactacatggcaagagcggcacctggtgggatgaacacttatctgaggagaacgtcccatttattaagcagcttgtgagcgacgaggataaggcgcagcttgcaagtaagctgtgcccacttaaggacgagccatggccaatacacccatgggaacctggcagttttagagtgggcttaatcgcactcaaattggggatgatgcctctgtggacaaaggatgggcagaaacacgtggtcacactgttacaggtccaggactgccacgtcctcaagtataccagtaaagagaactgtaacggcaagatggctacattatctgtaggtggcaaaactgtgagcagatttcggaaggcaacttcgattcttgaattttatagggaactcgggctgccaccaaagcaaactgtgaagatctttaacataacagataatgcggcaatcaaacctggtacaccactatatgcagcacactttcgtccaggacagtacgttgatgtgacagcgaagaccatcggaaaaggatttcaaggcgtgatgaagcgctggggcttcaaaggccaacctgctacacatggacagactaaaacacatagaaggcctggggcagtagctaccggcgatataggacgtgtctggcccggaaccaagatgccagggaagatgggaaatatttatcgaactgagtacgggctgaaagtttggcggataaataccaagcataacattatttatgtgaacggttccgtgcctggacacaaaaactgcctggtgaaagtcaaagattccaagcttcctgcatataaggacctggggaaaaacctgccattccctacatactttccagacggcgacgaagaggagttacctgaagacctctatgacgaaaacgtctgccaacccggagccccttctataacattcgcttag

SEQ ID NO: 124526 - DNA, 1128 bp, synthetic construct
  misc_feature 1..1128: note = Description of Artificial Sequence: Synthetic coding sequence
  source 1..1128: mol_type = other DNA
atgccagggtggaggttgctgactcaggttggtgctcaagtcctgggacgtctgggagatggtctcggcgccgccctcggacccggtaaccgcgtgacgactaactcgcttaatgtgtctctcattagaaggaacgttggttcggaagagaaagtaggtgatcttaaaaagcgaacacacatttggctatttgtgagggggttgcacggcaagagtggaacttggtgggacgaacatcttagcgaggaaaatgtgcctttcattaagcagctggtgtctgacgaggacaaagctcagctggcttctaagctctgtccacttaaagatgaaccctggcccattcacccttgggagcctgggtcattccgtgtggggcttattgccctcaaactcggcatgatgcccctctggacaaaggatgggcaaaagcatgtagtgacgttgcttcaagttcaggactgccacgtattgaagtatacttcaaaggagaactgcaacggaaaaatggctacactgagtgttggggggaaaactgttagcagattccgcaaggccactagtatccttgagttctatagggagctcggactgccaccgaagcagactgtgaagattttcaacataacagacaatgccgctataaaacctggaacacccctttacgcagcacatttcaggccaggccagtatgtcgacgtgactgcaaaaactataggtaagggttttcaaggagtcatgaagaggtggggcttcaaaggtcagccagctactcacggtcagactaaaacccaccggaggccaggagcagtcgcaacgggtgatatcggacgagtctggccaggaaccaaaatgcccggcaaaatgggcaatatctaccgcacagaatacgggttgaaagtctggagaatcaacacaaagcataatattatctatgtgaacggctcagttccaggccataaaaattgcttggtgaaagtaaaggatagtaagctgccagcctacaaagacttgggcaagaatcttcctttccccacatatttcccagacggcgacgaggaagagttgcctgaggatctatacgatgaaaatgtgtgtcagccgggggctccaagtatcaccttcgcttag

SEQ ID NO: 124527 - DNA, 1092 bp, synthetic construct
  misc_feature 1..1092: note = Description of Artificial Sequence: Synthetic coding sequence
  source 1..1092: mol_type = other DNA
taattttttccaagtcagagagcctccgctggggacagatcgggagggcactgcgagaactttcccactgctaccgctagtacctggaggtggcgcggagactcactgaaggccgagcgccaaggcgcccgcaagagcactcacatctggctgttcgtcaggggtctgcatggcaagtcgggaacctggtgggacgagcacttgtccgaggagaatgtcccgttcatcaagcagctcgtcagcgacgaagacaaggctcaactagcctctaagctctgtcccttgaaggatgagccctggccaatccatccctgggaacctggcagcttcagagttggcctgatcgcgctgaagctgggcatgatgcccctgtggacaaaggacggccagaagcacgtggttacattgctccaggtccaggattgtcacgtcctcaaatatacctcaaaagaaaactgtaacggtaagatggctacactgtccgttggaggcaaaaccgtgtctcggtttagaaaggccacgtcaatcctggaattttacagggagcttggactgccacctaaacagaccgtcaagatatttaatattaccgacaatgccgccattaaaccaggcactccactctatgcagctcactttcgcccgggccagtacgttgacgtgaccgccaaaacaatcggcaaagggttccagggtgtgatgaaaaggtggggtttcaaaggccagcccgcaactcacggtcagacaaaaacacatagacgcccaggcgcggtggcaacaggtgacatcggaagagtttggcctggcacaaaaatgcccgggaaaatggggaatatttatagaacagagtatgggctgaaggtttggaggatcaacaccaagcacaatattatttacgtgaacggatccgtgcccgggcacaaaaattgcctcgtcaaggttaaggactccaagttgccggcctataaggacctgggaaagaatttgccattccccacttattttcccgatggagacgaggaggaactgcctgaagacctgtatgacgaaaacgtgtgccagccaggtgcaccttcaataacttttgcttag

SEQ ID NO: 124528 - DNA, 486 bp, synthetic construct
  misc_feature 1..486: note = Description of Artificial Sequence: Synthetic coding sequence
  source 1..486: mol_type = other DNA
atggctggcatattgcggctcgttgtccagtggcccccaggcaggctgcagactgtcactaagggagtggaatccttaatttgcacagactggattcggcacaaattcaccaggtcccggatacctgagaaagtgtttcaagcatctcccgaggatcacgagaaatacggaggtgaccctcaaaatccacataaactccacatcgtgacgcggatcaagtctacacgccggagaccttactgggagaaggacatcattaagatgttagggctcgagaaagcacacacaccgcaggtgcataaaaatattccttccgtgaatgccaagctgaaggttgtaaaacacctaatcaggattaagccactgaagttgccccaaggtctccctgcagaggaaaatatgtcaaacacatgtcttaagtctacgggcgagctcgtggtgcagtggcacttaaagcctgtagagcagaaggcacatgaaagttag

SEQ ID NO: 124529 - DNA, 486 bp, synthetic construct
  misc_feature 1..486: note = Description of Artificial Sequence: Synthetic coding sequence
  source 1..486: mol_type = other DNA
atggccgggatcttgagactggttgtgcaatggcctcccgggcgcttgcagactgtcaccaagggtgttgagagtctcatatgcaccgattggattcgtcacaagtttacacgcagtcgaatccctgaaaaggttttccaggccagccctgaagaccatgagaaatacggaggagaccctcagaacccccataagttgcacatagtcactaggattaaatcgaccaggcggcgcccctactgggagaaggatattataaagatgctgggtcttgagaaagcccacaccccacaggtacacaaaaacatcccctccgtgaatgccaagttaaaagtggttaagcaccttatccgaattaaacccctcaagctgccacaggggctacctgcggaggaaaacatgagcaatacctgcctgaaaagcactggagagctcgtagtccagtggcatctcaagcctgtggagcaaaaggcacatgaatcttag

SEQ ID NO: 124530 - DNA, 705 bp, synthetic construct
  misc_feature 1..705: note = Description of Artificial Sequence: Synthetic coding sequence
  source 1..705: mol_type = other DNA
atggccgagcgtggttacagcttcagccttacaacctttagcccatctggtaaactggtccagattgagtatgctctcgcggccgtcgcgggtggggcccccagtgtgggaattaaggcagccaacggtgtggtgctggcgactgagaagaaacaaaaaagcatcctgtacgacgaacgctccgtgcataaagtagagcccatcacgaaacacataggcttggtgtactctggaatgggccctgactacagagtactggtgcatcgggcccgcaagctggctcagcagtattacttggtctatcaggagcccattcctacggcccagctagtccaaagggtggcaagcgtaatgcaggaatatacacagtccggcggtgtgaggcctttcggcgtcagtctgttgatttgcggctggaatgagggcagaccgtacttgtttcagtctgaccctagcggcgcttatttcgcctggaaagccacagcgatggggaaaaactacgtcaatggcaaaacattccttgaaaagagatataacgaggatctggagttagaagatgctatccatactgctatccttacactaaaggaaagctttgagggccagatgactgaggataacattgaggtaggaatttgcaacgaggccggattccggcgccttacacctaccgaagttaaggattacctggccgccatcgcatag

SEQ ID NO: 124531 - DNA, 324 bp, synthetic construct
  misc_feature 1..324: note = Description of Artificial Sequence: Synthetic coding sequence
  source 1..324: mol_type = other DNA
atggcgctcgcaatgctcgtacttgtggtgagcccctggagcgctgctcgcggtgttctgcggaattattgggagaggctcctgcgcaagttaccgcagagccgtcctggcttcccttctcccccctgggggccggccctcgccgtacagggtcccgccatgttcacagaaccagctaacgacacgtctgggtctaaggagaacagttcattgctcgattcaatcttctggatggccgcccccaaaaaccggcggacaatcgaggtcaaccgctgtagaagacgtaatcctcagaaactgataaaagtgaaggtgatgcactag

SEQ ID NO: 124532 - DNA, 279 bp, synthetic construct
  misc_feature 1..279: note = Description of Artificial Sequence: Synthetic coding sequence
  source 1..279: mol_type = other DNA
atggcggttctggccgggtcattgctggggcctacatccaggtctgccgctctgctgggcggaaggtggttgcagcctcgggcttggctggggtttcctgatgcttgggggctgcccaccccccaacaggcccgtgggaaagcgagggggaatgaataccagcctagcaatataaagaggaaaaacaagcacgggtgggtgaggcggctttcaacaccagccggcgtgcaggttatcctgagacgaatgctcaaagggcggaaatctctttcccactag

SEQ ID NO: 124533 - DNA, 513 bp, synthetic construct
  misc_feature 1..513: note = Description of Artificial Sequence: Synthetic coding sequence
  source 1..513: mol_type = other DNA
atggccgcctccgccttcgctggcgctgtacgtgctgccagcggcatcctccgtcccctgaacattctagcctctagcacctatcggaactgtgtaaaaaacgccagtctgataagcgctttgtcaacagggagattttcacatatccagacacccgttgtgtccagtacacctcgactgaccaccagcgaacgcaatctcacttgcggccacacctctgtcatattgaataggatggctcccgtgctgcctagcgttctaaagctgcctgtgagatcccttacttacttctcagcaagaaagggtaaacggaaaacagtcaaagctgtcatagataggtttttaaggctgcattgcgggttatgggttcgacgcaaagccggttacaagaaaaaactgtggaagaagacccctgcccgcaagaagcgcctccgagaatttgtgttctgtaacaagacccagtccaaactgttagacaaaatgacgactagcttctggaaacggagaaactag

SEQ ID NO: 124534 - DNA, 567 bp, synthetic construct
  misc_feature 1..567: note = Description of Artificial Sequence: Synthetic coding sequence
  source 1..567: mol_type = other DNA
atggccgctagcgcgtttgccggtgcagtgcgcgcagcttccggaattcttaggcctttgaacatcctggccagtagcacgtatcgcaattgcgttaaaaacgcaagcttgattagtgctctgtctactggaagattctcacatattcaaactccagttgtgagctctacaccacggctcacaacatcagagagaaatctgacgtgcggacacacctctgtcattctgaaccgcatggctccagtcctcccatcagtgctcaagttacccgtgagatccttaacctacttcagcgccaggaaaggtaaacggaaaactgtgaaagccgtgatcgacaggtttttgaggctgcactgtggactctgggtgaggcggaaggccggttataagaaaaagctgtggaagaaaacacccgcaagaaagaaaagactgagagagttcgtgttttgcaataagacacaatctaagctattggataaaatgaccacgagcttttggaaacgtcgcaattggtatgtagacgatccttaccagaaataccacgaccgcacaaacctcaaagtgtag

SEQ ID NO: 124535 - DNA, 312 bp, synthetic construct
  misc_feature 1..312: note = Description of Artificial Sequence: Synthetic coding sequence
  source 1..312: mol_type = other DNA
atggccaacctctttattcgcaaaatggtaaatcctctgctctacctgagcaggcacactgtgaagccaagggccctttccacttttctctttggcagcatccgaggtgccgctcccgtggccgtggagcctggggccgctgttcgtagtttgctgtcgcccgggctgcttccacacctcctgccagccctcggttttaaaaataagactgtgttaaaaaaacggtgcaaggactgttacctcgtcaaacgcagagggcgatggtacgtgtattgtaagacacatccgaggcacaagcagagacaaatgtag

SEQ ID NO: 124536 - DNA, 312 bp, synthetic construct
  misc_feature 1..312: note = Description of Artificial Sequence: Synthetic coding sequence
  source 1..312: mol_type = other DNA
atggccaatttattcatcagaaagatggttaatcccctgctctatttgtcccgtcacacggtcaaacccagggctttgtccacctttctgttcggctccataagaggcgccgctcctgtggccgtcgaaccaggtgctgctgttcggagcctccttagcccgggacttctgccccacctgctgcccgctttgggattcaaaaacaagacagtgctcaagaagaggtgcaaagattgttatctagtgaagcgtagagggaggtggtacgtatattgcaagacacaccccaggcataaacagaggcagatgtag

SEQ ID NO: 124537 - DNA, 312 bp, synthetic construct
  misc_feature 1..312: note = Description of Artificial Sequence: Synthetic coding sequence
  source 1..312: mol_type = other DNA
atggcgaatctctttattaggaagatggtgaaccccctcctctacttatcccggcacaccgtcaaaccaagggcactgtccactttcttattcggcagcatacgaggggcagccccggtggctgtcgagcccggcgcagccgtgaggtcacttctttcacccggcctcctgccgcacttgttgcccgccttgggattcaagaacaaaaccgtgctgaaaaaacgctgcaaagattgctacctagtaaaaagacgaggccgctggtacgtctactgcaaaacacaccctagacataaacagagacagatgtag

SEQ ID NO: 124538 - DNA, 312 bp, synthetic construct
  misc_feature 1..312: note = Description of Artificial Sequence: Synthetic coding sequence
  source 1..312: mol_type = other DNA
atggcgaacttgtttatccgaaaaatggtgaaccccttgttgtacctatccagacacacagtcaaaccccgcgcgctgagcacgttcctcttcggctctattcgcggcgcagcccctgtggctgtggaacccggggctgcagtaaggtccctcctgagtcctggattgctgcctcacctgcttcccgctctggggttcaagaataagaccgtactgaagaaacgatgtaaggactgctacctggttaaaaggcggggccgctggtacgtttattgcaaaacccatccgagacataaacaacgccagatgtag

SEQ ID NO: 124539 - DNA, 1251 bp, synthetic construct
  misc_feature 1..1251: note = Description of Artificial Sequence: Synthetic coding sequence
  source 1..1251: mol_type = other DNA
atgcatttcgttccctggctggcccgtcctatctttcccccatgggacaggggctataaggacccacggttctaccgttccccccctttacacgaacaccccctgtataaggatcaggcttgttacatctttcatcaccgatgtcgtttgctggagggcgtgaagcaggctttgtggctcacaaaaactaagctgattgaaggcctcccggagaaagtgctgagcctcgttgacgacccacgtaaccacatcgagaatcaggatgaatgcgtcctgaacgtcatcagtcacgcccggctctggcagacaacagaggagatccccaagcgcgagacatactgccccgtaatcgtcgacaatcttatccaactgtgtaaaagtcagatcctcaagcacccttcccttgccagaagaatatgcgtccagaattctaccttcagtgccacttggaatagggagtccctgcttctacaggtgcgaggaagcggcggagcccgactgtccacaaaagatcctttaccaaccatagcctcccgagaggagatcgaagccacaaagaaccatgtgctcgaaacattttatccaatttcgccaattattgacctccatgaatgcaatatctacgatgtgaaaaacgacacaggttttcaggagggatacccatatccttaccctcacacactttacctacttgacaaggcgaatctccgtcctcatagacttcagcccgaccagctgcgcgccaagatgatattgtttgcctttggaagtgccctggctcaggctagacttctttacgggaacgatgcaaaagtactggagcagccagtcgtagtgcagagcgttggaacagacggtcgcgtgttccatttcctggtgtttcagctaaatactaccgatcttgactgtaacgaaggagttaagaatctggcgtgggttgatagcgaccagttgctgtaccaacacttctggtgtctccccgtaatcaaaaaacgggtggttgttacggggccttgttttagcaagagccagatgtcaaccagtttcgtgctgacaccatcctttaacgctggcgaagaagtgatgcagagaaacctccgcgccagtgcgagtttgcctcctagcaccggatctccggccagtgagctggtcaaggagcaggaacacgccgcaggccgggttctcagaagggtcatgttggactcagaaaccccaagggaagaactccctgctgcagacttctggaagtag

SEQ ID NO: 124540 - DNA, 879 bp, synthetic construct
  misc_feature 1..879: note = Description of Artificial Sequence: Synthetic coding sequence
  source 1..879: mol_type = other DNA
atgtccggggcctgcgctccacgcgggtcgagatctctgctgccctggatcgggtgtactcgctcacttgattggagtccatcccccctaagagggcgttgcaccagctgtcctggctggcggggccgcagttttagaccgggcactgcagcaactcggacccagggatcaactgccaggcccttgtttacctctattcgatgcaccaagacccgacccgccatttcatttactacggtggctgcatttagtcggtcgctcctgctgcaagttcggggcagcggcggcgccagactctcaaccaaggatcccctgccaacaatcgcctctcgggaagaaatcgaagctacaaagaatcatgtactcgagacgttttacccaatctctccgataattgatctgcatgagtgtaacatttatgacgtgaaaaatgataccggttttcaggaaggctatccatatccctatcctcatacactgtatctgctcgacaaggcaaatctccgccctcaccggctgcagcccgaccagcttagagctaaaatgatattatttgcttttgggtctgctctggctcaggcccggctcctgtacggcaatgatgccaaagttcttgagcagcccgtggtagtacaatctgtaggcacagacggtcgagtgttccacttccttgtttttcagctcaacaccacagacctggactgtaatgagggagtgaagaacctggcctgggttgattcggaccagttgctttaccagcatttctggtgtcttccagtgatcaagaagagggttgtagtagaacctgtgggacctgtaggattcaaaccagagacatttaggaagttcctggcactttacttacacggtgccgcatag

SEQ ID NO: 124541 - DNA, 1272 bp, synthetic construct
  misc_feature 1..1272: note = Description of Artificial Sequence: Synthetic coding sequence
  source 1..1272: mol_type = other DNA
atggcattggctagtgggccagctcgtcgtgctctggccggcagcggtcagctgggtctgggcggatttggcgcaccaaggagaggcgcgtacgagtggggggttaggtcaacccgcaagagtgaacccccccctctggatcgcgtctacgaaatccctggcctggagccaataactttcgctggcaagatgcattttgtgccttggctagccaggccgatctttccaccatgggaccggggatacaaagacccaaggttctacagaagcccacccctgcacgagcatccactgtacaaagaccaggcatgttacattttccaccatagatgcaggctactggagggggtcaagcaggctctttggctgacgaagactaaactcatcgaagggctgcccgagaaggtcttatcactggtcgacgatccccgcaatcacatagagaatcaggacgagtgcgtacttaacgtcatatctcatgccagactgtggcaaaccacggaggagatccctaagcgggagacatattgccccgtgatcgtggataacctcatccaactctgtaagagccagatattaaagcacccatctcttgcaaggcgaatctgcgtccagaatagtacattctcagcaacatggaaccgtgaaagcctgctgctccaagtgcggggaagcggtggagcacgcctgagcaccaaggacccactccctacaatcgccagccgtgaggaaattgaagccaccaagaatcacgtgctggaaacattctatccaatttctcctatcattgatctgcatgaatgcaacatctatgacgtcaagaatgatactggcttccaggaaggatatccgtatccttatcctcacactctttacttgctggacaaggccaatctaagacctcatagactgcagcccgaccagctgagggccaagatgatccttttcgcttttggctctgcccttgcgcaggcacgactgctatatggcaacgatgcgaaggttctcgagcagcctgtggtggtgcaatctgtcggcacggatggcagagtgttccactttctggttttccagctcaacactacagaccttgactgcaacgaaggtgtgaagaatttggcctgggttgattcagaccagctgctgtaccagcacttttggtgtctacccgtgatcaagaagagggtggttgtggaacccgtcggccctgtgggtttcaaacccgaaacattccgaaaattcttggccctgtacctgcatggggcggcctag

SEQ ID NO: 124542 - DNA, 795 bp, synthetic construct
  misc_feature 1..795: note = Description of Artificial Sequence: Synthetic coding sequence
  source 1..795: mol_type = other DNA
taatcgcttcttctgcaagtgcgaggctctgggggagctagattaagcacgaaagatcctcttcccacaatcgctagtcgggaagagatcgaagccacaaaaaatcatgtgctggagactttttatcctatctctcccatcatcgacctgcatgagtgcaacatctatgatgtgaagaatgatacaggtttccaggaggggtacccttatccctaccctcataccttgtatttgttagacaaggccaatctgcgaccacatcgtttacagcccgaccagctccgcgccaagatgattctgtttgccttcgggtccgcactggcccaggctcgactgctgtacggcaacgatgctaaggtgctcgaacagccagtggtggttcagtctgtgggtactgacggccgcgtgtttcatttcctggtttttcagctgaacacaactgatctggattgcaatgagggcgtaaaaaatctggcttgggtggacagcgatcaactactctaccagcacttctggtgcctccctgtgataaagaaaagagtggtggtcaccggaccgtgcttctctaaatcccaaatgagcaccagtttcgtgctgaccccctctttcaacgctggagaggaggtgatgcagagaaacctccgtgcatccgcctcccttcctcctagtactggctctcctgcctccgagctggtgaaggagcaagaacatgcagcagggagagtcctgaggcgcgtgatgctggattcagaaaccccacgcgaggagctgccggccgcggacttctggaagtag

SEQ ID NO: 124543 - DNA, 1143 bp, synthetic construct
  misc_feature 1..1143: note = Description of Artificial Sequence: Synthetic coding sequence
  source 1..1143: mol_type = other DNA
atggccgctccatggtggcgcgcagccctatgcgagtgtagacggtggagagggttcagcaccagcgctgttctcggtagacggaccccgcccctggggccaatgcctaacagcgatatagatctgagtaatctcgagcggctggagaagtacagatcatttgaccggtatcggcgacgggcggaacaggaagcccaggccccccactggtggaggacatatcgcgaatatttcggtgagaaaacggatcccaaagagaaaatcgatataggactgcccccccctaaggtttcgagaacacaacagcttttggagagaaaacaggcaatccaggaacttcgcgccaatgtggaagaagagcgcgctgcccgtctgcggacggcgtcagtgcccctggacgccgtgagagccgagtgggagcggacttgtggtccctatcacaaacagcgcctagctgagtattacggcctgtatagggatttattccatggagccacgttcgtgccgagggtaccactccacgtcgcatacgctgtcggcgaggacgatttgatgcccgtttactgtggcaacgaggttaccccgaccgaagctgctcaggctcccgaagttacctatgaagctgaagagggctcgctgtggaccctgctgctgacaagcctggacgggcatctcttagaaccagatgcagagtacctgcactggctcctgactaatatccccggaaacagggtggccgagggtcaggtcacttgtccgtacttgccccctttccctgctaggggttctggcatccatcggctcgcgttccttctttttaagcaggaccaacccattgacttctccgaagacgcaagaccaagtccttgctaccagctggcccaaagaaccttccgtacattcgacttctataaaaagcatcaagagaccatgacacctgccggactatcgttcttccagtgtcgatgggatgatagcgtaacctacatctttcaccagctgctggatatgcgcgaacccgtctttgaattcgtgaggcctcccccctatcatcctaagcagaagaggtttccccaccggcagcccttgcggtacttggacaggtatagagactcccacgaaccaacctacggcatctattag

SEQ ID NO: 124544 - DNA, 591 bp, synthetic construct
  misc_feature 1..591: note = Description of Artificial Sequence: Synthetic coding sequence
  source 1..591: mol_type = other DNA
atgcctgtgtactgcggaaacgaagtgactccaaccgaggccgcccaagcccccgaagttacctatgaagccgaagagggtagtttatggactctgctcctaacctccttagacggccacctgttggagcccgacgccgagtatctgcactggctgctgaccaatatcccaggaaatcgggtggcggaaggccaggtgacctgtccttacctgccgccatttcctgcccgtggctccggcatccacaggctggctttccttttgtttaagcaagatcagcccattgacttctccgaggatgcacgcccttcaccttgttaccaacttgcgcagcgcactttccgtacgtttgatttttacaagaaacatcaagagactatgacaccagctggcctctcgttcttccagtgtcgatgggatgacagcgtgacttatatcttccatcagttattggatatgcgggaaccagtgttcgagtttgttaggcccccaccttaccacccgaagcagaaacgcttcccccacagacagccgttgcgatacctggataggtatcgggattctcacgagccaacatacggcatatactag

SEQ ID NO: 124545 - DNA, 1062 bp, synthetic construct
  misc_feature 1..1062: note = Description of Artificial Sequence: Synthetic coding sequence
  source 1..1062: mol_type = other DNA
atggaggcacttgcgatgggatcaagagccctgaggctgtggttggtagccccaggtggagggattaaatggcgcttcatcgcaacatcatcggccagtcagctttctccaactgaattaaccgagatgcggaatgatctgttcaataaggaaaaggcgaggcagttgtcactgacccctcggaccgagaagattgaggtgaagcacgttggaaagacagaccccggaactgtctttgtgatgaacaagaatatttcaacaccctattcctgcgccatgcacttatctgagtggtattgtcggaaatctatactggcgctggttgatgggcagccctgggacatgtacaaaccgctcactaaaagctgcgagattaaatttctcacttttaaggattgcgacccaggtgaggtgaataaagcttactggagatcttgtgcaatgatgatgggctgcgtcatcgaacgggctttcaaagatgaatacatggtgaacttagtgagagcacccgaagttccagtgatttcaggggcattctgctacgacgtggtgttggactcaaaattggacgaatggatgcccaccaaagaaaacctcaggtccttcactaaggatgcccacgccctgatctacaaagacttgccattcgagaccttggaagtggaagctaaagtcgctctcgagatcttccagcatagcaaatacaaggtggactttattgaagagaaggcctcacagaatccagagcggatcgtgaaacttcacagaatcggagacttcatcgacgtgagtgaagggcctcttatcccaagaacctctatttgctttcagtatgaagtctctgccgttcataaccttcaacctacacaaccaagtctgattcgaaggtttcagggtgtgtccctgcctgtccatctgagagcacacttcaccatctgggataagctgctcgaaaggtcacgaaaaatgacgcctttcccgatactcctgctgttcacaacccagagcttcttcacgacatcgccagagtcatatctgctccacgggacagtttccgaatag

SEQ ID NO: 124546 - DNA, 1017 bp, synthetic construct
  misc_feature 1..1017: note = Description of Artificial Sequence: Synthetic coding sequence
  source 1..1017: mol_type = other DNA
atggaggcactcgcaatgggatctagagccctgcgactgtggctcgttgcccccggggggggaatcaaatggcgcttcatagccacgtcatccgccagccaactgtctccaacggaactgactgaaatgcggaacgacctcttcaataaagaaaaagcccggcagctgtcgctcacccctagaaccgagaaaattgaggtcaagcatgttgggaagacagaccccggaaccgtgttcgtcatgaacaaaaatatatccacaccctacagctgcgcaatgcacctgagcgagtggtactgccgcaaaagcatacttgcactggtggacggacaaccttgggatatgtataagcccttgactaaatcttgcgagatcaaatttctaacttttaaggactgcgaccctggggaagtgaacaaagcatactggaggagttgtgctatgatgatggggtgtgtcatcgaacgcgccttcaaggacgagtacatggtcaacctggtgcgagcaccagaggtgcctgtgatttcaggggccttttgctatgacgtggtcctggatagcaaattggatgagtggatgccgacgaaggagaacttaagaagctttactaaagacgctcacgccttaatctataaggatctaccattcgagactctcgaggttgaggccaaggtcgctctggaaatctttcaacactcaaagtataaggttgatttcatcgaagagaaagccagccagaaccccgagaggatagtcaagttgcatcggatcggagactttattgatgtctcagaggggccactcatcccacgtacttctatctgttttcagtacgaggtctccgcggtgcacaacctccagcccacccaacccagtcttatcagaaggtttcagggagtctctcttcccgtccaccttagagcacactttacgatttgggacaaactgctagagcgctcacgcaagatggtgactgaagatcagtccaaggccacagaggaatgtacatctacttag

SEQ ID NO: 124547 - DNA, 936 bp, synthetic construct
  misc_feature 1..936: note = Description of Artificial Sequence: Synthetic coding sequence
  source 1..936: mol_type = other DNA
atgttacagtttgtgagggcaggcgcccgcgcatggttgcggcccaccgggtcacaaggactctcttcgctggctgaagaggctgcacgagcgacggaaaatccggaacaagtggcctctgagggactgccagagcctgtgttacgaaaggtggaattgcctgtgcccacacacagaaggccagttcaggcctgggtggagagtctgagagggtttgagcaggagcgggtgggcctggcggatctgcacccggatgtcttcgccacggcccctaggcttgatatcctgcaccaggtagcaatgtggcagaaaaactttaagcggatcagctacgccaaaacgaaaactcgtgcagaggtacgcgggggcggaaggaagccttggccacaaaaaggcacgggccgcgcccgccacgggagtattcgctcgcctttatggagaggaggaggagtcgcacacggccctcggggaccaacgtcatactactatatgctgccgatgaaagtgcgggctttgggcctgaaggtggccttaacggtgaagctggcacaggacgatctgcatatcatggatagcttagaactgccgactggagaccctcagtatctgaccgaattagctcactatcgtcgctggggcgattctgttctcctagtggatttgacacacgaagagatgccccagtctatcgttgaggccacctcgaggctcaagacatttaaccttattccagctgtcggcctcaatgtgcacagcatgttgaaacatcagacccttgtgctaaccttgccaactgtggccttcctcgaggataaactgctctggcaagattcgaggtatcgcccgctgtaccctttcagtctgccatatagtgacttcccgcggccactgcctcacgctacgcagggaccagctgcaactccttatcattgttag

SEQ ID NO: 124548 - DNA, 936 bp, synthetic construct
  misc_feature 1..936: note = Description of Artificial Sequence: Synthetic coding sequence
  source 1..936: mol_type = other DNA
atgttacagttcgtccgggctggagcacgcgcgtggctccggccaaccggctctcaggggctctcctcactggccgaggaggccgcaagggcaacagagaacccagagcaggtggcatcagaaggcctgcccgagcccgtgctcaggaaggtggagctcccagttcctactcacaggcggccagtgcaggcatgggtagaatccctgcgagggttcgagcaagaacgggtcggcctagccgacctacacccagacgtcttcgccacagcaccgaggttggacattctgcaccaggtcgccatgtggcagaagaacttcaaacgaatcagctatgccaagactaagacgcgcgccgaggtgcgaggagggggacgtaagccttggccccagaagggcacagggcgcgcaaggcacggaagtatccgctcgcctctctggaggggcggcggcgtcgcacacgggcctagagggcctacatcctattactacatgttgcctatgaaggtgcgggcactcggtctcaaggtggctctgactgtcaagctcgcccaggacgatctgcatatcatggactccctggagcttcctacaggtgatccgcagtacctgaccgagctggcacattaccgacggtggggcgatagcgtgctcttggtggacttgacgcatgaagagatgccacaatctatcgttgaggccacaagtcgcctgaagacatttaatttgattcctgccgtcggtttgaatgtccacagtatgctgaagcatcagaccctggtcctgactcttccaaccgtggcgttcttagaagacaagctgttgtggcaggactcaaggtaccggccgctgtatcccttcagcctgccttattctgactttccacggccactgccccatgctacccaaggccctgccgcaacaccatatcactgctag

SEQ ID NO: 124549 - DNA, 792 bp, synthetic construct
  misc_feature 1..792: note = Description of Artificial Sequence: Synthetic coding sequence
  source 1..792: mol_type = other DNA
atgctgcagttcgtcagagcaggggcaagagcttggctgcgacccacaggatctcaggggctttcgtccttagccgaggaggctgctcgtgcaacagaaaaccccgaacaggtggcatcggaaggtctgccagaacctgtcctgcggaaagtcgagttaccagtacctactcatcgaaggccagtccaggcgtgggtggagagtctccgggggttcgaacaagagcgcgtaggcttggcagacttgcaccccgacgtttttgcaacagcgccccggcttgatatcctgcatcaggtggcaatgtggcagaagaattttaaaagaatatcttacgcaaaaaccaaaactcgagccgaggtgagagggggcgggcgaaaaccttggccccaaaaagggacaggaagggcaagacatggttccatccggagcccgctttggcgcgggggaggagttgctcacggtccccgtggcccaacgtcgtactactacatgctgcccatgaaagtgcgtgcattgggtctcaaggtggccctcaccgtgaagctcgctcaggacgacttgcacattatggattctctggagctgccaactggcgacccccagtatttgacggaattggcccactaccgacgatggggagatagcgtgttgttagtcgacctaactcacgaggaaatgcctcagtctattgtggaagctacaagccgcctcaaaaccttcaatcttatccccgccgttggggaacagcgcgcccaggcccctcgtgtcaggatgtgtagactacgctgttag

SEQ ID NO: 124550 - DNA, 792 bp, synthetic construct
  misc_feature 1..792: note = Description of Artificial Sequence: Synthetic coding sequence
  source 1..792: mol_type = other DNA
atgctgcaattcgttagagcaggagcaagggcttggctccggcctactggttctcaaggattatctagcctggctgaggaagccgcaagagcaactgagaaccccgagcaggttgctagtgaaggtctaccagagcccgtgttgcgcaaggtcgagcttccagtgcccacacaccgccgaccggtccaggcctgggtggagagccttcgtggttttgaacaggaaagggtaggcctcgctgacctgcaccctgacgttttcgccaccgccccacgtctggacatcctgcaccaggtcgctatgtggcagaagaactttaagcgcattagttatgcgaaaacgaagaccagagccgaggtgcgaggaggtggacggaaaccttggccacagaaaggaaccgggcgggccagacatggtagcatcaggagcccattgtggaggggcgggggtgtggcacatggtccgcgaggcccgacttcctactactacatgctgcctatgaaagtgagagcccttggcctgaaggtagcgctgactgtcaaactggcacaggacgacttgcatatcatggactcgctggagctgcccactggcgatcctcagtacttgacagaactggcccattataggcgctggggtgattctgttctgctggtagacctaacacatgaggaaatgccgcagagtatcgtcgaagctacgtcacgcctcaagaccttcaacttgattcccgctgtgggagaacagcgggcccaggcgcctagagtgcgaatgtgtagactgaggtgctag

SEQ ID NO: 124551 - DNA, 414 bp, synthetic construct
  misc_feature 1..414: note = Description of Artificial Sequence: Synthetic coding sequence
  source 1..414: mol_type = other DNA
atgggggtgctcgcagctgccgctcgctgccttgtgcggggtgcagacaggatgtccaaatggacaagtaagagggggccccggtccttccggggtaggaagggcaggggagccaaaggcattggctttctcacctccggatggcggtttgtgcagataaaagagatggtgcccgaattcgtcgtccctgatctcaccggcttcaaattgaaaccatacgtttcctacttagcccctgagagcgaggagacccccttgaccgccgcccagcttttttctgaggccgtggcccccgcaatagagaaggactttaaagacggtactttcgatcctgacaatctggaaaaatatggtttcgaacctactcaggagggaaaactattccagctgtacccccggaacttcctgcgctag

SEQ ID NO: 124552 - DNA, 429 bp, synthetic construct
  misc_feature 1..429: note = Description of Artificial Sequence: Synthetic coding sequence
  source 1..429: mol_type = other DNA
atgggggatgtaaaagaaaattacttagagacttttatttcctcacccaaattcggacgcacatgtgcggatggcgcattgtattgtgtgtgtcataaatccacctactccccactgcccgatgactataactgcaacgtcgagttggcgctgaccagtgatggtcggacgatcgtgtgttaccacccttctgtcgatattccgtatgagcacaccaagccaatacctcgccctgatcctgtgcacaataacgaagagacacacgaccaagtactgaaaacaaggctggaagagaaggtggaacatctggaagagggcccgatgatcgaacaactgtcaaaaatgtttttcaccactaagcaccggtggtacccccatggccggtatcacaggtgtcgtaagaacctgaatcctcccaaggatagatag

SEQ ID NO: 124553 - DNA, 429 bp, synthetic construct
  misc_feature 1..429: note = Description of Artificial Sequence: Synthetic coding sequence
  source 1..429: mol_type = other DNA
atggccgtcgcggccgtaaagtgggtgatgtctaaacggacgattttaaagcacctattcccggtgcagaacggcgccctctactgcgtgtgccacaagagcacttacagtccgctgcccgatgactacaactgcaacgttgaactggcgttgacctcagatggacgcaccatagtttgctatcacccctccgtggacattccctatgagcacactaaaccaatccctcggccagaccccgtgcataacaatgaggagacacatgaccaagttctgaagacccgcctggaggagaaggtcgaacatctggaagaagggcctatgatcgaacagttaagcaagatgttcttcaccactaagcaccggtggtacccccacggtcgctaccacaggtgcaggaagaacttgaaccccccgaaggatcgatag

SEQ ID NO: 124554 - DNA, 429 bp, synthetic construct
  misc_feature 1..429: note = Description of Artificial Sequence: Synthetic coding sequence
  source 1..429: mol_type = other DNA
atggccgtcgcggcagtcaagtgggtgatgtctaagcgcactatattgaagcatctttttcccgtccaaaacggggccctgtactgcgtttgccacaaaagtacctacagtccgctccccgacgactataactgtaatgtggaactggcccttacttcagacggacggacaatagtatgctatcatccttctgtcgatattccttatgaacatacaaaacccatccccaggcccgatcctgtacacaataatgaggagacacatgaccaagtcttgaagacacgtttagaggagaaggttgaacatctggaagagggtcctatgattgagcaattatccaagatgttttttaccaccaagcaccgctggtacccccacggtagataccaccgatgtcgaaagaacctgaatccccccaaggacagatag

SEQ ID NO: 124555 - DNA, 429 bp, synthetic construct
  misc_feature 1..429: note = Description of Artificial Sequence: Synthetic coding sequence
  source 1..429: mol_type = other DNA
atggccgtggctgccgtgaagtgggtgatgtctaagcgcaccatcctgaagcatctgttccctgtgcagaacggcgccctatattgtgtttgccacaagagtacctattcgcctcttccggatgactataattgcaatgtagaactggccctcacatccgatggtaggaccatcgtgtgctatcaccccagcgttgatatcccttacgagcacaccaaacctatcccccgccctgacccagtacacaacaatgaggagacccacgatcaggttcttaaaacacgcctcgaggagaaggtcgagcatttagaggagggtccaatgatcgagcagctgagcaagatgtttttcaccactaaacacagatggtacccccacggcagataccatcgctgtaggaagaatctgaatcccccaaaagaccggtag

SEQ ID NO: 124556 - DNA, 609 bp, synthetic construct
  misc_feature 1..609: note = Description of Artificial Sequence: Synthetic coding sequence
  source 1..609: mol_type = other DNA
atgacggcacgcggaactccatcacgatttctcgctagcgttctgcataacggcctggggaggtacgtgcaacagctgcagagactcagcttttctgtgtcgagggacggggcttctagccggggcgctagggaatttgtggagagagaggtgatcgatttcgcacggcgaaatcctggcgtcgtcatttatgtgaatagccgcccctgctgcgtgccccgagtggtcgccgagtacctgaatggggcagtgcgcgaggagagtatacactgcaaaagcgttgaagaaatctctactctagtgcagaagttggctgatcagtctggccttgacgttattagaatccgcaaaccctttcataccgataaccctagcatacagggccaatggcatccttttacaaataagccaaccacattccggggcctgcgaccaagggaagtgcaagaccccgcgcctgcacaagacactgggctgcgcttgtctgccgtggctccacaaattctgcttccagggtggcctgacccaatttccgtgcagagcagcgacctgccttggggcaatacccactaccgcccagagccactaagtagcacaacatggctttag

SEQ ID NO: 124557 - DNA, 648 bp, synthetic construct
  misc_feature 1..648: note = Description of Artificial Sequence: Synthetic coding sequence
  source 1..648: mol_type = other DNA
atgactgccagaggaactccaagccggtttctggctagcgtgcttcacaacggactgggtcggtacgtccagcagttgcagcgactttcgttttccgtttccagagatggggcctctagccggggagcgcgggagtttgtggagagggaggtcatagacttcgcccggcgaaatcccggggttgtgatatacgtgaactcaagaccgtgctgtgtcccaagggtggttgccgagtacctgaatggcgctgtgagagaagagagcatccactgtaaatcagtggaagaaataagcacactggtccagaaactggctgatcaatcggggttggacgtcattcgaatccgaaagccatttcataccgacaatcccagcatccagggtcagtggcatccgtttactaacaagcccacaacctttagggggctacggccacgggaagtccaggatccagcacctgctcaggataccggtctacgtttaagtgctgtggcccctcagatcctgcttccggggtggccagaccccccagatctacctaccgtcgaccctataagctcatctctgacatcagcaccagccccaatgctgagcgcagttagttgcctgccaattgtccctgccctgactaccgtgtgttccgcctag

SEQ ID NO: 124558 - DNA, 480 bp, synthetic construct
  misc_feature 1..480: note = Description of Artificial Sequence: Synthetic coding sequence
  source 1..480: mol_type = other DNA
atgacggcacgaggcacaccttcacggttcttggcaagtgtgctgcacaatggccttggccgttacgtccaacaacttcagaggctgtcattctccgtgagtcgcgacggagccagtagccggggagccagagagttcgtcgaaagagaggtcatcgatttcgcaagaagaaatccaggggttgtgatctacgtcaactcgaggccctgttgcgtccccagagtcgtggcagaatatctgaatggcgctgtccgggaggagtcaattcattgcaaatcggtcgaggaaatttccaccctcgtgcaaaaactcgccgaccagagcggattagacgttatcagaatacgcaagcctttccacacagataatccaagcatacaagggcagtggcatccgtttactaataaacctacgacctttaggggactgaggcctcgagaggtgcaggaccccgcgccagctcaggtacaggctcaatag

SEQ ID NO: 124559 - DNA, 708 bp, synthetic construct
  misc_feature 1..708: note = Description of Artificial Sequence: Synthetic coding sequence
  source 1..708: mol_type = other DNA
atgaccgcccgtggcaccccgagtcgcttcctcgcatccgttctgcacaacggcttgggacggtacgtgcagcagctgcaacgtctgtcgttttcagttagtcgggacggggcttcctcccggggcgctcgggaattcgtggagagggaagttatcgactttgctcgtaggaatcctggcgtcgtgatttatgtgaacagccgcccttgttgtgtgcctagggttgtggccgaatacctgaatggggccgtccgggaggaatccatccattgtaagtcagtagaagagatctctactttggttcagaaactcgccgatcagtccggactcgacgtgatccggatccgcaaaccatttcatactgataatccatccatccagggccagtggcatccattcactaataaacccactacctttcgcggtctgaggcctcgcgaagtacaggatcctgctcccgcacaagacgcagctgagtttctgggcgagggggcaggcccatgctggtattctattgtggcgctgccacagaaacacatagcaatcgccatccaccctccacagccagccggccagtgccaccaggccatcggtcactggcctgaaactgtgtgcagttgcaccgctgacccccccgccaggctcgccaggccaaatatttccagtgttattcggtctagtctggggaagtatcctcttccatcgtag

SEQ ID NO: 124560 - DNA, 495 bp, synthetic construct
  misc_feature 1..495: note = Description of Artificial Sequence: Synthetic coding sequence
  source 1..495: mol_type = other DNA
atgaccgctagaggcactcccagccggttcctggcctccgttctccacaacgggttgggccgctacgtgcagcaattacagaggctctcctttagtgtatctcgtgatggcgctagtagtcgcggagcccgggagttcgtcgaacgggaggttattgacttcgcccgccgtaacccaggcgtggtgatctacgtgaacagccggccatgttgtgttccccgagtggtggccgaatacctgaatggggcggtgcgggaggagagtatccattgtaagagcgtggaggaaatatctacattagtgcagaaactcgctgatcagagcggcttggatgttattagaatacgcaagcccttccataccgacaacccatctattcagggccagtggcacccatttacaaataagcctacaacctttaggggtcttcggcccagggaagtgcaggaccctgcccccgcccagtgcctgctcttgggcgccgtcaccctgtag

SEQ ID NO: 124561 - DNA, 480 bp, synthetic construct
  misc_feature 1..480: note = Description of Artificial Sequence: Synthetic coding sequence
  source 1..480: mol_type = other DNA
atgaccgctagagggacacccagcagatttttagcttctgtgctgcataatggcctagggaggtatgtccagcagcttcagagactcagttttagcgttagtagggatggtgcttctagccggggggcccgagagttcgttgagcgggaagttatcgatttcgcccggaggaatcctggcgtcgtcatttacgtgaactcccgcccctgttgtgtgccaagggtcgtggctgaatatttaaatggtgccgtgagggaggagtcaatccactgcaagagtgtcgaagaaattagcaccctggttcagaagttggcagatcaatctgggctcgatgtgatccgcatcaggaaaccattccacaccgacaaccctagcattcagggccagtggcaccccttcactaacaaacccactacatttcgcggactgcgcccacgggaagtacaggaccctgcgccggcccaggtacaagctcagtag

SEQ ID NO: 124562 - DNA, 555 bp, synthetic construct
  misc_feature 1..555: note = Description of Artificial Sequence: Synthetic coding sequence
  source 1..555: mol_type = other DNA
atgacagctcgcggaactccaagtcgttttcttgccagtgtcttgcataatggtctcggccgatacgtgcagcagttgcagcgactttcattttctgtttctcgagatggtgcctcaagcaggggggcccgggaattcgtagagcgggaggtcatcgacttcgccagaagaaaccctggagttgtgatctacgttaacagccggccgtgttgcgtcccccgagtggttgccgaatacctaaacggggccgtccgcgaagaatcaatccactgtaagtctgtggaggaaatttcaacactcgtccagaaactggcagatcaaagcggactggatgtgatccggattcgcaaaccatttcacactgataacccctcaatccagggacagtggcatcccttcacgaataaacccacaaccttccgcgggcttcgacccagggaagttcaagaccccgcccctgcccaagacacgggcttgcgtctgtcagccgtggccccgcagattttgttgccgggttggccagatccaacacgcgcaactcgcgccacccggtag

SEQ ID NO: 124563 - DNA, 786 bp, synthetic construct
  misc_feature 1..786: note = Description of Artificial Sequence: Synthetic coding sequence
  source 1..786: mol_type = other DNA
atgaccgctcggggcacaccttcaagattcctagccagcgttctgcacaacggactcggacgttatgtgcagcagttgcagcgcctgtccttttctgtctcccgagacggcgcaagttcccggggagcccgcgagttcgtagaacgcgaggtgattgatttcgcccggaggaaccccggcgtcgtcatatacgtcaacagtagaccctgttgtgtcccaagagtggtcgcagaatacctgaacggcgctgtgcgcgaggagtcgatccactgcaagtctgtggaggaaatatctactctggtgcagaaattggcagatcaatctggtctcgacgttattaggattcgcaagccctttcacactgacaatccatccattcaaggccaatggcacccatttaccaacaagcccacaacatttagaggactccggcctcgggaagtccaagatcctgctccagcccaagatgccgccgagtttttgggggagggtgccggtccttgctggtacagcattgtggcactgcctcagaaacacatcgctatcgccatccatccacctcagccagccgggcaatgtcaccaggccatcggacactggcctgagactgtctgttcatgtacagccgaccccccggccaggctggctcgcccgacgcgccccccccattccggatcatacctcatcctgatagacttgtgttcttccccatacgcagtaagatcatttctcccccccgactgcccttgtactgatcattgcgtgctgtctgtgaaggctgcttag

SEQ ID NO: 124564 - DNA, 510 bp, synthetic construct
  misc_feature 1..510: note = Description of Artificial Sequence: Synthetic coding sequence
  source 1..510: mol_type = other DNA
taaggcacaccctcccggtttctcgcctctgtgcttcacaatggtctcggacgctatgtccagcaattacagcgcttgagcttttctgtgagtcgggacggagcttccagccgaggggcgagggagttcgttgagagggaggtgatcgattttgcgcgaagaaatcctggcgtggtcatttatgtaaatagccgcccttgctgcgtgcctcgcgtggttgccgagtaccttaacggagcagtgcgggaggagtcgatacattgtaagtccgtcgaggaaatttccacgttagtacaaaagttagccgatcagtccggtctagacgttataagaatcagaaagccttttcatacagataaccctagtatccaaggacaatggcacccgtttacgaacaaaccaacaacattccgaggtctgcgccctcgcgaagtgcaggatccagctcccgcgcaggacgccgccgagttcttaggcgagggagcaggcccctgttggacgctggcctag

SEQ ID NO: 124565 - DNA, 999 bp, synthetic construct
  misc_feature 1..999: note = Description of Artificial Sequence: Synthetic coding sequence
  source 1..999: mol_type = other DNA
atggcctctggattggtccgcctgctgcagcagggccaccgttgcttactcgcccctgtggcccctaagctggtgccccccgtgagaggagtaaagaaaggcttcagagctgcgtttagattccagaaggaactcgaacggcaaaggctactgcgttgtccgccccctcctgtaaggaggtcagaaaagccaaactgggattaccacgccgaaattcaggcatttggccacaggctccaggaaaacttctcattggacctgttgaagacggccttcgttaattcatgttacatcaagtccgaagaagccaaaaggcagcagcttggcatcgaaaaagaagcggtgttgctcaacctcaaaagcaatcaggagttgtccgaacagggtacatcgttttcacagacctgtctgacccagtttctggaggatgagtacccagatatgcctaccgaagggataaaaaatcttgttgacttcttgactggcgaggaagtggtatgtcatgtggcacgcaacctggccgtggagcagctcaccctgagtgaagagtttcccgtcccccctgcagtgctccagcaaactttcttcgctgtcattggcgctctgctacagtctagcggcccagaaaggaccgcactgttcatcagggattttctcatcactcaaatgactggaaaagagttgtttgaaatgtggaaaatcatcaatccaatggggctgttggtggaggagcttaagaaaagaaatgtctccgccccagaaagtcggctgaccagacaatctggtggtactaccgcactgccactatactttgttggcctgtattgcgacaaaaaactcatagcagagggccccggggagacagtcctggtggcagaagaagaagctgcccgggtcgccctgcgtaaattgtatggtttcactgaaaacaggcgtccctggaactattcaaaacccaaggaaacattgcgcgccgaaaagagcatcactgccagctag

SEQ ID NO: 124566 - DNA, 921 bp, synthetic construct
  misc_feature 1..921: note = Description of Artificial Sequence: Synthetic coding sequence
  source 1..921: mol_type = other DNA
atggccgcgccaattccacaggggttcagctgtctctctcgtttcctgggctggtggtttcgccagccggtgttagttactcagtccgctgcaatagtacccgtgagaaccaaaaaacggttcaccccccctatctatcaaccgaaatttaagacagagaaagaattcatgcagcacgcgaggaaggctggcctggttatcccgccagagaagagtgatcgctccattcatttggcctgtaccgccggcatttttgacgcgtacgttccccccgagggggatgctcggatcagctcactcagtaaagaagggttgatcgagagaactgagcggatgaaaaaaactatggcttctcaggtgagtatccggcgaattaaagattacgacgctaatttcaagatcaaggactttccagaaaaagctaaagatattttcattgaggcacatctctgccttaataacagcgatcatgaccgacttcacacacttgtgactgaacattgttttcccgacatgacctgggacattaaatacaaaacggtcaggtggtcattcgtggaatccctggagcccagtcacgtggtgcaggttcgttgcagcagcatgatgaatcagggaaacgtgtatggacaaatcaccgttcgcatgcacacccgtcagactctcgcaatctacgacaggttcggtcgccttatgtacggccaggaagatgtgccaaaggatgttttggagtatgttgttttcgagaagcagctcaccaacccttatgggtcttggaggatgcacactaagattgttcctccatgggccccccccaagcagccaattcttaaaacagttatgatccctggccctcagctgaagcctgaagaagagtacgaagaggcccagggagaggcccagaaaccccagctcgcctag

SEQ ID NO: 124567 - DNA, 693 bp, synthetic construct
  misc_feature 1..693: note = Description of Artificial Sequence: Synthetic coding sequence
  source 1..693: mol_type = other DNA
atggccgccgctggcttggctctgttatgccggcgggtctcctcagcattgaagtcctctaggtccctgattacaccgcaagtgccggcgtgtactggtcttttgcacactacgctttcccgcaaggggttggaagaattttttgatgatccaaaaaattggggacaggaaaaggtgaaaagcggcgctgcttggacctgccagcagctccggaataaatcaaatgaggatctgcataaattatggtatgtgctccttaaagaacgaaacatgctcctgaccctggagcaggaggcaaagcgacaaagactcccaatgccaagcccagaacgcctggacaaggtggtggattctatggacgctctggacaaagtggtgcaggagagggaggatgccctgcgccttctacaaaccggccaagagagagctcggcctggggcctggcgccgtgacatcttcgggagaatcatatggcacaaattcaagcagtgggtgatcccatggcacctcaataaaagatataatcgaaaaagatttttcgcactgccatatgtagaccactttttacgattggagcgcgaaaaacgtgcaaggatcaaggcaaggaaagaaaatctggaacgaaagaaggctaaaattctccttaaaaagttcccgcacttagccgaagcccagaagtcgagtctggtgtag

SEQ ID NO: 124568 - DNA, 423 bp, synthetic construct
  misc_feature 1..423: note = Description of Artificial Sequence: Synthetic coding sequence
  source 1..423: mol_type = other DNA
atgctgcttacattggagcaggaggctaagaggcagagactccctatgcctagtcctgagcggttagataaggtggtggactcaatggacgctctggacaaggtcgtacaggagcgcgaggacgctttgcgactcctccagacaggacaagagagagcgagacctggggcctggcgtcgcgacattttcggtcggattatctggcacaagttcaaacagtgggtgattccgtggcacctcaataagcgatacaacaggaagcggtttttcgcgttgccatacgttgatcacttcctgagactggaacgggaaaagcgagcccggatcaaagctcggaaagagaatcttgaaaggaagaaagccaagattctgctcaaaaaattcccacatttggctgaggctcaaaaatccagcctggtgtag

SEQ ID NO: 124569 - DNA, 753 bp, synthetic construct
  misc_feature 1..753: note = Description of Artificial Sequence: Synthetic coding sequence
  source 1..753: mol_type = other DNA
atggcagcggcaggcctcgcccttctgtgccggagagtctcctcagcccttaaatcatcacgctccctgattacaccacaggtacccgcctgcacaggttttttcctatccctattgccaaagagcactcctaacgtgactagctttcaccagtacaggctcctgcacacaacattgtcccgaaagggactggaagagtttttcgacgaccccaaaaattggggacaggagaaggtgaaaagcggggctgcctggacatgccagcagttaagaaacaagagcaatgaagacctccacaagctgtggtacgtgctcctgaaagaaaggaacatgctactgacgctggaacaagaagctaagcggcagagactccccatgccctcgcctgagagactcgacaaggttgtcgactcaatggatgcactcgacaaagtcgtccaggaaagagaggacgctctgcgccttctccagacaggtcaggagagggctcggcccggcgcctggcgcagggacattttcggccgtattatctggcacaagtttaagcagtgggtgatcccctggcacctcaacaaacggtataatcggaagcgcttcttcgcactgccttatgtggaccacttcctacgactggagagagagaagcgggcccgcatcaaggctagaaaagagaacctggaaaggaagaaagccaagatcctgctgaagaagtttccacacctggcggaagcccaaaagtctagcctggtctag

SEQ ID NO: 124570 - DNA, 639 bp, synthetic construct
  misc_feature 1..639: note = Description of Artificial Sequence: Synthetic coding sequence
  source 1..639: mol_type = other DNA
atgtctggcaccttggagaaagtgctgtgccttcgcaacaataccatctttaagcaagcgttctccttgctacgatttaggacctcgggtgaaaaaccaatttactcggtgggcggaatacttctgagcattagtcgaccttataaaacgaaacccactcatggtatcggcaaatacaaacacctgatcaaggctgaagaacccaaaaaaaaaaaggggaaggtcgaagtgcgtgccattaatttaggcacagactacgaatacggggtgctgaacatccacctgactgcctacgatatgaccctcgctgagagctacgcacagtacgtgcacaatctctgcaactccttaagcatcaaggtggaagagtcttacgctatgccaaccaaaaccatcgaggtcctgcagctacaagaccagggctctaagatgttgttggactctgtcctgactacccatgaacgcgtggtgcaaatcagcggactgtctgcaacttttgctgaaatctttctggaaatcatccagagttcccttcccgagggagtcaggctgagtgtcaaagaacatacagaagaggactttaaaggacgtttcaaggctcgcccggagctggaagaacttttggctaaacttaaatag

SEQ ID NO: 124571 - DNA, 585 bp, synthetic construct
  misc_feature 1..585: note = Description of Artificial Sequence: Synthetic coding sequence
  source 1..585: mol_type = other DNA
atggggctgtcttcctgccgaaagacctcaagtggcctgccacttatccttcattacggtggtatcctcttgagcataagccggccctacaaaacaaagcctactcatggcattggcaagtataagcacctaatcaaggctgaggagccaaagaagaagaaagggaaggtagaagtcagggctataaacctcggcaccgattacgagtatggagtcctgaatatccacctgacggcctacgatatgaccctggctgagtcctatgcacagtacgtgcataacctctgtaattcgctaagcatcaaggtcgaggagtcatatgctatgcctacaaagacaatcgaagtgttacagctgcaggaccagggctctaagatgctgctcgattccgtcctgacaactcacgaacgtgtggtgcagatttccgggctcagcgcaacttttgctgaaatcttcttagagatcatccaaagcagcttgccagaaggcgtgcggctgagcgtcaaggagcatactgaggaggactttaagggtcgctttaaggcccgcccagagctggaggagctgcttgcaaaactgaaatag

SEQ ID NO: 124572 - DNA, 501 bp, synthetic construct
  misc_feature 1..501: note = Description of Artificial Sequence: Synthetic coding sequence
  source 1..501: mol_type = other DNA
atggctgctaccatgttccgggcaacactgaggggatggcgtaccggtgttcagaggggctgcgggctaaggttgctttctcagactcaggggcccccagattatccaaggtttgtggaatctgtagacgaataccagtttgttgaacgtctgctgcccgctactcgcattcccgacccccctaagcacgaacactacccgactccatcaggttggcagcctcctcgggaccccccgcccaacctaccttatttcgtcagaaggtccagaatgcacaacatccccgtgtataaggacataacacacggaaatagacagatgaccgttatccggaaagtggaaggtgacatttgggctttgcagaaggacgttgaggactttctctcacccttgttgggaaagaccccggtcactcaagtcaatgaggtgacaggaacactccggattaagggttattttgatcaagagcttaaggcttggcttctcgagaaaggattttag

SEQ ID NO: 124573 - DNA, 501 bp, synthetic construct
  misc_feature 1..501: note = Description of Artificial Sequence: Synthetic coding sequence
  source 1..501: mol_type = other DNA
atggccgctaccatgttcagggctactctaagggggtggcggacgggagtgcaacgtggctgcggcctccggctgctttctcagacacagggtcctcctgattacccgagatttgtcgaaagtgtggacgagtatcagttcgtcgaacgattgctgcctgcaactcggattccagatcctcccaagcacgagcactaccctacacctagcggctggcagccgccacgcgatccgcccccaaatttgccttatttcgtgagacgcagtagaatgcataacatcccagtctataaggatattacacacggtaatcgtcagatgacggtgatccgcaaagtggagggcgatatatgggccctccaaaaagacgttgaggatttcctaagccctctgcttgggaaaactccggttacacaagtgaacgaggtcaccggcacgctgagaattaaggggtacttcgaccaggagctgaaggcttggttgttagaaaaaggattttag

SEQ ID NO: 124574 - DNA, 477 bp, synthetic construct
  misc_feature 1..477: note = Description of Artificial Sequence: Synthetic coding sequence
  source 1..477: mol_type = other DNA
atggccgcgagaagtgtcagcggtatcacaagacgagtcttcatgtggacagttagtggcaccccctgtcgagagttctggtcccggtttcgaaaagagaaagagccagtagtggtagagaccgtggaggagaaaaaggaacctattttggtctgtccgcccctcaggagtagagcctacaccccacccgaggaccttcagtctagactggaatcttacgtaaaagaggtgttcgggtctagtctgccgagcaactggcaagatatttcccttgaggatagtcgtctgaaattcaacttactggcacatctggcagatgatctgggtcacgtggttcccaattcgcgactgcatcagatgtgcagagtccgggacgtgttagacttctacaacgttcccatacaggatagaagtaagttcgacgaattgagtgcgagcaacctcccccctaatctgaaaatcacatggagctactag

SEQ ID NO: 124575 - DNA, 408 bp, synthetic construct
  misc_feature 1..408: note = Description of Artificial Sequence: Synthetic coding sequence
  source 1..408: mol_type = other DNA
atggctgctagatccgtctctggcatcacgcggagggtttttatgtggacagtctctggcaccccttgtcgcgaattctggtcgaggttccgaaaagagaaagagccagtggtggtcgaaaccgtcgaggaaaaaaaagagcccatactggtatgtcctcccttgaggtctcgggcatacacacctccggaagatctgcagagtcgcctcgagtcctatgttaaggaggtgtttggatccagtctgcctagcaactggcaagacatttccttggaagactctcggctcaaatttaacttacttgcacacctggcagatgacttgggccacgtagtgcctaattcccgcctccaccagatgtgtagggggtactcttttgaagagggcaagatccaattgggaatatag

SEQ ID NO: 124576 - DNA, 1146 bp, synthetic construct
  misc_feature 1..1146: note = Description of Artificial Sequence: Synthetic coding sequence
  source 1..1146: mol_type = other DNA
atggcaagcccaagcctagagagacccgagaaaggggctgggaagtctgaattcagaaatcagaagcccaaaccagagaatcaggatgagagcgaattacttacggtacctgatggatggaaagagcccgcttttagtaaggaggacaatcccagagggctcctggaggagagtagcttcgccacactcttccccaaataccgggaggcctatctcaaagagtgttggcctctcgtacaaaaggcccttaacgagcaccacgtgaatgccaccctggaccttatcgagggatctatgactgtgtgtacaactaaaaagacattcgacccttatattataattcgggccagggacttgatcaagttgctcgcgaggtctgtgtcctttgagcaggcagttcgaattctccaagacgatgtggcatgtgacatcatcaaaataggctccctagtccggaataaggagcgtttcgtcaagagacgtcagcggcttatcggacctaagggctccacactaaaggccttagaactactcactaactgttacatcatggtacagggcaacaccgtgagcgcaatcgggccctttagtggcttgaaggaggttcggaaagtcgttctggacaccatgaaaaacatacaccccatttacaatatcaagtctctgatgattaagcgcgagctcgctaaagactctgagctaagaagccagagctgggagagattcctgccacagttcaagcataaaaacgtgaataaacggaaagaacccaaaaaaaaaactgtgaagaaggagtataccccctttccaccaccccagcctgagtcccaaatcgacaaggagcttgcttctggggaatattttctgaaagcaaatcaaaaaaagcgacagaaaatggaggctattaaggccaagcaggctgaggcaatctctaagaggcaggaggaaaggaacaaggccttcatccctcccaaggagaagccaatcgtgaaaccaaaggaagcctcaacagagactaaaattgatgtagctagcattaaagaaaaagtaaaaaaggctaagaataagaagctcggtgctctgaccgctgaggagatcgccctgaagatggaggcagatgagaagaagaaaaaaaagaagaagtag

SEQ ID NO: 124577 - DNA, 372 bp, synthetic construct
  misc_feature 1..372: note = Description of Artificial Sequence: Synthetic coding sequence
  source 1..372: mol_type = other DNA
atggcagcattggggaccgtgttattcactggagtgagaaggctacattgttctgtggccgcctgggccgggggccagtggaggctgcaacagggcttagctgccaatccatcaggatacgggccgctaactgaactgcctgattggtcctacgcggatggtagaccagcaccccccatgaaggggcagctccggaggaaagccgagcgggaaacattcgcacgcagggtggtgttgctaagtcaggagatggatgctggcctgcaggcatggcagctccgtcaacaaaagcttcaggaggagcaaaggaaacaggaaaacgctctgaagccaaaaggcgccagtcttaagtccccattgccttcacagtag

SEQ ID NO: 124578 - DNA, 369 bp, synthetic construct
  misc_feature 1..369: note = Description of Artificial Sequence: Synthetic coding sequence
  source 1..369: mol_type = other DNA
atggcggcgctagggacagtgctgttctccgtaaggaggctgcattgttcagttgcagcctgggcaggtggccagtggcgcttacagcaaggactggccgccaacccttccgggtacgggcctctcaccgagctccccgattggtcatacgccgacgggcgtccagcccctcctatgaaaggccagctgcgccgcaaagcggaacgggagacattcgcgcgaagagtggtccttttgagccaagagatggacgctgggctacaggcctggcagctgagacaacagaagctgcaagaggagcagcggaagcaggagaacgctcttaagccaaaaggggcctccttgaaatctccgctccccagtcaatag

SEQ ID NO: 124579 - DNA, 264 bp, synthetic construct
  misc_feature 1..264: note = Description of Artificial Sequence: Synthetic coding sequence
  source 1..264: mol_type = other DNA
atggctgccctcggcactgtgctttttaccggggtgcgcagattgcattgttctgtggcagcatgggctggaggacagtggcgcttgcagcagggcctcgctgcgaacccttccggctatggtcctttgactgagctgcctgactggtcttacgcagaaacgtcatgcacagccgtgaccggaaacggcaggtggatcacttccatggctgcccaggctgccgaggtggccggacgcaccaaagaagccggaaagtgtagttag

SEQ ID NO: 124580 - DNA, 195 bp, synthetic construct
  misc_feature 1..195: note = Description of Artificial Sequence: Synthetic coding sequence
  source 1..195: mol_type = other DNA
atgaagggtcaacttcggcggaaagctgaacgagaaacttttgccaggcgcgtcgttctcctttcacaggagatggatgctggtctccaggcatggcagctacggcagcagaaactgcaagaagagcagagaaagcaggagaatgccctcaagccaaagggtgccagcctgaaaagccctctccctagccagtag

SEQ ID NO: 124581 - DNA, 195 bp, synthetic construct
  misc_feature 1..195: note = Description of Artificial Sequence: Synthetic coding sequence
  source 1..195: mol_type = other DNA
atgaaggggcaactacgccggaaggctgagagggaaacatttgctaggcgggtggtactgctctcccaggagatggacgctgggttgcaggcatggcagctgaggcagcaaaagctacaggaggagcagaggaaacaagagaatgccctcaagcccaaaggggcaagcctaaaatctcccctgcccagtcagtag

SEQ ID NO: 124582 - DNA, 195 bp, synthetic construct
  misc_feature 1..195: note = Description of Artificial Sequence: Synthetic coding sequence
  source 1..195: mol_type = other DNA
atgaaggggcagctccgccggaaggccgaacgggagactttcgctagacgcgtagttctgttatctcaagagatggacgccggcctgcaggcctggcaactgcgtcaacagaagttgcaggaggaacagagaaagcaagagaacgccctgaaaccaaagggcgcatctttgaaatcccccttgcctagccagtag

SEQ ID NO: 124583 - DNA, 339 bp, synthetic construct
  misc_feature 1..339: note = Description of Artificial Sequence: Synthetic coding sequence
  source 1..339: mol_type = other DNA
atggccgccgctctcgccagactgggactgcgtccagtgaaacaggttagggtgcaattttgtccgttcgaaaaaaacgtagaatcaacccggacgtttctgcaaactgtgtcgtcagaaaaggtgagatcgacaaatctgaattgtagcgtcatcgcagatgtgaggcatgacgggagtgagccctgtgtggatgtcttgttcggtgatgggcaccgcctgatcatgagaggtgctcatttaacggccctggaaatgctgaccgcatttgcttcccatattagggcccgagacgcagccggtagtggcgacaaaccgggtgctgacactgggcggtag

SEQ ID NO: 124584 - DNA, 417 bp, synthetic construct
  misc_feature 1..417: note = Description of Artificial Sequence: Synthetic coding sequence
  source 1..417: mol_type = other DNA
atggcaacaaagcgactgttcggagctacccgaacctgggccgggtggggggcgtgggaactccttaaccctgcaacatccggtcggttgctagcaagggactacgcgaagaagccagtgatgaagggagctaaaagcggcaagggcgctgtgacatctgaggccctgaaggatcctgacgtgtgtactgaccccgtgcagctgaccacttatgcgatgggggtgaacatttataaggaggggcaagatgtgccactgaagcctgatgccgagtacccggaatggttatttgaaatgaacctgggacctcctaaaacattagaagagctggacccagagtcacgggagtactggagaagattaaggaagcagaacatctggcggcataatagactgagcaagaacaaacgcctgtag

SEQ ID NO: 124585 - DNA, 387 bp, synthetic construct
  misc_feature 1..387: note = Description of Artificial Sequence: Synthetic coding sequence
  source 1..387: mol_type = other DNA
atggctgctgtagggtcactcctcggcagactgcggcagtcaaccgtcaaggctactggaccagcactgcggagactgcacacatcctcttggcgggctgactcatcgagggcttccctcacaagggtgcaccgccaggcctatgcaaggttgtaccctgtattgttagttaagcaagacggcagtacgattcacatccgctaccgtgagccccgccggatgttagccatgcctatagaccttgacactctctcacctgaggaacgcagggcacgcttgcgtaaacgcgaggctcagctgcaatccagaaaagagtacgaacaggagctctcggacgatctacatgtcgagaggtatcgacaattttggacaaggacgaaaaagtag

SEQ ID NO: 124586 - DNA, 387 bp, synthetic construct
  misc_feature 1..387: note = Description of Artificial Sequence: Synthetic coding sequence
  source 1..387: mol_type = other DNA
atggcagccgtggggtccctgcttggaaggctcaggcagagtacagtgaaagccacaggacctgccctgaggagactgcatacttcctcctggcgggctgattcttcccgggctagccttacgagagtgcacaggcaggcctacgctcgattgtaccctgtccttctcgttaagcaggacggctctacgattcacattaggtatcgcgagcctaggcggatgctggctatgcctattgacttggataccctgtctcccgaagaacgtcgggctaggttaaggaagcgggaggcgcagttgcagagcaggaaggagtatgagcaggagctctctgacgatctccatgtggagaggtatagacagttctggacccggaccaaaaagtag

SEQ ID NO: 124587 - DNA, 387 bp, synthetic construct
  misc_feature 1..387: note = Description of Artificial Sequence: Synthetic coding sequence
  source 1..387: mol_type = other DNA
atggctgcagttggctccttacttggtcgactgcgtcagtctacagtcaaggcaactggaccagctctgaggcggctgcacacgtcctcgtggagagcagactcgtcccgagcctctctgacacgggtgcaccgacaggcgtacgcacggttgtatccagttttgctggtgaagcaggacggcagcactatccatatacgctacagggagcccaggcgaatgcttgccatgcctatcgatctagatacgctgtcaccagaagaacggcgggcgcggttgcgaaaacgagaggcccagctccaatcccgaaaagaatacgagcaggagctcagcgacgacctacatgtggagcgttaccggcaattttggactaggaccaagaagtag

SEQ ID NO: 124588 - DNA, 387 bp, synthetic construct
  misc_feature 1..387: note = Description of Artificial Sequence: Synthetic coding sequence
  source 1..387: mol_type = other DNA
atggctgccgtgggctcccttctaggacgcttgaggcagtccaccgtgaaggcaaccggcccggcgttaaggcgtctgcacactagcagctggagggccgactcttcccgagccagccttacaagggttcatagacaggcatacgccagactgtaccccgtactgctagtgaaacaggatggcagtactattcacataagatatcgagagccacggaggatgctggccatgcccattgacctcgacaccctgtctcccgaggaacggagagcccgcctaagaaagcgcgaggcacagcttcagagcagaaaggagtatgaacaagagttgagtgacgatctccacgtcgaacggtaccgacagttttggacacgcactaagaagtag

SEQ ID NO: 124589 - DNA, 495 bp, synthetic construct
  misc_feature 1..495: note = Description of Artificial Sequence: Synthetic coding sequence
  source 1..495: mol_type = other DNA
atggcagcagtgggcagtctgctgggactggcagcttcatcatggctcggagggcagaatgcatcggaccactctctgtggctgctccgcaagccccgcgggtccagttgtccgggcactggtcaccagttgtgcagattacgacagtccaccgtgaaggcaacggggcctgccttgcggcggttacatacttcaagctggagagctgacagctctcgggcaagcctcactcgtgtccatcggcaggcgtacgcccgcctctatcctgttctgttagtaaagcaggacggaagcactatacacatccgttatagagagcctcggcgcatgttagccatgcccattgacctggacactctttcccccgaggagaggcgcgcccgtctgagaaaaagagaggcgcagctgcagtctcgaaaggagtatgagcaggagctttcagacgatttgcacgtagagcgctatcgccagttctggacaaggaccaagaaatag

SEQ ID NO: 124590 - DNA, 378 bp, synthetic construct
  misc_feature 1..378: note = Description of Artificial Sequence: Synthetic coding sequence
  source 1..378: mol_type = other DNA
atggccgcagtggggtccctgctggggcagtctaccgtgaaggcaaccggccctgcactcagacgtctacatacctcctcatggcgagccgattccagccgcgcatcactaactcgggtacatagacaggcttatgcccgcctatatcctgtgctgcttgtgaagcaggatggaagcacaatccacattcgttaccgggaacccagaaggatgttggcaatgcccatagatcttgacaccctatctcctgaggaacgccgagctagactgcgcaaaagagaggctcaacttcagagcagaaaagagtacgaacaggagttatccgacgatttgcatgtcgaacggtatcgacagttttggactagaacgaaaaaatag

SEQ ID NO: 124591 - DNA, 387 bp, synthetic construct
  misc_feature 1..387: note = Description of Artificial Sequence: Synthetic coding sequence
  source 1..387: mol_type = other DNA
atggcagcagtggggtcgctgttgggacgcctgcgccagtctacagtaaaggctaccggcccagccctccggcggcttcatacaagcagctggcgggccgacagttctcgagcaagtctcactcgggtgcatcgtcaggcctacgccaggctgtaccctgtgttactggtgaagcaggacggttccaccatccacattagataccgggagccgaggagaatgttggctatgcctattgacctggacactctgtcacccgaagaacggcgtgcccgcctcaggaaacgagaagcccagctccagagcaggaaggagtacgagcaggagttatctgatgatctgcacgtggagcgctaccgtcagttctggacaagaaccaagaagtag

SEQ ID NO: 124592 - DNA, 387 bp, synthetic construct
  misc_feature 1..387: note = Description of Artificial Sequence: Synthetic coding sequence
  source 1..387: mol_type = other DNA
atggccgccgtggggagccttctgggccggctgcgtcagtcaaccgtgaaggccacaggtcccgctttgcgacgcctgcatacctcaagctggcgagctgatagctctagagcctcactcacgagggtgcaccgacaagcctacgctcgactctaccccgtgctgttagtcaagcaagacggatcaaccatccatattcgctaccgggagccccgccggatgcttgcaatgcccatagacttagacacactcagtcccgaagagcgcagggcaagactgcggaaacgcgaagcccaacttcagtctcgaaaagagtatgaacaggagctgtctgacgatctccacgtcgaacgttacagacagttctggacccgcaccaagaagtag

SEQ ID NO: 124593 - DNA, 387 bp, synthetic construct
  misc_feature 1..387: note = Description of Artificial Sequence: Synthetic coding sequence
  source 1..387: mol_type = other DNA
atggccgcagtgggatcactcctgggaagacttcgtcaatccaccgtcaaggctacgggacccgccctcaggagactacatactagcagctggagggccgacagctcccgcgcatccctaacacgcgtgcacaggcaggcctatgcccggttatatcccgttctcctagtgaaacaggacgggtcaacaatccatatccggtacagggagccaagacggatgctggccatgccaatcgacttggacaccttatctccggaagaacgccgagcccggctgcgaaagagggaggcacagctccagtctcggaaagaatacgaacaggagttgtctgatgatctgcacgtcgagagatatcgacaattctggaccagaaccaaaaagtag

SEQ ID NO: 124594 - DNA, 387 bp, synthetic construct
  misc_feature 1..387: note = Description of Artificial Sequence: Synthetic coding sequence
  source 1..387: mol_type = other DNA
atggctgcggtcggatcactgttgggccgccttcgacagtccaccgttaaggcaactggcccggccttgcgcaggctgcatacctcttcctggagggccgattctagtcgcgcctcacttaccagagtacataggcaagcctatgctagactgtaccctgtgctcctggtcaagcaggacggctcaacaatacacattagatacagagaaccccgccgaatgctggccatgccaattgatttagacacactcagccctgaagaaagacgagcacgcctgaggaaacgtgaagctcagctgcagtctcggaaagagtacgaacaggagctgtctgacgacctgcacgtcgagcgctaccggcagttctggactcgaaccaaaaaatag

SEQ ID NO: 124595 - DNA, 495 bp, synthetic construct
  misc_feature 1..495: note = Description of Artificial Sequence: Synthetic coding sequence
  source 1..495: mol_type = other DNA
atggccgcagtggggtctctgcttggattagctgcctccagctggttgggcgggcaaaatgccagcgatcacagtctttggctcctgagaaaaccgagggggtcctcatgcccaggcactggtcaccagttgtgccgacttcgtcagtcgacagttaaggcaactggccccgccctaaggcgcctgcacacttctagttggagggctgactcctcccgcgccagcctgaccagggtgcatagacaggcctatgcccgcctctaccctgtgttgctggtgaaacaagatggctccacgatccatattcgctaccgcgagcctaggcggatgctggcgatgccaattgatcttgatactctgtcaccagaggagcgcagggcccgtttgcggaaaagagaggctcaactgcagagtcgtaaggaatacgagcaggaattatccgacgatctgcatgtggaacgataccgtcaattctggactaggaccaaaaagtag

SEQ ID NO: 124596 - DNA, 387 bp, synthetic construct
  misc_feature 1..387: note = Description of Artificial Sequence: Synthetic coding sequence
  source 1..387: mol_type = other DNA
atggccgcagtgggttctctgctgggccggctgaggcagagcactgtgaaagctacgggccctgccttgcgacgtctgcacaccagcagttggagggccgactcatcgcgtgcctctcttacccgggtccaccgtcaggcttacgctagattatacccagtgttgctcgtgaaacaggacggatcaactatccacatccgttaccgtgaacctaggcgcatgctcgcaatgcccattgatctggataccctgagccctgaggagcgccgggctcgattacgaaaaagagaggcccaacttcagtcacgcaaggagtatgaacaggagctgagtgacgacctgcatgtggagcgttacagacaattttggactagaactaagaagtag

SEQ ID NO: 124597 - DNA, 387 bp, synthetic construct
  misc_feature 1..387: note = Description of Artificial Sequence: Synthetic coding sequence
  source 1..387: mol_type = other DNA
atggccgccgtaggaagtctcttgggtcgactcagacagtctaccgtgaaagctacaggcccggcacttaggcggctccacacaagttcctggcgggccgattcttccagggcctcccttacgcgtgtgcatagacaggcctacgcccggctctaccccgttttactcgttaaacaagacggcagcacaattcacattcggtatagagagccccgccgcatgctcgctatgccgattgatctggacacactatcgcctgaagagcgccgtgcccgtcttagaaagcgggaggcccagttgcaaagtcggaaggagtacgagcaggagctctcggatgatctccacgttgaaagatacaggcagttctggacccgcactaagaaatag

SEQ ID NO: 124598 - DNA, 387 bp, synthetic construct
  misc_feature 1..387: note = Description of Artificial Sequence: Synthetic coding sequence
  source 1..387: mol_type = other DNA
atggccgccgttggctccttgcttggacggctgagacaatctacagtcaaagcaaccggccctgctcttcggcgccttcatacaagcagctggagagccgactcctctagagcgtctctgaccagagtgcacaggcaggcctatgctcgtttgtaccccgtgctccttgttaaacaggatggatccactatccatatccggtatcgcgaaccacggcgcatgctcgcaatgccaattgacttggataccctgagcccagaagaacgaagggcacggttaaggaagcgggaggctcagctccaatcaagaaaggaatatgagcaggaactgtcagacgatctccacgttgagcgttaccgacagttctggactcgaaccaagaaatag

SEQ ID NO: 124599 - DNA, 387 bp, synthetic construct
  misc_feature 1..387: note = Description of Artificial Sequence: Synthetic coding sequence
  source 1..387: mol_type = other DNA
atggctgcagttggttctctcctcggacggctaaggcagagtacagtgaaagcaactggcccagctcttaggcgcctgcacacaagcagttggcgggcagactcctcccgggcatctcttactagggttcacaggcaggcatacgcaaggctgtatcctgtactgctcgttaagcaggatggcagcaccattcacatccgataccgggaacccagacgaatgctggccatgcctatcgatctcgacacgctgtctccagaggagcggagagcacggctccggaagagggaggcccagcttcagagcaggaaggagtatgaacaggagttaagcgatgatctgcacgtcgagcgctacaggcaattttggacccgtaccaagaagtag

SEQ ID NO: 124600 - DNA, 387 bp, synthetic construct
  misc_feature 1..387: note = Description of Artificial Sequence: Synthetic coding sequence
  source 1..387: mol_type = other DNA
atggctgctgtgggttctctgctcggtcggttgcggcagagtactgtcaaggcaacgggcccagccttaagaaggctccacaccagctcctggagggctgacagcagtcgggcctctctgacacgcgttcaccgacaggcttacgcgagactctaccctgttctgctagtcaagcaggacggatcaactatccacattagatatagagagccccggcgcatgctagctatgccgatcgacctcgatacactgagcccagaggaacgaagggcgcgactccggaagagggaagcacagctgcagtcacgtaaggagtacgaacaagagctgtcagacgacttacatgtcgaacggtacaggcaattctggactcgcaccaaaaagtag

SEQ ID NO: 124601 - DNA, 387 bp, synthetic construct
  misc_feature 1..387: note = Description of Artificial Sequence: Synthetic coding sequence
  source 1..387: mol_type = other DNA
atggctgccgtgggaagcctcctgggtcgcctccgtcagagcactgtaaaagcaaccggccctgcccttcgacggcttcatacgtcttcttggagggctgattcatcccgggcttctctgacacgtgttcaccgccaggcatacgctaggttgtaccccgtgcttctggtgaagcaggacggaagcactattcatattaggtacagggagccacgtaggatgctggctatgcctattgatctggataccctttcgcctgaggaacgacgggcaagactgcgtaagcgagaagcacagctccaaagtcgcaaggagtatgaacaggagctttcagatgatctgcatgttgagcgctacaggcagttttggacccgtacaaaaaagtag

SEQ ID NO: 124602 - DNA, 387 bp, synthetic construct
  misc_feature 1..387: note = Description of Artificial Sequence: Synthetic coding sequence
  source 1..387: mol_type = other DNA
atggctgctgtcggctctctcctggggcgtctgcggcagtctacagtcaaggcaactggaccggctctaaggcgcctccacactagctcgtggcgggctgatagttcccgagcctcactcactcgagtgcacagacaggcatacgctaggctgtaccctgtccttttagtgaaacaagatggctcaactattcacatccggtatcgcgagccccgccggatgctggcaatgcctattgacctggatactttaagtcccgaggagagacgggccaggctgcgaaagagggaggcacaactccagtccagaaaggagtatgaacaggagctgagcgatgacctacacgtggagagataccgtcaattttggacaaggaccaagaaatag

SEQ ID NO: 124603 - DNA, 387 bp, synthetic construct
  misc_feature 1..387: note = Description of Artificial Sequence: Synthetic coding sequence
  source 1..387: mol_type = other DNA
atggctgctgtgggtagtctgctggggcgcctcagacaaagcactgtaaaagccactgggcctgccctcagacggctccatactagcagctggagagccgatagtagtagagcatctctgacacgggtacaccggcaggcatatgcccgcttataccccgtgcttctggtgaagcaagacgggtccaccatacatattcggtaccgcgaacctcgtagaatgctcgctatgccaattgacctcgacaccttgtctcccgaagagagaagggcccggctaaggaagagggaagcccagctgcagtcaagaaaagagtacgagcaggaactttctgacgacctgcacgtggagcgctataggcagttttggactaggacgaagaagtag

SEQ ID NO: 124604 - DNA, 387 bp, synthetic construct
  misc_feature 1..387: note = Description of Artificial Sequence: Synthetic coding sequence
  source 1..387: mol_type = other DNA
atggccgctgttggaagtctcctgggccgactgagacagtcgacagttaaggccacaggcccggctctgcggagactgcacacatcttcttggcgggccgacagctcgagagccagccttactcgcgtgcacaggcaggcttacgcaagactctaccctgtgctcctggtaaagcaggacggcagtaccatccatatcagatatcgcgaacctagacgaatgctagccatgccaatcgatttggacaccctaagccccgaggaacgccgggcccggctgcgcaaacgcgaagcccaactgcagagtagaaaagaatatgaacaggagttgtctgacgacctacatgtggagaggtaccggcaattctggactaggaccaaaaaatag

SEQ ID NO: 124605 - DNA, 495 bp, synthetic construct
  misc_feature 1..495: note = Description of Artificial Sequence: Synthetic coding sequence
  source 1..495: mol_type = other DNA
atggctgccgttggctccttgctggggctagcagcgagcagctggctgggcggccaaaatgccagcgatcacagcctgtggctgttgaggaagccgaggggcagcagctgcccgggtaccggccaccagctctgccgcctacgccagagtactgtgaaggctacgggacctgctctgcgcaggctgcatacaagtagctggagagcagacagcagccgcgcatccctgacacgagtgcacaggcaggcctacgcccggttgtatcccgtgttactggttaagcaggatggaagtaccattcacattcgatatagggagccaaggagaatgctcgcgatgccaatcgaccttgacactttaagtcccgaagaaaggagggccaggctgcgaaaacgagaggcacagctgcagagccgtaaggaatatgagcaagagctgagtgacgatctgcacgtagaacgatatcgccaattttggacaagaacaaagaagtag

SEQ ID NO: 124606 - DNA, 231 bp, synthetic construct
  misc_feature 1..231: note = Description of Artificial Sequence: Synthetic coding sequence
  source 1..231: mol_type = other DNA
atggctgccgtgggaagtctgcttggcaggctgcggcagtcaacagtgaaagctacaggacccgcccttagacggttacacacctcttcttggcgagctgactcctcaagagcgtctctcacccgcgtgcatcggcaagcctacgctagattatatcccgtcttattagtgaaacaggacggatcaaccatccacattcggtatcgggagcctagaagaatgcttgcatag

SEQ ID NO: 124607 - DNA, 702 bp, synthetic construct
  misc_feature 1..702: note = Description of Artificial Sequence: Synthetic coding sequence
  source 1..702: mol_type = other DNA
atggcagcacctgtggtgactgctcccgggcgggccctccttcgcgctggcgcgggacgcttgcttagggggggagtccaggagctcctccggccgaggcatgaggggaacgcccctgacctggcctgtaacttctctctctctcagaacaggggtaccgttatcgtggaaaggtggtggaaggtgccactggcgggcgaggggcggaagccaagattacaccgccgccaccgtgtgtataagttggtagaggacacaaaacacagaccaaaagagaatctcgagctgatcctcacccagagcgtagagaacgtgggtgttcggggtgatctggtgtccgtgaagaaatcccttgggcgcaataggttgctgccccaggggctcgctgtgtacgcgtcccccgaaaataaaaagctgttcgaggaagagaagttgctgagacaggagggcaagctggagaagatccaaacaaaggccggcgaggctctgggtgtggtggtcgccccccacacactgaaactgccagaagagccaattacgcgctggggcgaatattggtgcgaggtaaccgttaatggcctggacacagtgcgagtgcccatgtctgtggtgaacttcgaaaagcctaaaaccaaacgctacaagtactggctggctcagcaagcagccaaggctatggctccaacatcaccacagatatag

SEQ ID NO: 124608 - DNA, 804 bp, synthetic construct
  misc_feature 1..804: note = Description of Artificial Sequence: Synthetic coding sequence
  source 1..804: mol_type = other DNA
atggccgccccggtggtgacggcccccggaagggccttactgagagcaggcgccggcagactgctaagaggcggagttcaggagcttcttcgccctcgacatgagggaaatgcaccagatctggcttgcaatttttctctgtcgcagaacagagggaccgtgatagtggaacggtggtggaaggttcccttggcaggtgaagggcgcaaacctcggctgcaccggaggcacagggtgtacaagctcgtggaagatactaaacacaggcccaaagagaacctcgagctgatactaacacagtctgtggagaatgttggtgtgcgtggggatcttgtgtcagtgaagaagtccttgggaagaaatcgtcttctgccacaggggttagccgtgtatgcctctcctgagaacaaaaaactgttcgaggaagagaagctacttaggcaagagggaaagctggagaagatccaaaccaaggccggcgaagcaaccgtcaaatttctcaagagctgtcgccttgaggttgggatgaaaaacaatgtcaagtgggagctcaatccagagattgtggccaggcacttcttcaaaaacctcggcgtagtggtagcccctcacactctgaaactgccagaagagcccattacccggtggggcgagtattggtgcgaagtgactgttaacggactggacacagtgcgtgttcctatgtctgtcgtgaactttgagaaaccaaaaactaaaagatataagtattggctggcgcaacaggccgctaaagccatggcccctacatctccacagatttag

SEQ ID NO: 124609 - DNA, 606 bp, synthetic construct
  misc_feature 1..606: note = Description of Artificial Sequence: Synthetic coding sequence
  source 1..606: mol_type = other DNA
atggcagctaggacagctttcggcgctgtgtgccgaaggctctggcaaggattagggaacttcagcgtgaatacgtccaaaggaaacacagccaagaacggaggcctcctgctgtccacaaatatgaagtgggtgcaattttccaatctccatgttgacgtgccgaaagacttgacaaagccagtcgttaccatttcagatgagcctgatatcctctataagaggctgtcagtactggtgaagggccacgataaagctgtgcttgactcctatgaatacttcgccgtgctggctgcaaaggagctgggtattagtattaaagttcacgaaccaccacggaaaatcgaacgctttacactgctgcaatctgtccacatttacaagaagcacagggtgcagtacgagatgcggactctgtacagatgcctcgagctcgagcacctcacggggagcaccgccgatgtgtatctggagtacatccagagaaacttgcccgaaggcgtcgccatggaggttacgaaaacccagctcgagcagttgcctgaacacataaaagagccaatttgggagaccctgtcagaggagaaggaggaatcgaagagctag

SEQ ID NO: 124610 - DNA, 585 bp, synthetic construct
  misc_feature 1..585: note = Description of Artificial Sequence: Synthetic coding sequence
  source 1..585: mol_type = other DNA
atgcaggccgtaagaaacgccggctctagattcctgcggtcttggacgtggcctcagactgcaggccgtgtcgtggctcgcacaccagcaggaaccatatgtaccggagctcggcagctccaggatgctgcagctaagcagaaggtagagcaaaacgctgcccctagccacaccaaattttccatctatcccccaatccccggagaggagtcaagccttagatgggctgggaagaaatttgaggagatacctattgctcatatcaaggcaagccataacaatactcaaatccaagtggtttccgcttctaacgaacccttagccttcgcgagttgtggtactgaaggattccgcaatgctaaaaaagggacgggaatcgccgctcagaccgcaggcatagccgcagcagctagagccaagcagaagggtgtcatccatattcgggtggtggtgaagggacttgggcctggacggctgtccgctatgcatggacttataatgggtggtctggaggtcatctccatcacggacaatactcctataccgcataacgggtgcaggcctaggaaggcaagaaaactttag

SEQ ID NO: 124611 - DNA, 486 bp, synthetic construct
  misc_feature 1..486: note = Description of Artificial Sequence: Synthetic coding sequence
  source 1..486: mol_type = other DNA
atgcaggctgtcaggaatgcagggtcgcggtttttgcgatcctggacctggccacaaacggcaggacgggttgttgcccgcacgccggcgggtacaatttgcaccggagctcgccaactgcaggacgccgcggctaagcagaaggtcgaacagaacgcggctccctctcatacaaagttttccacgcagattcaggtcgtgtccgcaagcaacgagccacttgcctttgcatcgtgcgggacagagggcttccgcaatgccaaaaagggcacaggcatagcggcccagaccgcaggtatcgcagccgctgctagggcgaaacagaagggcgttatacacattagggtggtggtaaaagggttaggtccaggccgtctgtccgcgatgcacgggttgatcatgggtggactggaggtcatttctataaccgataacactcccatacctcacaacggatgcagacccagaaaggcacggaaactctag

SEQ ID NO: 124612 - DNA, 417 bp, synthetic construct
  misc_feature 1..417: note = Description of Artificial Sequence: Synthetic coding sequence
  source 1..417: mol_type = other DNA
atgtcttggagtgggctcctgcacggacttaacaccagccttacttgcggacctgcactggtcccacgcctgtgggcaacctgttcaatggccactttaaaccaaatgcatcgccttggacctcctaagagacctcccagaaagctaggacctacagaaggccgacctcagctaaagggggtagtgctctgcaccttcaccaggaagcccaagaaaccaaactccgcaaaccgtaagtgctgtagggtgcgtcttagcactggccgcgaagctgtgtgctttatccccggggaaggccacactctgcaggaacaccaaatcgtgctggtggagggagggcgcacccaggacctgccgggagtgaaacttaccgtggtgaggggcaagtatgattgcggtcatgtacagaagaaatag

SEQ ID NO: 124613 - DNA, 417 bp, synthetic construct
  misc_feature 1..417: note = Description of Artificial Sequence: Synthetic coding sequence
  source 1..417: mol_type = other DNA
atgagttggtcagggttgctccatggcttgaatactagtttaacttgtgggccagctctagtgccccggctctgggcaacatgtagtatggctacgttaaaccagatgcaccgcctgggacctccaaagcgacctccgcggaagttagggcctacggaaggcaggcctcagctgaaaggggttgtgctgtgtacattcactcggaaacctaagaagccaaatagcgccaacagaaagtgttgccgagtgcgcttatctaccggcagggaggcagtctgcttcattcctggtgagggacacacacttcaagaacatcagatagtgttggttgagggtgggcgtacccaggatctgccaggggtgaaactcacagtcgtgcgaggcaaatacgactgtggtcacgtgcagaagaagtag

SEQ ID NO: 124614 - DNA, 417 bp, synthetic construct
  misc_feature 1..417: note = Description of Artificial Sequence: Synthetic coding sequence
  source 1..417: mol_type = other DNA
atgtcatggagtggtttgcttcacgggttgaacacctcactcacatgtggccccgctctcgtacctcgcctttgggcaacctgttcgatggccaccctgaatcagatgcatagactcggaccccctaaacgacccccccgtaaattaggcccaaccgagggccgtcctcagctgaagggagtcgtgctgtgcacttttactaggaagccaaagaagcctaactctgccaatcggaaatgttgccgggtcaggcttagcacaggccgcgaagctgtttgtttcatcccaggcgagggccacaccttgcaggagcaccagatagtccttgttgaaggcggacgtacacaggacctccccggggtgaaattgacagtggtgcgggggaaatatgattgcgggcacgtgcaaaaaaagtag

SEQ ID NO: 124615 - DNA, 387 bp, synthetic construct
  misc_feature 1..387: note = Description of Artificial Sequence: Synthetic coding sequence
  source 1..387: mol_type = other DNA
atggccgccttcatgctgggaagcctcttacgcacatttaagcagatggtaccttcaagcgcctcgggtcaggtgaggtctcactacgtagattggcgcatgtggagagatgtaaagagacgcaagatggcatatgagtatgcagatgaaaggctgcggataaactccctcagaaagaacaccattttacctaagatcctgcaggatgtggcggacgaggaaattgcagctcttcctagggactcctgccctgtgcgtatcagaaaccgatgcgtcatgacctcaaggccaagaggagtgaagaggcgctggagactttctcgtatagtattccgtcacctggctgaccatggacagttgtctggcattcagcgtgcgacttggtag

SEQ ID NO: 124616 - DNA, 774 bp, synthetic construct
  misc_feature 1..774: note = Description of Artificial Sequence: Synthetic coding sequence
  source 1..774: mol_type = other DNA
atgctgagagtggcttggagaaccttgtcactgatccgaactcgggccgtcacccaggtactggtccccgggctacctgggggtggctcagcaaagttccctttcaaccaatgggggctgcagcctagatccctgttgctgcaagctgcaagaggatatgttgtgcgcaaacccgcccagtccagactggacgatgatccccccccttccactctcctgaaggattaccagaacgtccccggcattgagaaagtggatgatgtagtgaagagactgctgagtcttgaaatggcgaacaaaaaagaaatgcttaagattaaacaggagcagttcatgaagaagatcgtggccaacccagaggacacgcggtcgctggaagctaggataatagctctatcagtcaaaattaggagttacgaagagcatctggagaagcatcgtaaagataaagcacacaagaggtacctactgatgagcatcgatcagaggaaaaaaatgttaaagaacctgagaaacaccaactacgacgtgtttgagaaaatctgctgggggctcggcatcgaatacacgtttccacctctttattatcgcagggcacatcgccgtttcgtgacaaagaaggccctctgtattagagtgtttcaggagacacaaaagcttaaaaaacgcagaagagctctgaaagcggccgccgcggctcagaagcaggccaagcggcgaaacccagacagcccagcaaaggcgattcctaaaactctcaaggacagtcaatag

SEQ ID NO: 124617 - DNA, 300 bp, synthetic construct
  misc_feature 1..300: note = Description of Artificial Sequence: Synthetic coding sequence
  source 1..300: mol_type = other DNA
atggtccaccttacgacactcctgtgcaaagcctaccgcggcgggcacctaaccatccggctcgccctcggtggctgtactaaccgaccgttctatagaatcgttgccgcccataacaagtgtccaagagacgggaggttcgtcgagcagttggggagctacgaccccttgcctaactcacacggcgagaagctggtcgccctaaatctagataggatccgacactggatcggttgcggtgcgcatttatccaagccgatggagaagctcctcggcctgaaatattctcacgtcttctag

SEQ ID NO: 124618 - DNA, 414 bp, synthetic construct
  misc_feature 1..414: note = Description of Artificial Sequence: Synthetic coding sequence
  source 1..414: mol_type = other DNA
atggtccatcttactacacttctctgtaaggcatatcggggcggccacttgacgatcagactggcactggggggttgtacgaatcggcccttttacaggatagtcgccgcccacaataagtgccccagggatggcagatttgtggaacagctgggttcctacgacccgctcccaaattcccacggagaaaaactggttgccttaaatttggatagaattcgccactggattggatgtggagcccatcttagtaaacccatggaaaagctcttaggcctcgccggatttttccctttgcatccaatgatgataactaacgctgaaaggctccgcagaaaaagagcccgtgaggtgttactggcaagccagaagactgacgccgaagctaccgatactgaggctacagagacctag

SEQ ID NO: 124619 - DNA, 372 bp, synthetic construct
  misc_feature 1..372: note = Description of Artificial Sequence: Synthetic coding sequence
  source 1..372: mol_type = other DNA
atggtgcatctcacaaccctcttatgcaaagcgtaccggggtgggcatttgacaatccgactggcactgggcggatgtacaaaccgcccattttatagaattgttgcagctcacaataaatgccccagagatgggcgatttgtggaacaactgggatcatatgaccccctgccaaattcgcacggggagaagctggtggctctgaatctggaccggattaggcattggattggttgtggcgcccacctgagcaagcctatggagaaactgttgggaaaaacggacgcaaggttccccgagcaaggagaggagcgcccagaacagcatcatttcccagaggaccttgctcctgccagaggtcggggcctgtag

SEQ ID NO: 124620 - DNA, 393 bp, synthetic construct
  misc_feature 1..393: note = Description of Artificial Sequence: Synthetic coding sequence
  source 1..393: mol_type = other DNA
atgtcagtcgtgcgcagtagcgtgcacgctcgctggattgtgggcaaggtgattggaacaaaaatgcagaaaactgctaaggtccgcgtgaccagactggtgctcgatccatacttgctgaagtattttaacaagcgaaagacctacttcgcacatgatgccctgcagcagtgtactgtgggggacatcgtgctgctgagagctttaccagtccccagggctaaacatgtgaagcatgaactggcagaaatcgtattcaaagtgggcaaggtgattgatccggtcacaggcaagccctgcgctggtactacctacctcgaaagcccactgagtagcgaaaccacccagcttagtaagaacctggaagaacttaacatcagtagcgctcagtag

SEQ ID NO: 124621 - DNA, 390 bp, synthetic construct
  misc_feature 1..390: note = Description of Artificial Sequence: Synthetic coding sequence
  source 1..390: mol_type = other DNA
atgtctgttgtgcggtctagtgtgcacgctcgctggatcgtggggaaggtgatcgggactaaaatgcagaagacagcaaaagtgagagtgacaaggctagtattggacccttatcttttgaaatactttaataaacgaaaaacttactttgcacacgatgcactgcagcagtgcaccgtaggcgacattgtcctcttgagggcgctgccagtgccacgcgccaagcacgtcaaacatgagctggccgagatagtattcaaagtgggcaaggtaattgatcccgttaccggtaaaccctgtgcagggactacgtacctagagagcccactttcttctgagactacacaattatctaagaacctggaagagcttaacatcagttccgcatag

SEQ ID NO: 124622 - DNA, 384 bp, synthetic construct
  misc_feature 1..384: note = Description of Artificial Sequence: Synthetic coding sequence
  source 1..384: mol_type = other DNA
atggctgctctcaaggccctcgtttccggctgtgggcgcttgctaaggggactcctcgccggcccagctgccacatcttggagcagactacccgcccggggttttcgcgaggtggtggagacacaggagggaaaaaccacaataatagagggacggattacagccacacctaaagagagcccgaatccccctaatcctagtgggcaatgtccaatttgtagatggaacctaaagcataaatataattacgacgacgttctcctgttatcccagtttatccgcccccacggcggaatgctgccacggaagattactggcctgtgtcaggaagagcacaggaaaattgaggagtgtgttaaaatggcacatcgcgccgggacatag

SEQ ID NO: 124623 - DNA, 813 bp, synthetic construct
  misc_feature 1..813: note = Description of Artificial Sequence: Synthetic coding sequence
  source 1..813: mol_type = other DNA
atggcggctctaaaggctctcgtctccggatgcggaaggctactccgagggctcctcgccggacccgcagctacctcatggtctaggctgcctgccagaggatttcgcgaggtggtggagacacaggaaggtaaaactaccattattgaaggtagaattaccgctacccccaaggagagtccgaatccacctaaccctagcggacaatgcccaatttgtaggtggaacttgaagcacaaatacaattatgatgacgttctgctgctgtcgcagtttatccgacctcatggtggaatgttgccacgaaaaatcaccggtctgtgccaagaggagcaccgcaagatagaagaatgtgtgaaaatggcccacagggctggaaggagaccgtggggaccaaggggcgcagagggatgcagacactccttacctactcagctgccccacgtgtctgcaccgcctggcagaaaggttgacatacggtcggtaaactacacgcatcacccgatgcctacctttccactgccctgggctttccccctggctcctagcgagcttcagcgagagctgcagagactctctccgctccctcgccatagtgggctcttaccgaatcacagacctcgccttcccgaaggggtcgtgcccaaatctaaaccccagctcaacagatatcttacgaggtgggcgcccggatctgtgaaacctatttataagaagggtccacgatggaaccgtgttcgcatgccagttggcagtccactactgcgcgataatgtctgctacagtagaacaccctggaaactgtaccactag

SEQ ID NO: 124624 - DNA, 591 bp, synthetic construct
  misc_feature 1..591: note = Description of Artificial Sequence: Synthetic coding sequence
  source 1..591: mol_type = other DNA
atggctgccctgaaagctttagtatctggctgtggccgactgctgcgtggcctgctggccggacccgctgccacatcttggtcaaggctgccagccagaggattcagagaagtggtagaaacacaggagggaaaaactacaatcatcgaagggcgcataaccgcaactcctaaagagtctcccaacccaccaaacccgagcgggcagtgcccaatatgccgttggaacctaaaacacaaatataactatgacgacgtgctgttgctgagccagttcatcaggccacacgggggcatgctcccacgcaagatcaccggcttgtgtcaagaagagcacagaaagatcgaggagtgcgtcaagatggctcaccgcgcaggcctgttgcctaaccacagacctagactgcccgaaggggtggtacctaagagcaagccccaactcaaccggtacctgaccagatgggcgcctggctctgtgaaacccatctataagaagggcccccggtggaatagggtcaggatgccggtaggcagccccctactgcgcgacaacgtgtgttactctcggacaccttggaagctctatcactag

SEQ ID NO: 124625 - DNA, 795 bp, synthetic construct
  misc_feature 1..795: note = Description of Artificial Sequence: Synthetic coding sequence
  source 1..795: mol_type = other DNA
atggccgctctcaaagctctggtcagcgggtgcggtcgcttgttacggggattactcgcggggcctgccgcaacgagctggtcacggctgcctgctcgagggttccgggaggtggttgaaactcaggagggcaaaaccacaatcattgaggggcggatcacagcaactccaaaagagtcccccaatccgccaaatcctagtgggcaatgccccatatgcagatggaatctgaagcacaagtataactatgatgacgttctgttgctgtcacagtttatccgtccccacggagggatgctacctagaaagattactgggctttgtcaagaggagcaccgcaagatcgaggagtgcgtgaagatggcacaccgggccggccgcagaccatggggccctcgtggtgctgagggttgcagacattctctacccacccaactgccccacgtatctgcaccacccggcaggaaggtcgacatccgctccgtgaattacacgcatcatccaatgccaacttttccattgccttgggccttcccactcgcaccaagcgaattacaacgtgaattgcaacgcctatcacctcttccaagacactccggtttattgcccaatcaccggcctaggttgccggagggggtcgtacccaaatccaaaccccagctgaacaggtaccttacccggtgggccccgggaagtgtgaagcccatatataaaaaaggccccaggtggaatagggtccggatgcccgtgggctcccccctattaagggacaacgtgtgctactcccgtacctag

SEQ ID NO: 124626 - DNA, 777 bp, synthetic construct
  misc_feature 1..777: note = Description of Artificial Sequence: Synthetic coding sequence
  source 1..777: mol_type = other DNA
atggccgctagtgtgctgaacacagtgctccgaaggctacctatgctgagtttatttcgtggaagccatcgggttcaggtgccactacagacgctgtgtacaaaagctccgagcgaggaggatagcctgtcatccgtccccatcagtccctataaggacgaaccctggaagtacctcgaatcagaggagtaccaggagaggtatggcagtcggcctgtatgggccgactatagacggaatcataagggcggcgtccctcctcagagaacccgcaaaacgtgcataagaaggaataaggtggttggaaatccgtgccctatttgcagagatcataaattacacgtggactttcgcaacgttaagttgctggagcagttcgtgtgtgcccacacaggcatcatcttttatgctccttataccggagtctgtgtgaaacaacataaaagactaacgcaggccatacagaaggcgagagatcacggccttttgatatatcatattcctcaggtggaaccccgcgatctggactttagcacaagccatggagctgtctccgccactccccccgcccctacactagtatcgggggatccctggtacccatggtacaactggaagcagcctccagaaagagaactgtctcgcttgcgccgcctgtatcagggacacctgcaggaggagagtggaccacctcccgagagtatgcctaagatgccaccccgcacccctgcagaagcaagtagcactggccagaccgggccccaaagtgccctttag

SEQ ID NO: 124627 - DNA, 777 bp, synthetic construct
  misc_feature 1..777: note = Description of Artificial Sequence: Synthetic coding sequence
  source 1..777: mol_type = other DNA
atggccgcaagcgtgctcaacaccgtgctcaggcggctaccaatgctatctctgtttagagggtcccaccgtgtccaggtcccactgcaaacactgtgcactaaggccccgtcggaagaggatagtctttccagcgtaccaatttccccgtacaaagacgagccctggaaatatcttgaaagcgaagaataccaggaacgctacggttctcgaccagtttgggcagattataggcgaaatcacaagggcggtgtccctccacagaggacacgtaaaacatgcatccgcagaaacaaagtggtaggcaacccatgcccaatctgcagggatcacaaactccatgtggattttcgcaacgttaaactcctcgaacagtttgtgtgtgctcacacggggattatcttctacgcgccctacaccggtgtgtgcgtaaagcaacacaagagactgacacaggccatccaaaaggctcgcgaccatggcctgctcatctaccacatcccgcaggtggaaccaagagatcttgatttctccacaagccacggggccgtgtcagccacccccccggctccaactctagtgtccggtgacccctggtatccctggtataactggaaacagccgcccgagagagagttatcccgacttagacggctgtatcagggtcatcttcaagaagagtccgggccccctccagagtcaatgcctaaaatgccgccaaggactccagctgaggcatctagtacaggacagactggccctcagagtgcactgtag

SEQ ID NO: 124628 - DNA, 648 bp, synthetic construct
  misc_feature 1..648: note = Description of Artificial Sequence: Synthetic coding sequence
  source 1..648: mol_type = other DNA
atggccgctagcgttcttaacaccgtcttacgaaggctccccatgctgtcccttttccgtggatcccatagagtacaagtgccactgcagaccttatgcaccaaggccccgagtgaagaggactctctctccagcgtgccaatttccccctacaaggatgagccgtggaagtacctggaatccgaggagtaccaggagcgctacgggagtcggcctgtctgggccgactatcgtcgaaatcacaaaggaggggttcccccacagcgaactagaaagacatgtatcaacgtgaaactgctagaacagttcgtttgtgcgcacaccgggatcattttctatgccccttatactggtctcctaatttatcacattccccaagttgaaccaagggatttggacttttctacgtcccatggcgctgtcagtgctacgccacccgcacctacattagtctccggcgatccatggtacccatggtataactggaagcaacctcccgagagggagctgagtagactgcgccggttgtaccagggtcacctgcaagaagagagtggcccaccccccgagagtatgcctaagatgccaccacgtacccctgcggaggccagcagtaccgggcaaaccggtccacagtctgctctttag

SEQ ID NO: 124629 - DNA, 648 bp, synthetic construct
  misc_feature 1..648: note = Description of Artificial Sequence: Synthetic coding sequence
  source 1..648: mol_type = other DNA
atggcggctagcgtgctcaacacggtactgcggaggctccccatgctatcactgttccgcggcagtcaccgtgtgcaggtgccactacagacgctgtgcaccaaggccccgtctgaggaggatagtctgtccagtgtccctatcagcccatataaggacgagccgtggaaatacctggaatccgaagaataccaagagcgctacggttctaggcccgtgtgggcggattatcgacgcaaccacaaagggggagtgcctccccagcgcacccgtaagacttgtataaacgtaaagctcctcgagcaatttgtatgtgcacataccgggatcatcttctatgctccctatacaggactgctgatctatcacattccacaggtggaacccagggatctggacttcagcacttcccatggcgctgttagcgccactccccctgcgccaacccttgtgagcggcgacccatggtatccatggtacaactggaaacagcctcccgagagggagctctcccggctcagacgcctctaccagggccaccttcaggaggaaagcggaccccctcccgagagtatgccaaaaatgcctccacggactccagcggaggcgagttcaactggccagactggcccgcaaagcgctctctag

SEQ ID NO: 124630 - DNA, 777 bp, synthetic construct
  misc_feature 1..777: note = Description of Artificial Sequence: Synthetic coding sequence
  source 1..777: mol_type = other DNA
atggccgctagtgtattaaatactgttctgcgtcgcctacctatgctatccctctttagagggagccaccgggttcaggtccctttgcagaccctgtgtacaaaggccccgtctgaagaagattcattaagttcagtgcccatttccccatacaaagacgagccctggaagtatttggagtccgaggaataccaggagcggtatggctcacggcccgtctgggccgactatagaaggaaccataaagggggtgtgccacctcagcggactaggaagacctgtattaggcggaacaaggtggtcgggaatccatgtcccatctgtcgcgaccacaaactgcacgtggactttaggaatgtgaagctgcttgagcagttcgtctgtgctcacaccggaatcatcttctacgctccttacactggggtgtgtgtgaaacaacataaacggttaacccaggctattcagaaggctagggaccacgggttgctgatctaccacatcccccaggtggaaccccgtgacctggatttctccaccagccatggggcagttagtgctacacctccagcacctacactggtcagcggcgacccatggtacccctggtataattggaaacaaccccccgagcgcgaactgagccggctgagacgtctttaccagggccacctacaggaagagagcggtcctcctccggagtctatgcctaaaatgcctccgagaaccccggcggaggcctcttcgacaggacagactggcccgcagtctgcactgtag

SEQ ID NO: 124631 - DNA, 648 bp, synthetic construct
  misc_feature 1..648: note = Description of Artificial Sequence: Synthetic coding sequence
  source 1..648: mol_type = other DNA
atggccgcatccgtgttgaacaccgtgttaagacgtctgccaatgctgtccctgtttagaggttcgcatcgcgtacaagtgcctctgcaaacgttgtgcaccaaagcaccctcagaggaagacagcctctcgagtgttcctatctccccctataaggacgagccttggaagtaccttgagagcgaagaataccaggagaggtatggcagtagaccagtttgggctgactataggcgcaaccataagggtggcgtgccacctcagaggactcggaaaacttgcatcaatgtgaagctgctagaacaatttgtatgcgcccacaccgggatcatcttttatgccccatatacgggactgctcatttatcacattccacaagtggagcctagagatttggatttttcaacaagccacggcgccgtctccgctactccccctgcacccaccctcgtctccggagatccgtggtatccctggtataattggaaacagccacctgaaagagagctttcacgtctcagaagactataccagggacacctccaggaggaaagcggtccaccccctgaatccatgccgaagatgccccctaggactccagcagaagcttcctcaaccgggcaaactgggccacaaagtgcgctctag

SEQ ID NO: 124632 - DNA, 648 bp, synthetic construct
  misc_feature 1..648: note = Description of Artificial Sequence: Synthetic coding sequence
  source 1..648: mol_type = other DNA
atggctgcctccgttcttaatactgtcctgagacgcctgcctatgctgtctttgttccgtggatctcaccgggtccaagtcccgctgcagacactctgcaccaaagccccttcagaggaggatagtcttagctctgtgcccatatccccttataaggatgagccctggaaatacctggagtctgaggaataccaggaacggtatggatccaggccagtgtgggctgattaccgacggaaccataaagggggggtacctcctcagagaacacgcaagacctgcattaatgttaaattactggagcagtttgtgtgcgcacacacaggcatcatcttttacgcaccgtataccgggctcctcatatatcatatcccgcaggtggaacccagggatctcgattttagcaccagccacggggccgtgtccgctacgccgccagcccctaccctcgtctcaggagacccgtggtatccttggtacaattggaagcagccccccgaacgagagctgtccaggttgcgacgtttataccaaggtcatctgcaggaagagagcggcccaccaccagagtccatgcctaaaatgccacccaggacacccgccgaagcgtcatctaccggccaaacaggccctcaatcagccctgtag

SEQ ID NO: 124633 - DNA, 777 bp, synthetic construct
  misc_feature 1..777: note = Description of Artificial Sequence: Synthetic coding sequence
  source 1..777: mol_type = other DNA
atggcagcttccgtcctcaacacggtcctgcgacgccttccaatgctgagcctcttcagagggtcgcatagggtgcaggtgcctttgcagacactgtgtactaaagcaccctctgaggaggattctctcagttcagtccccatcagcccgtacaaagatgagccctggaagtacttggaaagcgaggagtaccaggagcgttatggaagtcggcccgtgtgggctgattatagacgaaaccacaagggtggagtgccccctcagcggactaggaaaacgtgtatccgcagaaacaaggtagtcggaaatccgtgccccatctgtagagatcacaagctgcatgttgactttcgaaatgtgaagctcttggagcagtttgtctgcgcgcatacggggatcattttttatgccccctacaccggtgtgtgcgtgaagcagcacaagaggctcacacaggccatccagaaggcacgggaccacggactcttgatctatcacatcccgcaagtagagccccgggacctggacttttctacctcacacggcgctgtttccgcaactccacccgcaccaactctcgtgagtggtgacccatggtatccctggtataattggaaacagccacctgagcgggagctatctcggcttagaaggctgtaccaagggcatctgcaggaggagagtggaccaccacccgagagtatgccaaagatgccaccccgcactccagccgaggcttcttcaactgggcagactggaccccaatccgccctgtag

SEQ ID NO: 124634 - DNA, 648 bp, synthetic construct
  misc_feature 1..648: note = Description of Artificial Sequence: Synthetic coding sequence
  source 1..648: mol_type = other DNA
atggcggcaagtgtgctgaacaccgtgttaagaagactccctatgttatctttattccgcggctctcacagggtccaggtaccacttcaaactctgtgcacaaaggctccatctgaagaggatagcctgtctagcgtgcccatttcgccttacaaggatgaaccttggaaatacctggagtccgaggagtaccaagaacggtatggatcgcggcccgtgtgggcagactataggcgaaaccacaagggtggcgtgccgcctcagcgcactaggaaaacatgcatcaacgtgaagctgctagagcagtttgtgtgtgcacataccgggattattttctatgccccatataccgggctgcttatttaccacattccacaggttgaaccgcgcgatttggatttctccacttcccacggagcggtgtctgccacccctcctgcacctaccttggtctccggcgatccttggtacccgtggtacaattggaaacagccgccagagagggagctaagtcggcttcgcagactgtatcagggccatctccaggaggagtcaggccctccgcccgaaagtatgccaaaaatgcctcccagaactccagccgaagcgtcctctacgggacagaccggcccacagtctgcactgtag

SEQ ID NO: 124635 - DNA, 777 bp, synthetic construct
  misc_feature 1..777: note = Description of Artificial Sequence: Synthetic coding sequence
  source 1..777: mol_type = other DNA
atggccgcctccgtgctgaataccgtgctgcgtcggttgccaatgctgagcttgtttcgcggctcacaccgcgtgcaggtccccctgcagaccctctgcaccaaagctcctagtgaggaggacagcctgtcctctgtacccatttctccctataaagatgaaccctggaaatatctggaaagcgaggaataccaagagaggtacggaagtagacctgtctgggcggactaccgcagaaaccataaggggggtgtgcccccacagcgaacccggaagacttgcattcggcgaaacaaggtggtgggtaatccgtgtccaatttgcagggaccacaaactccacgtcgactttcggaacgtaaagttactggaacaattcgtgtgcgcacacaccggcattatcttctatgctccctacacaggcgtgtgtgtgaaacagcacaagcgtctgactcaagcaatccaaaaggccagagatcacggtcttctcatttatcacattcctcaagtcgaacctagagatttggacttttctacaagccatggggccgttagcgccaccccgcccgctcctacccttgtgagcggtgatccttggtacccttggtacaattggaagcagccaccagagagggaattatcaaggcttcggagactgtatcagggccacctgcaagaggaatccgggccaccacctgaaagtatgccaaaaatgcctcctaggactcctgccgaagcctcatctaccggccagactggacctcagtctgcgctttag

SEQ ID NO: 124636 - DNA, 648 bp, synthetic construct
  misc_feature 1..648: note = Description of Artificial Sequence: Synthetic coding sequence
  source 1..648: mol_type = other DNA
atggctgcctccgtgctcaacaccgtgctgaggcggctgcctatgttgagcctatttcggggctcacatcgcgttcaagtaccgctccagacgctgtgcacgaaagcgccaagtgaggaggactctctttctagcgtccccatttcaccctataaggatgagccttggaaatatctggagtccgaagagtaccaggaaagatatggatctagacctgtgtgggcagattacagacgcaatcacaaaggaggtgtccctcctcagcgcactagaaagacatgcattaacgttaaactcctggagcagttcgtgtgtgctcacaccggcatcattttctacgcgccctatactggccttctgatctaccatataccccaagtggagccaagagatttagatttcagcacatcacacggcgcagtgtcagccacccccccggctccaactctcgtgtccggggacccctggtatccttggtacaactggaagcagccaccagagcgggagctcagtagactccggagattgtatcaaggtcacttgcaggaagagtccggtcccccgcccgaaagcatgcctaagatgcccccacgaactcctgccgaggctagtagcactggccagaccgggccccagtccgccctctag

SEQ ID NO: 124637 - DNA, 648 bp, synthetic construct
  misc_feature 1..648: note = Description of Artificial Sequence: Synthetic coding sequence
  source 1..648: mol_type = other DNA
atggccgcttcggtgttaaacactgtgctccgccggctgcccatgttgtctcttttccgcggtagtcatagagttcaggttccattgcaaactctctgtaccaaagcaccttccgaggaggattcattgagctcagtgccaatctctccatataaagatgagccttggaagtacctcgagtctgaggagtaccaggagcggtatggcagtcgccccgtgtgggctgactatcgcagaaatcacaaagggggcgtgccgccacagcggacgcggaagacctgtatcaacgtcaagctgctcgaacagttcgtctgcgcacataccggcattatattttacgcgccttatactggactgcttatttatcatattccacaggttgaaccacgggatctcgattttagcacgtcacatggagccgtgtcggccacccctcctgcccctaccctggtgtcgggagatccctggtatccgtggtataactggaagcagccccccgagcgggagttgtccagactccgacggctctatcaaggacatctgcaggaggagtctggccccccccccgaatccatgccaaagatgccaccaaggacaccagcagaggccagctctacaggccagacggggcctcagtctgctttatag

SEQ ID NO: 124638 - DNA, 777 bp, synthetic construct
  misc_feature 1..777: note = Description of Artificial Sequence: Synthetic coding sequence
  source 1..777: mol_type = other DNA
atggccgcgagcgttctcaacacggtcctgagacgccttcctatgctgtccttgttccggggctcacatcgggtccaggtgcccttacagactctgtgtactaaagcgccttctgaggaagattcactcagctccgtgccaatctcgccatacaaggacgaaccgtggaaatacctggaaagcgaagagtaccaagaaaggtacggctcgcgaccagtgtgggcggactaccgtcggaatcacaaggggggtgtgcccccgcaaagaaccaggaaaacctgcattaggagaaacaaggtggtaggaaatccatgtcctatctgtcgtgaccataagcttcatgtggatttccgcaacgtcaagcttctggagcagttcgtatgcgcccatacaggaatcatcttctatgcaccctacaccggggtgtgcgtaaagcaacacaaacgccttactcaggccatacagaaagcccgggatcacggcttgctaatataccacatcccgcaggtggagccaagagatcttgacttttcaacttcgcacggcgctgtcagtgcgacgccccccgcacctactcttgtgtccggcgacccgtggtacccatggtacaattggaaacagccccctgagagagaactctctcggctaagacgactgtatcagggccatctccaagaggaaagcggaccccccccggagtctatgcccaaaatgcctcctcgaacaccggccgaggctagcagcaccgggcagacaggtccgcagagcgctctgtag

SEQ ID NO: 124639 - DNA, 777 bp, synthetic construct
  misc_feature 1..777: note = Description of Artificial Sequence: Synthetic coding sequence
  source 1..777: mol_type = other DNA
atggcggcgagtgttcttaacactgttctgagacggctgcctatgctatctctcttcaggggcagccacagggtgcaggtgcctctccagaccctgtgtaccaaggctcctagtgaggaagactcactcagttcagtgcctatttcaccgtacaaagacgagccgtggaagtatctggaatctgaagagtaccaagaaagatacggctctcggcctgtgtgggcagactatcggcgtaaccataaaggtggtgtcccaccacagcgtacccgcaaaacatgcattaggcggaacaaagtcgtgggcaacccttgcccgatctgcagagaccacaagttgcatgtagactttcggaatgtcaaactgttggaacagttcgtttgtgcacacacaggtatcattttttacgcaccatatactggcgtgtgtgtgaagcagcataaaaggttgactcaggctatccagaaagctcgcgatcatggattacttatttaccatatcccccaggtagaaccccgggatctggatttttctacatctcacggggccgtctcggccactcctccagcacctacactcgtgagtggggacccttggtacccttggtataattggaaacaaccgcctgaaagagagctcagccggctacgcaggctctaccagggccacttacaggaggagagtgggccacctccggagagcatgccaaaaatgcctccccggacgcccgcagaggctagtagcacgggccagactggcccccaaagcgccctgtag

SEQ ID NO: 124640 - DNA, 366 bp, synthetic construct
  misc_feature 1..366: note = Description of Artificial Sequence: Synthetic coding sequence
  source 1..366: mol_type = other DNA
atggccgcctcagtactcaatacagtcctgagaaggcttcccatgctcagcttattcagaggatctcacagggtgcaggtccccctccagactctgtgcacaaaggctccttccgaggaggatagcctgagctccgtgcctatttctccttataaagacgaaccatggaagtacctcgaatccgaagagtaccaggagcggtacggcagccgacccgtgtgggcggattatcgtagaaatcataagggaggagttccccctcagaggaccaggaagacctgcataaggcggaataaggttgtgggtaatccgtgccctatttgtagagaccacaagctgcatgtggatttccgagagagcgtgtag

SEQ ID NO: 124641 - DNA, 366 bp, synthetic construct
  misc_feature 1..366: note = Description of Artificial Sequence: Synthetic coding sequence
  source 1..366: mol_type = other DNA
atggccgcatccgtcttgaataccgtcctacgaaggctccctatgctgagcttgttccggggatcccatcgggtccaggtaccgctccagacactctgtacgaaagcacccagcgaagaggattccctgagctctgtgcccatcagcccttataaggacgaaccttggaaatacctagaatccgaggagtaccaagaacgctatggctcacgtcctgtgtgggccgattaccgccggaaccacaaagggggcgttcccccccaacgtacccgcaagacctgtatcaggcgcaacaaagtggtggggaacccgtgcccaatttgcagggatcacaagctacacgtcgactttagggagtcagtgtag

SEQ ID NO: 124642 - DNA, 366 bp, synthetic construct
  misc_feature 1..366: note = Description of Artificial Sequence: Synthetic coding sequence
  source 1..366: mol_type = other DNA
atggctgcttccgtgctgaacaccgtactgagaagactgcctatgctgtccctgttccgcgggtcacaccgagtgcaggtacccctccagaccttgtgtacaaaggcccccagcgaagaggattcactttcttcagtgcccatctcaccttacaaggatgaaccttggaagtatctcgagagcgaggagtatcaggagcgatacgggtcacgacccgtgtgggccgactacaggaggaaccacaaagggggtgtgccaccacagcggacaagaaaaacatgtatcaggagaaacaaggttgtgggcaacccgtgtcctatttgcagggatcacaagctccatgtagatttcagggagtcggtgtag

SEQ ID NO: 124643 - DNA, 366 bp, synthetic construct
  misc_feature 1..366: note = Description of Artificial Sequence: Synthetic coding sequence
  source 1..366: mol_type = other DNA
atggcggcgtcagtcctgaacaccgtcttgcgccggcttcctatgttaagtctgttcagaggaagccacagggttcaggtaccgttgcaaacactttgtactaaggctccttctgaggaagacagcctgtcatctgtccccatatcaccttataaagatgagccctggaaatacctcgaatccgaagagtatcaggaacgatacggaagtcgccccgtgtgggccgactataggcggaaccataaaggcggagtccccccacagcgaactagaaagacctgtatacggcgcaacaaagtggttggtaatccctgtcctatttgccgagaccataaacttcatgtcgacttccgcgagagtgtgtag

SEQ ID NO: 124644 - DNA, 366 bp, synthetic construct
  misc_feature 1..366: note = Description of Artificial Sequence: Synthetic coding sequence
  source 1..366: mol_type = other DNA
atggccgcctccgtgctgaatactgttctgagacggctaccaatgctgagcctgtttcgtggtagtcaccgggtgcaggtgccactccagactctgtgtacaaaagcaccatcagaggaggactccttgtcatcagtgccaatcagtccttataaggatgaaccatggaagtatcttgaatctgaagagtaccaggagagatacggctcgagacctgtgtgggcggactacaggcgcaatcataaaggaggcgtgcccccacagcgaacaagaaagacatgcatcaggagaaacaaggttgtcggtaacccatgcccgatctgtcgggaccacaagctgcatgtggacttccgcgaatctgtatag

SEQ ID NO: 124645 - DNA, 366 bp, synthetic construct
  misc_feature 1..366: note = Description of Artificial Sequence: Synthetic coding sequence
  source 1..366: mol_type = other DNA
atggcggcaagcgttcttaacacggttctacgacggctccctatgctgtctctgtttagggggagccatagagtacaggtgccgttacagacactgtgcactaaagcaccttctgaagaggattccttaagtagcgtgccaatctccccctataaggacgagccctggaaatacttagaatccgaggaataccaggaacgttatgggtcgcgaccggtgtgggcagattacaggcgcaaccataagggcggagtgccacctcaaagaacccgcaagacatgcattcgcagaaacaaagttgtcggcaacccttgtcccatctgccgggatcacaaactgcacgttgattttcgggaatcagtgtag

SEQ ID NO: 124646 - DNA, 366 bp, synthetic construct
  misc_feature 1..366: note = Description of Artificial Sequence: Synthetic coding sequence
  source 1..366: mol_type = other DNA
atggctgcatcagttctcaacacagtgttacgcagactgccaatgctgtcattgttccgagggtctcaccgggtacaagtgcctctccagacactgtgtacaaaggcaccttctgaggaagattccctgagctccgtgcctatcagtccttacaaagatgaaccatggaaatacctcgagtctgaggagtaccaggaacgatacggctccagaccggtgtgggccgactatcgacgcaaccacaaggggggcgtgcccccacagaggactaggaagacctgtatccggagaaacaaagtcgttggcaacccctgcccaatctgccgagaccataaactacacgtcgattttcgcgagagtgtgtag

SEQ ID NO: 124647 - DNA, 429 bp, synthetic construct
  misc_feature 1..429: note = Description of Artificial Sequence: Synthetic coding sequence
  source 1..429: mol_type = other DNA
atggccgctgtggtagctgtctgtggcggtttgggaagaaagaagctgacgcacctggtgaccgccgcggttagccttacacatcctggcacccatacagtactctggcgccggggatgcagtcaacaggtgagttccaatgaggacctcccgatcagcatggaaaatccctacaaagaaccattaaaaaagtgcatcctgtgcggtaagcatgtagattacaagaacgtgcaactactgagccagtttgtctccccattcactggttgtatttacggtcggcatatcaccggactgtgcggtaaaaagcagaaagaaattaccaaagcgatcaagcgggctcagatcatgggcttcatgcctgtcacttacaaggatcctgcctacctaaaagatccgaaggtctgcaacatcaggtaccgggaatag

SEQ ID NO: 124648 - DNA, 345 bp, synthetic construct
  misc_feature 1..345: note = Description of Artificial Sequence: Synthetic coding sequence
  source 1..345: mol_type = other DNA
atggccgctgtggtggcagtttgcgggggactgggtcgtaaaaagctgactcacttagtcactgcagctgtgagcctaacccatcctgggacacacacggtcctgtggcgtcgagggtgcagccaacaggtcagcagcaacgaagacctgctgctgtctcagttcgtgagtcccttcactgggtgcatctatgggcggcacatcaccgggttgtgcggcaaaaaacagaaggagattacaaaggctattaagagggcgcagattatgggcttcatgccggttacatacaaggaccccgcctacttaaaggatcctaaagtttgtaacatcaggtatagggagtag

SEQ ID NO: 124649 - DNA, 891 bp, synthetic construct
  misc_feature 1..891: note = Description of Artificial Sequence: Synthetic coding sequence
  source 1..891: mol_type = other DNA
atggcaacaagtagtgccgccttaccgagaatcttaggggctggagctagagctccatcccgctggctgggctttctagggaaggctacgccacgaccggcaaggccaagtagacgaactctgggctccgccaccgctctaatgatccgagaaagcgaagattctacggattttaatgacaagatcctcaatgaaccactaaaacacagcgatttttttaatgtgaaggagttgttctcagtgcgctcactgtttgacgcccgagttcacctggggcacaaagctgggtgtagacacaggttcatggagccatatattttcggtagtaggttggaccatgatatcatcgatctagagcagactgccacccacctgcagctagctctgaacttcaccgcccatatggcctacagaaagggcattattctgttcatctcccgcaaccggcagttctcctacctcatcgagaacatggcccgcgactgcggcgaatacgcacacacaagatactttagggggggcatgttaactaatgcccgcctgctatttggcccaaccgtgagactacctgatctgattatattccttcatacgttaaataatatcttcgagccccatgtggcagtaagggatgctgccaaaatgaacatccccacagtcgggattgtagacacaaactgtaatccttgcttaattacgtaccctgttccaggcaacgacgattcacccctcgccgtgcacctgtactgcagactctttcagaccgccatcacccgggcaaaggaaaagagacaacaggtggaagccctttataggctgcaaggtcaaaaagagcccggagaccaaggaccggcgcatccacccggcgccgatatgtcccactctctctag

SEQ ID NO: 124650 - DNA, 891 bp, synthetic construct
  misc_feature 1..891: note = Description of Artificial Sequence: Synthetic coding sequence
  source 1..891: mol_type = other DNA
atggccacctcgagcgcggcactgccacgtattctaggggccggcgccagagcacccagcagatggctgggcttcctcgggaaagccactcctcggccggccagaccaagcagacgcaccctggggtccgccactgccctaatgattcgggagtcagaggacagcactgactttaacgataaaattctaaacgaacccctgaagcacagcgacttctttaacgttaaagaactcttcagtgtacggtccctgtttgatgccagagtgcacctaggtcataaagccggttgtaggcaccggtttatggagccatatatatttggctcccggcttgaccacgacattatcgacctggaacagaccgcaacccacctacagctagccctgaattttactgcgcacatggcttaccggaagggcatcatactgttcatctcaaggaaccggcagttcagctacctgatcgaaaacatggctcgtgattgtggggaatacgcacatacaagatattttcgtggtggcatgctgaccaacgccaggctactctttggacccacagtgagactgcctgacctgattatattcctccatacccttaacaacatctttgaacctcatgttgccgttagggatgccgctaagatgaacattcccactgtcggaatagtggatactaactgcaacccttgcctcataacttaccccgtcccaggaaacgacgatagtcccctagctgttcatctttattgtcggcttttccagaccgcgatcactcgggccaaagagaaacgccagcaggtcgaggctctttatcggctgcaaggccagaaagaacctggcgatcaggggcctgcacacccacctggtgccgatatgtcccactccctttag

SEQ ID NO: 124651 - DNA, 813 bp, synthetic construct
  misc_feature 1..813: note = Description of Artificial Sequence: Synthetic coding sequence
  source 1..813: mol_type = other DNA
cgccggggtccgctcggcatgaggtggggtgccggagtagtacactccggactaggcgcacggacgtcaatatatttccccccaggcgcacgggccccttcacggtggcttggcttcctcggcaaggccacccctcgacccgccagaccatccagaagaacgttggggtcggcaacagccttaatgattcgtgaaagtgaggacagcacggatttcaacgataagattttaaatgaaccattgaagcattctgatttcttcaatgtgaaggagctgttcagcgtcagaagtctgttcgacgcacgcgttcatctcggtcacaaagcagggtgccgacaccggttcatggagccgtacatattcggcagcaggttagaccacgatataatcgatctggagcaaacggccacccacctgcagctcgccttgaacttcactgctcacatggcctacagaaaagggatcattctgtttatcagccgaaatagacaatttagttacctcatcgagaatatggctcgtgattgcggggaatacgctcatacacggtacttccgggggggaatgttgacgaacgcaagattactgttcggacctaccgtcaggctccctgatctcattatcttccttcatactctcaataatattttcgagccacacgtggcggttcgagacgctgcaaaaatgaatattcctacggtcgggattgttgacaccaattgcaacccatgtctgatcacttatccagtgccaggcaatgatgacagtccactcgcagtgcacttgtactgcaggctattccagaccgcctag

SEQ ID NO: 124652 - DNA, 264 bp, synthetic construct
  misc_feature 1..264: note = Description of Artificial Sequence: Synthetic coding sequence
  source 1..264: mol_type = other DNA
atggccaagcaccttaagtttatcgcgcggactgtgatggtgcaggagggcaacgttgagtccgcctatcggacacttaaccggattctgaccatggacggtctgatcgaggacatcaaacatcgacgctattacgagaaaccgtgtagacggagacagagagaatcctacgaacgctgtcgtcgtatctataatatggagatggcaaggaaaataaattttctgatgagaaagaatcgcgcagatccatggcagggctgctag

SEQ ID NO: 124653 - DNA, 264 bp, synthetic construct
  misc_feature 1..264: note = Description of Artificial Sequence: Synthetic coding sequence
  source 1..264: mol_type = other DNA
atggctaagcacttgaaattcatcgccagaacagtgatggttcaagaggggaatgtggaatcagcttatagaactctaaaccgcattttgacgatggacggactaattgaggacatcaaacatcggcgttattacgagaagccctgccgccgaaggcagcgggagtcatacgaacgttgcagacgtatctacaatatggagatggctcgcaagataaatttcttaatgcgaaaaaatcgcgctgacccatggcaggggtgttag

SEQ ID NO: 124654 - DNA, 1083 bp, synthetic construct
  misc_feature 1..1083: note = Description of Artificial Sequence: Synthetic coding sequence
  source 1..1083: mol_type = other DNA
atggccccgttaggcacaacagtcctgctgtggtctctgctgcgctcttcaccaggggtggaacgagtctgttttcgtgccaggattcagccatggcacggcggtctgctacagccccttccatgctcatttgaaatgggactacctagaaggcggtttagctccgaagctgccgaatcaggcagcccagaaacaaaaaagcctaccttcatggatgaggaggtgcaaagcatcctgacaaagatgacaggcctgaacctgcagaaaaccttcaagcctgctatccaggaactgaagccccccacctataaactgatgactcaggctcaactggaggaagccactcgtcaggctgtagaagctgctaaggtgcggctgaaaatgccccctgtgctcgaggagcgggtgcctattaacgacgtgttggcagaggataagatcctggaaggcacagaaactaccaagtatgtttttacagatatttcttactctatcccacatagggaaaggttcatcgttgtccgcgagccgtccggcacccttcggaaggcatcatgggaggaaagagaccgtatgattcaggtgtacttcccaaaggagggcagaaagatcctgaccccgatcattttcaaggaggagaatctaaggaccatgtactctcaggacaggcacgtggacgtgttgaatctgtgttttgcccagtttgagccggattctactgagtacatcaaagtgcaccacaagacttacgaggacattgataaaagggggaagtacgacttattaaggtcgacaaggtactttggaggaatggtgtggtattttgtgaataataagaaaattgacggcctgttaatagaccagatacaacgagatctgattgatgacgccacgaatctggtgcagctgtaccatgtcctccatcccgatggccagtcggcccaaggtgccaaggaccaggccgcggagggcatcaacttgatcaaagtgtttgcgaagaccgaggcccagaagggcgcatatatcgagctgaccttgcagacctatcaagaagctctgtctcggcactctgcagcctcctag

SEQ ID NO: 124655 - DNA, 1080 bp, synthetic construct
  misc_feature 1..1080: note = Description of Artificial Sequence: Synthetic coding sequence
  source 1..1080: mol_type = other DNA
atggcgcctttaggtaccactgtcctgttatggtccttgctgcggtcaagtccaggtgtggagcgggtatgttttcgggcaagaattcaaccctggcacggtggcctgctgcaacctcttccctgttctttcgaaatgggactccctcgccgtaggttctccagcgaagcagagtcagggagtccggagactaagaagcccacattcatggacgaagaggtgcagagtatcctgacgaaaatgactggcctgaacctgcaaaagacattcaagcccgccatccaggaacttaaaccccctacctataagctaatgacccaagcccagctagaagaagcgacgcgccaggccgtcgaagctgcaaaggtgaggcttaaaatgcccccagtactcgaggagagggtgccaattaatgatgtactggccgaggataagattttggaagggacagaaacgactaagtatgtctttacggatataagttatagcatcccgcacagggaacggtttattgttgttcgtgaacctagcgggactctcagaaaggcctcttgggaagagcgcgatagaatgatccaggtgtactttccaaaggaaggtagaaagattttaacacccataatctttaaggaagaaaatctccgtactatgtattctcaggatagacatgtagacgtgctgaacctctgcttcgcccagtttgagcccgacagcaccgaatatattaaagttcaccacaagacttatgaagacatcgacaaacgcggaaaatatgatcttctacggagtacccggtatttcggtggcatggtgtggtacttcgtcaacaacaaaaaaatcgacggacttctcatagaccaaatccaacgggacctgatcgacgacgctacaaatcttgtgcaactgtaccatgtgctgcaccctgacggacaaagcgcacagggagctaaagaccaagctgcggaggggatcaacctgattaaagtgttcgccaaaactgaagcccagaaaggcgcatacatagaactcactctgcagacataccaagaagccctgtcgagacactcggccgcctcatag

SEQ ID NO: 124656 - DNA, 960 bp, synthetic construct
  misc_feature 1..960: note = Description of Artificial Sequence: Synthetic coding sequence
  source 1..960: mol_type = other DNA
atgtccaggaacgaaaccgagcacagatatctcggcacccacttcggcgctgaaagcggtagccctgaaaccaagaagcctacctttatggatgaggaggtgcagtcaattttaaccaagatgacaggtcttaacctgcagaaaaccttcaaaccagctatacaagagctcaagcctccgacctacaagctgatgactcaggcgcagctcgaggaggctacccgtcaagctgtggaggcagcaaaggtgcgcctgaaaatgcctccagtgctggaggagcgcgtacccataaacgatgtcttggcagaagacaagattctagaaggcacagagactacaaagtacgtatttacggacatctcgtattccataccccaccgtgagaggtttatcgttgtacgcgagccgtccggaactctccgcaaagcctcctgggaggaacgggatcggatgatccaggtatactttcctaaggaaggcagaaagattctcactccaatcatattcaaggaggagaacctccgtacaatgtactcccaggatagacatgtagatgttctcaatctttgcttcgcccagttcgagccagactctaccgaatacatcaaagttcatcataaaacctatgaggacatcgacaagagaggcaagtatgatctcctgcgatcaactagatattttgggggcatggtgtggtactttgtaaataacaaaaagatagacggactcctaatcgatcagatccaaagggaccttatcgacgacgccaccaacctggtgcagttgtaccatgtcctgcatcccgacggacagagcgcccagggtgcaaaagaccaggcagctgaggggattaaccttatcaaagttttcgccaaaacggaagctcagaagggcgcgtatatcgagttaaccctccagacctatcaggaggcgttaagccgccattccgcagcatcctag

SEQ ID NO: 124657 - DNA, 1083 bp, synthetic construct
  misc_feature 1..1083: note = Description of Artificial Sequence: Synthetic coding sequence
  source 1..1083: mol_type = other DNA
atggctccgctcggtactacagtcctcttatggagcctgctacggagtagccctggcgttgaaagggtgtgctttagggcaagaatacagccttggcatggtggactgctccaaccactcccttgctcctttgagatggggttaccacgtcggagattctcctccgaggcagccgagagtgggtctcccgagaccaagaaacctacgttcatggatgaagaagtacaatccatcctgaccaaaatgaccggacttaatttgcaaaagactttcaagcctgcaatccaggaattgaaacccccaacttacaagttgatgacacaggcacagctagaagaagctacacggcaggcagttgaggccgccaaagtgaggcttaaaatgccccccgtcctagaggagcgagtacctatcaacgacgtgctggcagaagataaaatcctcgagggcaccgagacaacgaagtacgtttttacggatatctcttactcaattcctcatcgcgaacgattcatcgtagtgagagagccgtctgggactctgcggaaagcgtcttgggaggagcgagacagaatgatccaggtctactttcccaaggaaggacggaagattctaacaccaatcatcttcaaggaagagaacctacgaaccatgtactcccaggacagacacgttgatgtgcttaatttgtgctttgcccagtttgagcctgattcaactgagtacatcaaggtgcaccacaaaacctatgaagacatcgataaacggggcaagtatgatttgctgcggtcaactcggtatttcggtggaatggtgtggtatttcgtgaacaataagaagatcgacggcttgctgatcgaccaaatccagagagatcttatcgatgacgcgactaacctcgtgcagttgtaccacgtgctccatcccgacgggcagagcgctcagggcgccaaagaccaagccgccgagggcataaacctgatcaaagtcttcgctaagacagaagcccagaaaggggcctacattgaactaactctgcaaacttaccaggaggctttgtcaagacactcagcagcgagctag

SEQ ID NO: 124658 - DNA, 507 bp, synthetic construct
  misc_feature 1..507: note = Description of Artificial Sequence: Synthetic coding sequence
  source 1..507: mol_type = other DNA
atggctcccttgggtaccaccgtgctattgtggagtctccttcgcagttccccaggcgttgagcgggtgtgttttcgcgcccgcattcaaccttggcatggaggactgctgcagcccctaccctgctcatttgagatgggcttgccaaggcgaaggttctctagcgaggctgagtctggtagtccggagacaaaaaagcccacattcatggacgaagaggtgcagtcgatcttgacgaagatgactggactgaacctgcagaagacatttaagcctgctattcaagaattgaaacccccaacctataaactcatgacgcaggcacagctcgaagaggctactcggcaggctgttgaggcggctaaggtcagattgaaaatgccacccgtgctagaagaacgtgtgcctattaatgacgtgctggctgaggataagatccttgaagggaccgagaccaccaaatacgtgtttaccgatataagctactcgattccccaccgctgctag

SEQ ID NO: 124659 - DNA, 573 bp, synthetic construct
  misc_feature 1..573: note = Description of Artificial Sequence: Synthetic coding sequence
  source 1..573: mol_type = other DNA
atggccggctccagattggagacagtcggcagtatattctcacgcacaagggacctggttcgcgctggtgtgcttaaggaaaaacccctgtggtttgacgtctacgacgcctttcccccactgagggagcctgtcttccagcgcccccgggttaggtacggcaaagccaaagctccaatccaggatatctggtatcacgaggatcgcatccgggctaagttttattcagtgtacggttccgggcaacgggcgtttgacctctttaatccaaattttaagtccacttgccagaggttcgtggagaaatacactgaattacagaagctcggagaaaccgacgaggaaaagctgttcgtggaaaccggaaaggcactgctagccgagggcgtgatcctccggcgggtgggtgaggctcggacccagcacggcgggtcccatgttagtcgaaagtccgaacacctgagcgttcgcccccagacagccctcgaagagaacgaaactcaaaaggaagtgccccaggatcaacacctggaggctccggccgaccagtccaaaggactcttacccccttag

SEQ ID NO: 124660 - DNA, 504 bp, synthetic construct
  misc_feature 1..504: note = Description of Artificial Sequence: Synthetic coding sequence
  source 1..504: mol_type = other DNA
atggccgcttctgtgtgctccggtctactgggaccccgcgtgctaagttggtctcgagagcttccgtgcgcctggcgcgccctgcatacatcaccagtttgtgctaagaatagggctgcgcgcgtccgggtgtcgaagggggacaagcccgtgacttacgaagaagctcatgccccccactacatcgcgcatcggaaagggtggttgagtctgcatactgggaacttggacggagaagaccatgctgctgagagaacagtggaggacgtttttctacgtaaattcatgtggggtaccttcccagggtgcctcgccgaccagttagtgctgaagcggcggggtaatcagctggagatatgtgccgtcgtactgaggcagctttcgccccataaatattatttcctcgttggatattcggagacgctcttgtcatatttttacaaatgccccgtccgcctgcatctgcagacggttccatccaaggttgtgtataagtatctgtag

SEQ ID NO: 124661 - DNA, 522 bp, synthetic construct
  misc_feature 1..522: note = Description of Artificial Sequence: Synthetic coding sequence
  source 1..522: mol_type = other DNA
atgccaatgaaggggcggttccccattaggcgtaccctacagtacttgtcccaaggtaatgtggtattcaaggatagtgtcaaagtgatgaccgtgaactacaacactcatggggaactgggcgaaggggccagaaaattcgtgtttttcaacattcctcagattcagtataagaacccatgggtccaaattatgatgtttaagaacatgaccccctcacctttccttcgattttaccttgatagcggcgagcaggttctggtagacgtagagacaaaaagcaacaaggagattatggaacacattaggaagattctcggcaagaacgaggaaacactcagagaggaggaggaagagaagaaacagcttagccatcccgcaaacttcgggccacgaaagtattgtctgcgcgagtgcatatgcgaggtcgaggggcaggttccatgcccctcactggtgcccctgcctaaagagatgcgtggcaagtacaaagccgcccttaaggccgacgctcaggattag

SEQ ID NO: 124662 - DNA, 333 bp, synthetic construct
  misc_feature 1..333: note = Description of Artificial Sequence: Synthetic coding sequence
  source 1..333: mol_type = other DNA
atgcctatgaaaggcagatttcctattcgtcgtaccttgcaatacctctcccaaggcaacgttgttttcaaggatagcgtcaaggttatgacggttaactacaacacacatggcgagctgggcgagggagcacgaaagttcgtcttctttaacatcccacagattcagtacaaaaacccttgggtgcagatcatgatgtttaagaatatgacaccctccccattcttgaggttctatctggacagcggagagcaggtgctcgtcgacgtcgagaccaagtcaaacaaagaaatcatggagcacatccggaagatattgggaaagaacgagtag

SEQ ID NO: 124663 - DNA, 390 bp, synthetic construct
  misc_feature 1..390: note = Description of Artificial Sequence: Synthetic coding sequence
  source 1..390: mol_type = other DNA
atgcctatgaaaggccgctttcccataagacgcaccctgcagtatctgtcacagggtaatgtggtattcaaggactcggtgaaggttatgactgtcaactacaatactcacggagagctcggagagggtgcgcggaagttcgtgtttttcaatatccctcagattcaatacaagaacccctgggtgcagattatgatgttcaagaacatgacaccatctccttttctgcgattttaccttggtaaacccagtgggaagcggaggcgcagaaaatcttcattcctgacccagccaacctccgcactggagagcacggcctgcggaagtgcaagcgtgaagtggaaggggcgctgccctgcacccgcctggtgtcactaccctaggaggtag

SEQ ID NO: 124664 - DNA, 333 bp, synthetic construct
  misc_feature 1..333: note = Description of Artificial Sequence: Synthetic coding sequence
  source 1..333: mol_type = other DNA
atgccaatgaagggcagattcccgattaggcggacactccagtatctttcacaggggaacgtggtgtttaaggactctgtgaaagttatgaccgtgaattataacactcatggagaactgggcgagggtgcccggaagttcgtatttttcaacattccccaaattcaatacaagaatccctgggtccaaatcatgatgtttaaaaacatgactcctagccctttcctgcggttctacctcgattctggtgagcaagtgctggtagacgtggagaccaagagcaacaaggaaataatggagcacattcggaagatcttgggcaagaatgagtag

SEQ ID NO: 124665 - DNA, 438 bp, synthetic construct
  misc_feature 1..438: note = Description of Artificial Sequence: Synthetic coding sequence
  source 1..438: mol_type = other DNA
atgccaatgaaagggaggttccccattagaaggaccctccagtacttgtcccagggaaacgttgtgtttaaggactccgtaaaagtgatgacggtcaactataatactcacggtgagctaggagagggcgcacggaagttcgtgttttttaatatccctcaaattcaatataagaatccttgggtgcaaatcatgatgtttaaaaatatgaccccctcacccttcctacgtttctacttggactcaggcgaacaggtcctcgtagacgtcgaaaccaaaagcaacaaggaaatcatggagcacatacgcaagatcctgggtaagaacgaacactatctcgctgcacccagcaaacctgtgagtagtgccgtcgttcctgttacacaggaggccgaagccggagggtcactcgagccgaggcggctgagactcgagtag

SEQ ID NO: 124666 - DNA, 618 bp, synthetic construct
  misc_feature 1..618: note = Description of Artificial Sequence: Synthetic coding sequence
  source 1..618: mol_type = other DNA
atgttgagagcgcttagcagattaggcgccggcaccccctgtaggccacgtgccccactggtgcttccagcgcgcgggagaaagaccagacacgatcccctggctaaaagtaaaattgaaagggtgaatatgccgcctgctgttgaccccgctgaatttttcgtcctgatggaacggtaccagcattataggcagactgtccgagctctacgtatggaattcgtgagcgaggtgcagcggaaagtgcatgaggcacgcgcaggggtcctggctgagcgcaaggctttgaaggacgccgctgaacaccgtgaactgatggcttggaaccaggcagagaatcgacggctccacgaactgagaatcgctcgcctgcggcaggaagaacgggagcaagagcagaggcaggctttagagcaggctagaaaggctgaggaagtacaggcttgggcccaacggaaggaaagagaagtgctccagctgcaagaggaagtgaaaaactttatcacacgggaaaatcttgaggctcgcgtggaggctgcgctggatagccgcaaaaattataactgggcaatcactagagaaggcctggtcgtccggccccagcggcgggacagctag

SEQ ID NO: 124667 - DNA, 1245 bp, synthetic construct
  misc_feature 1..1245: note = Description of Artificial Sequence: Synthetic coding sequence
  source 1..1245: mol_type = other DNA
atggcggcaagtattgtcagaagggggatgcttctcgcccgacaagtagtattacctcagctcagtcctgctggcaaacgatatctcctgtctagcgcctacgtagattcccacaaatgggaggcccgggagaaagagcattactgtctggcagatctggcctctttgatggacaaaactttcgagcgaaaactcccggtctctagtttgacaattagccgtctaatcgataatatctctagtagagaagaaatcgatcacgccgaatattacctttacaaattccgtcactcaccaaattgctggtaccttcggaactggaccatccacacatggatccgccaatgcttaaagtacgatgcccaggataaggctctctacactctggttaacaaggtccagtatgggatcttcccagacaactttaccttcaacttgctcatggactcatttataaagaaagagaactacaaagatgcactgtcagtcgtctttgaggtgatgatgcaagaggctttcgaagttccgtctacacagcttttatcactgtatgtcctatttcattgtctagcaaagaagaccgatttctcctgggaagaggagagaaacttcggagcctccctcctcctgcccgggcttaagcagaagaacagcgtcggtttcagctcccagctgtacggttacgcgcttttggggaaagtagagctgcagcaaggattgagagccgtgtaccacaatatgcccttgatttggaagcccgggtacctagacagagctctgcaggtcatggaaaaagtggccgcttcccctgaagatataaagctatgtcgtgaagctttggacgtgctgggagctgtgttaaaggctctgacttcagcagacggagcctccgaggagcagtcgcagaatgacgaagacaaccaggggtccgagaagcttgtcgagcagctcgacatcgaagaaactgaacagagtaaactgccccagtacctggagaggtttaaggcccttcattctaagctccaggcgctggggaaaatcgaatctgagggtttgttaagtctgaccactcagctggttaaggagaaattgtccacttgcgaggcggaggacattgctacatacgagcaaaacttacagcaatggcatctagatctggttcagttgatccagagagagcaacagcagcgcgagcaggcaaagcaggaataccaggctcagaaggcggcgaaggcctctgcttag

SEQ ID NO: 124668 - DNA, 1077 bp, synthetic construct
  misc_feature 1..1077: note = Description of Artificial Sequence: Synthetic coding sequence
  source 1..1077: mol_type = other DNA
atggataaaaccttcgaacgcaagttgccggtgagttctcttaccatatcaagacttatcgataatattagtagcagggaggagatcgaccatgccgaatactacctgtacaaatttcggcattctcccaattgctggtaccttaggaactggactatccatacttggatcaggcagtgccttaaatacgacgctcaggacaaggccctctacacactggtcaacaaggtccagtatgggatctttccagataattttactttcaaccttctaatggattcttttattaagaaggagaattacaaggacgcactgtctgtcgtatttgaggtgatgatgcaagaggcctttgaggtgcctagcactcagttgctgtccttgtatgtactcttccactgcctggccaaaaaaaccgacttttcatgggaggaagaaaggaactttggagccagcctcctcctccccggcctaaagcagaagaactccgtaggcttttcctcacaactgtatggttacgcactgctaggtaaagtcgaacttcaacagggattgcgggctgtctaccacaatatgcccctgatctggaaacccggctatcttgaccgagctctgcaggtgatggaaaaggtggccgcttcaccggaggatatcaaactctgcagagaggccctcgatgtgcttggcgcagtgctgaaagctttgacctccgctgatggagcctccgaggagcaaagccaaaacgatgaagataaccagggatcagagaaactggtggagcagcttgatattgaggaaacagagcagagcaaactgccccaatatttggagaggttcaaagccttacattccaaactgcaggccctgggcaaaattgagtccgagggcctcctttccttgactacacagctagtgaaggaaaagctgtctacttgcgaggcggaggacatcgcaacttatgaacagaacctgcagcagtggcacctggatctggtgcaacttatacaacgggaacagcagcagcgggaacaggcgaaacaagaatatcaggcccagaaggcggccaaagcgtctgcatag

SEQ ID NO: 124669 - DNA, 1287 bp, synthetic construct
  misc_feature 1..1287: note = Description of Artificial Sequence: Synthetic coding sequence
  source 1..1287: mol_type = other DNA
atggcggcatctattgtgcggaggggcatgctgcttgcccggcaagtggtactgccccagctgtcccccgccggaaaaaggtacttgctcagttctgcttacgttgattcacataagtgggaagcccgggaaaaagaacattattgtttagcagacctggcctcattgatggataaaaccttcgagagaaaattacctgtcagcagcctcactatttccagactgatagataatatttcttcgagagaagagatagatcatgcagagtattatctgtacaaaaaaggcgaatgttcttcctctaacccacagaactactctcggttccgtcatagccctaactgttggtacctgcggaattggactatccacacctggataaggcagtgcttgaagtacgacgcgcaggacaaggccctgtacactctagtaaataaggtgcagtatggtatttttccagataactttacgtttaaccttctcatggactctttcatcaaaaaggaaaattacaaggacgcactgagcgtggtgtttgaagtgatgatgcaggaggcgttcgaggtgccttccactcagctactctcactgtatgtcctgttccattgtcttgccaaaaaaacagacttcagctgggaggaggagcgcaattttggagcctccttgttactccctggtctcaaacagaagaatagcgttggcttcagtagccagctctacggctacgcgctgctcggtaaagtggaattgcagcagggcctgcgcgcagtgtatcataatatgcctctgatctggaaacctggctatctagacagagccctgcaggtgatggaaaaggtggcagcaagcccggaggatattaagctgtgccgagaagccttggatgtgctgggtgcagttctaaaagcactcaccagtgctgacggggcctccgaagaacagagtcagaacgacgaggataatcaaggatccgaaaagctcgtcgaacagctcgatatcgaagaaacagaacagtccaagctgcctcagtacctcgaaagattcaaagccctgcatagcaaactccaagcacttgggaagatcgagtcagagggcctcttgtcgctgaccacccaactagtcaaggagaagttgagcacctgtgaggctgaggacatcgcgacctatgagcagaacttacagcagtggcacctggacctggttcagttaatccagagagaacagcagcagagagaacaggctaagcaggaatatcaagctcaaaaggccgctaaagcttccgcttag

SEQ ID NO: 124670 - DNA, 564 bp, synthetic construct
  misc_feature 1..564: note = Description of Artificial Sequence: Synthetic coding sequence
  source 1..564: mol_type = other DNA
atggccgccctctgccgtactagggccgtcgctgctgaatcacactttctgagagtgtttctgtttttcaggccttttaggggggtgggcacggagtccggatccgaaagtggctcttcaaatgcgaaggagcccaagacccgcgcaggcggattcgcatcagccctggaaaggcacagtgagctgctgcagaaggtcgagccactccaaaaggggtccccaaaaaacgtcgagtcttttgcctccatgctgcggcattcccctttgactcagatgggccctgcaaaagataaactagtcattggaagaatcttccatatcgtggagaacgatttgtacattgatttcggcggcaaattccactgcgtctgtcgccggcccgaagtggacggtgagaagtaccagaaagggaccagggtaaggctgcgcctgttagatttagagctgacgtcccgcttcctgggagcaaccacagataccacagttctagaggccaatgctgttctgctgggcatccaggagagcaaggatagtcggagcaaagaggagcaccacgagaaatag

SEQ ID NO: 124671 - DNA, 1320 bp, synthetic construct
  misc_feature 1..1320: note = Description of Artificial Sequence: Synthetic coding sequence
  source 1..1320: mol_type = other DNA
atggccgccgcaagatgctggaggccgctcttgagaggaccccgactcagtctccacacggcagccaatgcggctgcaaccgctacagagaccacatgtcaggacgtcgctgcgacccccgttgcacgatacccccccatcgttgctagcatgacggccgacagtaaagcagcccgactgaggcgaattgagagatggcaagccacagtgcacgccgcggagtctgtggacgagaaattgcggattttaactaagatgcaattcatgaagtacatggtctatcctcaaactttcgctctcaacgccgacagatggtatcaatacttcaccaagacagttttcctatctggcctccccccgcctccagctgaacctgagcctgagccagagcctgaacctgagcctgcacttgacctggccgcccttagggcagtggcgtgcgactgcttgctccaggagcatttttaccttcgaaggaggcggcgcgtccacaggtacgaggaatcggaggtgatcagcctgccctttctggatcagctggtttcaaccctggtgggcctgttgtctcctcacaaccctgccttggcagcagccgccttagactaccgatgcccggttcacttctactgggtgcggggggaggagatcattccacgcggccatcgccggggacgaattgacgacctccggtatcagattgatgacaaacctaacaatcagatccggatctcgaagcagctggcagagttcgtgccactcgactactctgtgccaatcgagattccaaccattaaatgtaagcctgacaaactgcccctcttcaaaaggcagtacgagaaccatatcttcgtcggaagcaagacggcagatccatgttgctacggacatacccagtttcacctcttgcctgacaagctccggagggagcgtttgctacggcaaaactgtgctgaccagattgaagtggtttttagggccaatgccattgcgtcactttttgcttggactggcgcccaggccatgtatcagggtttctggtccgaggccgacgtaacccgtccattcgttagtcaagccgttattactgacggaaagtacttcagttttttctgctatcagctgaatacgctagcccttacgacacaagccgatcagaacaatccgcgcaagaatatctgctggggtacacagtccaaacccctgtacgagacaatcgaggataacgatgtgaaggggtttaatgatgacgtgctgctgcaaatagtgcactttctgcttaataggcccaaagaagaaaagagccagctgctggagaattag

SEQ ID NO: 124672 - DNA, 1188 bp, synthetic construct
  misc_feature 1..1188: note = Description of Artificial Sequence: Synthetic coding sequence
  source 1..1188: mol_type = other DNA
atgtttcctcgcgttagcacgttcctcccactgcgtcccctgagtcgccaccctctgagctcaggatcccccgagacctctgccgcggccatcatgctcctcacggtgcggcacggcactgtgcggtacagatccagcgcactgctcgccagaacaaagaataatatacagagatacttcggaacaaatagtgtgatatgcagtaagaaggataagcagtctgtacgcacagaggaaacaagcaaagagacaagtgaaagccaagattccgaaaaagagaatacgaagaaagacctgctcgggattatcaaggggatgaaggtggagctgtcaacggttaacgtgcgcacgactaagcctcccaagcgacgtcctttaaaatcactagaggctaccctggggcgattgcggcgggccaccgagtacgcacctaaaaaaaggatcgagccattgagtccggagctagtcgccgctgctagcgctgttgcagactccttaccttttgataagcaaacaactaagagtgagctgctgtcgcagttacagcagcacgaggaagagagcagagcccagcgggatgccaaacggcctaaaatcagtttttcgaacatcatcagcgacatgaaggtcgccaggtcggccacagctagagtgcgatctagacctgagcttaggattcagttcgacgaagggtacgataattatccaggccaagaaaaaaccgatgatctgaaaaagcggaagaacatctttacaggtaagagactcaacatctttgatatgatggcagtcacgaaggaggcccccgaaactgacacgtccccttctctttgggatgtagagtttgcgaagcagttggcaaccgtaaatgaacaaccccttcagaatgggtttgaggagctgatccaatggacgaaggagggaaagttatgggagtttccaattaataacgaagccggattcgatgacgacgggagcgaatttcacgaacacatcttcctggagaaacacctggaaagcttccccaagcagggtcctatcaggcactttatggaactagtgacttgcggcttgtccaaaaacccatacctgtctgtcaaacaaaaggttgaacacattgaatggttccgaaactactttaatgagaaaaaagacatcctgaaggaatccaatattcagtttaattag

SEQ ID NO: 124673 - DNA, 321 bp, synthetic construct
  misc_feature 1..321: note = Description of Artificial Sequence: Synthetic coding sequence
  source 1..321: mol_type = other DNA
atgagtagtctctcagaatacgcgtttcgcatgtcccgcctcagcgcgaggctgttcggggaagttacacgcccaaccaattcaaagtcaatgaaagtggtcaagctgttctccgaactcccattagctaagaagaaggaaacctacgactggtacccaaatcaccatacctacgccgagctgatgcagaccttacgattcctgggcctgtacagagacgaacatcaagattttatggacgaacagaaaagacttaaaaagttgcgaggaaaagaaaaaccaaaaaagggcgaaggtaagcgggccgctaagagaaaatag

SEQ ID NO: 124674 - DNA, 321 bp, synthetic construct
  misc_feature 1..321: note = Description of Artificial Sequence: Synthetic coding sequence
  source 1..321: mol_type = other DNA
atgtcgtccttaagtgagtatgcgttccgtatgtctaggctgagtgccagactgtttggggaggttactcggccgacaaatagtaaaagcatgaaggttgtcaagttattttctgagcttccactggccaaaaagaaagaaacatatgactggtatcctaatcaccatacatacgccgaactgatgcagaccttaagattcctcggcctttatagagatgaacaccaggacttcatggacgagcagaagagactgaagaaacttcggggaaaggagaaacccaagaaaggggagggtaaacgagccgcaaagcgaaagtag

SEQ ID NO: 124675 - DNA, 321 bp, synthetic construct
  misc_feature 1..321: note = Description of Artificial Sequence: Synthetic coding sequence
  source 1..321: mol_type = other DNA
atgagcagcctatcagagtacgcctttagaatgagcagattgtcagctcggctgttcggcgaggttacccgccccaccaatagcaagtcaatgaaggtagtgaaactctttagcgagttacccctcgcaaaaaagaaagagacttacgattggtaccctaatcaccacacatatgccgagctgatgcagacactcagatttcttggcctgtatcgggacgagcaccaggacttcatggatgaacaaaaacgcctcaagaagctgagggggaaagaaaagccgaagaaaggcgaaggaaaaagagcagctaagcgcaagtag

SEQ ID NO: 124676 - DNA, 321 bp, synthetic construct
  misc_feature 1..321: note = Description of Artificial Sequence: Synthetic coding sequence
  source 1..321: mol_type = other DNA
atgtccagccttagtgaatacgcgtttcgaatgtcccggctttctgcccggctgttcggggaggtcactcggccgactaacagcaagagcatgaaagtggtgaaactttttagtgagttgccactggctaaaaagaaagaaacttatgattggtacccaaaccatcacacttatgccgagctcatgcagacattacgatttttggggttataccgcgatgagcatcaggacttcatggatgagcagaaaaggctgaagaaattgaggggaaaggagaagcctaagaagggcgaaggcaagagagccgcaaagcgcaagtag

SEQ ID NO: 124677 - DNA, 339 bp, synthetic construct
  misc_feature 1..339: note = Description of Artificial Sequence: Synthetic coding sequence
  source 1..339: mol_type = other DNA
atgtcttctctgagcgaatacgccttccgcatgagtaggttgtctgctcgactctttggcgaggtcacccggccaactaatagtaaatctatgaaagtggttaagctcttctccgagctgccactcgctaagaaaaaagagacttatgattggtatcctaaccaccacacgtatgcggagttaatgcagacccttcgtttcctcgggctgtatcgcgacgagcatcaggattttatggacgagcagaagagactcaagaaactgcggggtaaagaaaagcccaaaaaaggcgaaggcaagagagccgctaagagaaaaaaaaagaagaaaaagaggtag

SEQ ID NO: 124678 - DNA, 678 bp, synthetic construct
  misc_feature 1..678: note = Description of Artificial Sequence: Synthetic coding sequence
  source 1..678: mol_type = other DNA
atggcccggaagaaagtccggccccgcctgatcgcagaactcgcccgccgggttagggcgctacgcgaacagctaaatagaccaagggattcccagctgtacgccgtggactatgaaacactaacaaggcctttcagtggccgccggttgccggtgcgagcctgggccgatgtgcggcgggagtctaggcttcttcagctgctcggcagattgccattgtttggactgggcagactggtgacccgcaaaagctggctctggcagcacgacgagccatgctactggcggctcacgcgggtccgccccgactacactgcccagaatttggatcacggtaaagcttggggcatattgaccttcaaggatgcctctttctctagcagtggcaagacagagtcggaggcgagagaaattgagcacgtgatgtatcacgattggaggcttgttccaaaacacgaggaggaagccttcacggcctttactccggccccagaggactctctggcctctgtcccgtatccgccccttttaagggccatgatcatagccgaacggcagaagaacggggacacgtctacagaagaacctatgctaaacgtccagaggatccgcatggaaccctgggattacccagcgaagcaggaagacaaaggacgtgccaaaggcacaccagtgtag

SEQ ID NO: 124679 - DNA, 657 bp, synthetic construct
  misc_feature 1..657: note = Description of Artificial Sequence: Synthetic coding sequence
  source 1..657: mol_type = other DNA
atggctagaaagaaggtacgcccacggctgattgctgaactcgctaggcgtgtgcgcgccctaagggaacagctgaaccgacctcgtgacagccagctctacgctgtcgattacgaaaccctcacgcgacctttttctgggagaagactgcctgtccgcgcctgggccgatgtacgccgggaatcccgcctgctccagctgctggggaggctgccactgtttgggctggggcgacttgtcacacggaagagttggttatggcagcatgacgagccctgctattggcggcttacccgggttcgcccagattacacagcccagaaccttgaccacggcaaagcctggggcattctgacattcaaggggaaaaccgagtctgaggcccgcgagatagaacatgtgatgtaccacgattggcgcctggtgcctaagcacgaagaagaagcttttactgccttcacaccagctcccgaggatagtctcgcctccgtgccctatcccccccttcttagagcaatgataattgccgaacgccagaaaaacggcgacaccagcactgaagagccgatgctgaatgtgcagcgcattcgtatggagccctgggattatccagctaagcaggaggataagggccgggcaaagggaaccccagtgtag

SEQ ID NO: 124680 - DNA, 972 bp, synthetic construct
  misc_feature 1..972: note = Description of Artificial Sequence: Synthetic coding sequence
  source 1..972: mol_type = other DNA
atggccgctgcggcacttccagcttggctctcactgcagtcccgggctagaacactgagagcgttttccaccgccgtgtatagcgccacccccgtccccacaccctccctgcccgaaagaacccccggaaatgagaggcctcccagacggaaggccctccccccgaggaccgagaaaatggccgttgatcaggactggcccagtgtgtatcctgtggctgctccgtttaagccctccgccgtcccacttcccgtccggatggggtaccccgtgaagaaaggcgtgccgatggccaaggagggcaacctggagctcctgaagatccccaactttctgcatctgacccctgttgcgataaaaaaacactgcgaagcactaaaggacttctgtaccgagtggccagcggccctggactcagatgaaaagtgcgaaaagcactttcctattgaaatagatagtaccgactatgtgagcagtggacccagcgtaaggaaccctcgggcccgagtcgtcgtgcttagagttaaattaagctctctgaacctcgacgaccatgccaagaaaaaactgatcaagttagtcggcgaacgatattgcaagaccacggatgtattgaccatcaagacagatcgttgtcccctgcgccggcagaactatgattacgccgtttacctgttgactgtgctctaccacgagtcatggaacactgaagagtgggaaaagagtaagaccgaagccgatatggaggagtatatctgggaaaattcctcctcagaaagaaatatcctggagacactgcttcagatgaaagccgccgaaaagaatatggaaatcaacaaagaggaattactgggcaccaaagaaatcgaagaatacaaaaagagtgtggtcagtctgaaaaacgaagaggaaaacgaaaactctatctcccagtacaaggagagcgtgaagcgtctgttaaacgtaacatag

SEQ ID NO: 124681 - DNA, 864 bp, synthetic construct
  misc_feature 1..864: note = Description of Artificial Sequence: Synthetic coding sequence
  source 1..864: mol_type = other DNA
atggccgccgcagctttgcccgcatggctctccctccagagcagggctcggacactacgagctttctccacggctgtatattcagccactccagtgcccacaccatctctgccagagaggaccccggggaacgagagaccacctcgcagaaaggcgctgcccccgcggacagagaaaatggccgtagaccaggactggcctagcgtatatcccgtggccgcccccttcaaaccttctgctgtccccctgcctgttcgaatgggttatcctgtcaagaagggcgtgcctatggccaaggaagggaatctcgagttgctcaagattcccaatttcctgcatctaacacctgttgcaatcaagaagcactgcgaggctctcaaagatttctgtactgagtggcctgctgcattagactctgacgagaaatgtgagaaacacttcccaattgagatcgattctacagattatgtctccagcggcccttcagtgcgtaacccgagggcccgggttgttgtgttgagaagatgtcccctgcggcggcagaactacgactacgctgtttaccttctgaccgtgctgtaccatgagagctggaatacggaggagtgggagaaatccaagaccgaagccgacatggaggagtatatttgggagaactcatcctcagaacgcaatattctcgagacactcttacagatgaaagccgctgaaaagaacatggagattaacaaggaggaactgctgggcaccaaagagatcgaggaatataagaaatctgttgtgtcgttaaaaaacgaggaagaaaacgaaaactctatcagtcagtacaaggaaagcgtgaaaaggctgctcaacgtaacctag

SEQ ID NO: 124682 - DNA, 585 bp, synthetic construct
  misc_feature 1..585: note = Description of Artificial Sequence: Synthetic coding sequence
  source 1..585: mol_type = other DNA
atggccgctgctgcactgcctgcgtggctgagtctgcagtcccgtgcccggactctgcgagctttttctacagccgtttattctgcaacacccgtccctactccctcactgccagagaggactccaggcaatgaaaggccacctcgcagaaaagctttaccccctcgtacagagaaaatggcggtcgatcaggactggccctcggtgtaccctgtggcggccccattcaagccatcagccgtccccctgccagtgcgaatgggctatccagtgaagaagggggtgcccatggctaaggaggggaatctcgaactcctgaagattcccaactttctccacttgactcccgtcgctattaaaaagcattgcgaggccctgaaggacttctgtactgagtggccggcagctctggattctgatgagaagtgtgagaaacacttcccgatcgaaatcgactcgacagactacgtatcctccggaccttctgtgaggaaccctagagcacgggtcgtggtgttgagagtgcccttcaaagaggccgaactccgtctgtgtagtgtgagcacaaacagcgttattccttag

SEQ ID NO: 124683 - DNA, 312 bp, synthetic construct
  misc_feature 1..312: note = Description of Artificial Sequence: Synthetic coding sequence
  source 1..312: mol_type = other DNA
atgatgggctctaagatggcgagtgctagccgtgtggtacaggtagtaaaaccccatactcccctgattagatttccggataggagagataatcctaagcctaacgttagtgaggcactgcggtccgccggcctgcctagccattcaagcgtcatttctcagcactctaagggaagtaaaagtccagacctgcttatgtaccagggaccacccgatacagcagagatcatcaagacccttcctcagaaataccggcgaaaactcgtgtctcaggaagaaatggagttcatacagagaggtgggcctgagtag

SEQ ID NO: 124684 - DNA, 1293 bp, synthetic construct
  misc_feature 1..1293: note = Description of Artificial Sequence: Synthetic coding sequence
  source 1..1293: mol_type = other DNA
atggccactgcggtcagagccgtgggttgcttacccgtactgtgtagtgggaccgcaggccaccttttggggcgacagtgtagtctgaacacgcttccggctgcctctatcctcgcttggaagagcgtgctgggaaatggccacttgtccagcctggggactcgggacacccacccttacgcatccctgtctagggcactacagacccagtgctgcatctcctctcctagccacctgatgtctcagcagtacaggccctactccttctttactaaactgacagccgatgaactttggaaaggagcactagctgagactggggccggagcaaaaaagggccggggaaaacgcaccaaaaaaaaaaagcggaaagatctaaataggggccagattatcggcgaaggtaggtatggctttttgtggcctggtctgaacgtccctcttatgaaaaatggcgctgtccaaactatcgctcagcgctctaaggaagagcaggaaaaggtggaggctgatatgattcagcaaagagaggagtgggacaggaaaaaaaagatgaaagttaagcgcgaaaggggatggtccggaaacagctggggtggaatctccctggggcctcctgaccctggtccttgcggagagacttacgaggattttgacacgcgaattctggaagtacgaaacgtgttcactatgacggctaaggaaggcagaaaaaagagcatccgagttcttgtggcggtgggaaacggcaagggagcggcggggttttcgatcggtaaggctactgataggatggacgcttttcggaaggcgaaaaatcgggcagtgcaccatttgcactacatcgagaggtatgaagatcacactatatttcatgacattagcctgagattcaagcggacccacatcaaaatgaagaaacagcctaaaggatacgggcttcgttgtcatcgtgccattattacaatttgcagacttatcggaatcaaggatatgtatgccaaagtctccggtagtataaacatgctgagccttacccagggcctgtttagaggcctctcccgccaggagacgcatcaacaactggccgacaagaaaggactgcacgtcgtggaaattagagaagagtgcggccccctaccaatagtggtggcctcccctaggggtcctctgaggaaagacccggagcctgaggacgaggtgcccgatgtgaagctagactgggaggatgtgaagactgcccaggggatgaaaagaagcgtgtggtccaacctcaagcgcgccgccacatag

SEQ ID NO: 124685 - DNA, 378 bp, synthetic construct
  misc_feature 1..378: note = Description of Artificial Sequence: Synthetic coding sequence
  source 1..378: mol_type = other DNA
atgcctaggtacgaattggctcttatccttaaggcaatgcagcgacctgagactgcggctaccctcaagcgaactatcgaggcattaatggatcgcggggccattgtccgagatctggaaaaccttggcgagcgcgccctcccttataggataagcgcacactcccagcagcacaataggggcggatacttcctggtggacttttacgcccctaccgccgcagttgagagcatggtggaacatctctcacgagacatcgacgtgataagaggaaatattgttaaacatccactcactcaggagctgaaggagtgtgaaggtattgttccagtccctctagcggagaaactgtatagcaccaagaagagaaagaagtag

SEQ ID NO: 124686 - DNA, 729 bp, synthetic construct
  misc_feature 1..729: note = Description of Artificial Sequence: Synthetic coding sequence
  source 1..729: mol_type = other DNA
atggccgccccagccgtcaaggtggcccgtggatggtctggtctggcccttggggtgaggcgagccgtgctgcagctccctggactgacacaagtacgatggtcccgctactccccagaatttaaagaccccttaatagataaggagtattaccgcaagccggtggaagaactgacggaggaggagaagtacgtgcgagaattgaagaagacgcagctcatcaaggccgctcctgcgggaaaaacctcaagtgttttcgaggatccagttatatccaaattcacaaacatgatgatgattgggggcaacaaggtgctcgctcggtccctgatgattcagactctggaagctgtaaagcgaaagcagttcgagaagtatcatgcagccagtgcagaagaacaggccacaatagagagaaacccctacacaatctttcaccaggcccttaagaactgtgagcctatgattggactggtgcctatcctcaagggaggccggttttaccaggtgcctgtccccctacccgacaggaggaggcggttcctcgcaatgaaatggatgattaccgagtgccgggataagaagcatcagaggacactcatgcccgagaagctgagtcataagttgctcgaggccttccacaaccagggacccgtgataaagaggaaacatgacctccataagatggccgaagccaatcgagcgcttgctcattacagatggtggtag

SEQ ID NO: 124687 - DNA, 1191 bp, synthetic construct
  misc_feature 1..1191: note = Description of Artificial Sequence: Synthetic coding sequence
  source 1..1191: mol_type = other DNA
atggccgcgccatgcgtgtcctatggtggcgctgtgagctatcgactgctgttgtggggaagaggcagtctggctcggaaacaggggctctggaagacagctgcgcccgagttgcagaccaacgtgcgttcacagatcctccggctccgccataccgccttcgtaattcctaagaaaaatgtgcctacgagcaagcgcgaaacctataccgaggatttcatcaaaaagcagatagaggagttcaatattggaaaacggcatctcgcaaatatgatgggagaggacccagagacctttactcaggaggacatcgaccgagccatagcatatctcttccctagcgggctgtttgaaaagagggccaggcccgtgatgaaacaccccgagcagatatttccccgtcagagagcaatccagtggggagaagacgggcgaccattccactatctgttttatactgggaagcagagttactatagtctgatgcacgatgtgtacggaatgctcctgaacctggaaaagcaccagagccatttgcaggcaaaaagcctgctgcccgaaaaaaccgtcacgcgtgacgtcatcgggtcccgttggctgattaaagaggaactggaggagatgctagttgagaagttatccgatctggattacatgcagttcatacgcctgctggagaaactcttaacctctcagtgtggagccgccgaggaggaatttgtgcagagatttcgaagatccgtgacgctagaatccaaaaagcagcttatcgagcccgttcagtacgatgagcagggtatggccttctcaaagagtgaagggaaacggaagaccgcgaaggccgaggccatagtgtataagcacggttccggtcgcatcaaagtgaacggtattgactaccagctgtactttccgatcacgcaagatagggagcagttgatgtttccttttcacttcgtagaccgactgggtaagcatgacgtgacttgtactgtgtcggggggcggtcggtcagcacaggctggcgcgatccggctagccatggcaaaggctctttgttcgttcgtcactgaggatgaggtcgaatggatgcgccaggccggcctgctgaccactgacccccgcgtccgggaaaggaaaaaaccggggcaggagggggccaggagaaagtttacttggaaaaaacggtag

SEQ ID NO: 124688 - DNA, 1122 bp, synthetic construct
  misc_feature 1..1122: note = Description of Artificial Sequence: Synthetic coding sequence
  source 1..1122: mol_type = other DNA
atgtgggtgtgtagcacactctggcgcgtccgcacaccagccaggcagtggcgcggactgttgccagctagcggctgccacggacctgccgcgtctagttacagcgcgagcgccgaacctgcaagagttagagccctcgtttatggacaccacggggaccctgctaaggtggtggagctaaagaatcttgaactcgccgccgtccgcggtagcgacgtcagagtcaagatgctggccgcccccatcaatccttctgacattaacatgatacagggaaactacggcttcctgcccgagcttccggctgtgggtggaaacgaaggagtcgctcaggtagtggctgtcggctccaatgttacagggctaaaaccgggggattgggtgatacccgcaaatgctgggctcggcacctggaggacagaggctgtgttcagtgaagaggctctgatccaggttccatctgacatcccacttcagagcgcggctaccctcggcgtcaatccctgcaccgcctatcggatgcttatggacttcgagcagcttcaaccaggggactcagtgatccaaaacgctagcaatagtggtgtgggtcaggctgtcatccagatcgccgcagcactcggcctgcgcaccatcaacgtggtgcgcgacaggccagatattcaaaaactgagcgatcggttaaagtccctgggcgcggaacatgtaattaccgaagaagagctcaggcgccccgaaatgaaaaacttctttaaagatatgccgcagcctcggctggccctgaattgcgtcggcggcaaaagttctactgagctgttgcggcagctcgcaagaggaggtaccatggttacttatggcgggatggctaagcaaccggtggtggcttccgtttctctgctcatttttaaggatttgaaactccgcggattttggctgagtcagtggaaaaaggaccacagccccgatcaatttaaagagctcatcctaaccctgtgtgaccttattcggcggggacagctgaccgcccccgcctgctcccaggtgcctctgcaagactaccagtctgcattggaggctagcatgaaaccctttatcagctcaaaacagatcctgacaatgtag

SEQ ID NO: 124689 - DNA, 894 bp, synthetic construct
  misc_feature 1..894: note = Description of Artificial Sequence: Synthetic coding sequence
  source 1..894: mol_type = other DNA
atgctggcagcccccataaacccctctgatatcaatatgatccaaggcaattatggcttcttgccggagctgcccgcagtcggaggcaacgagggggtcgcacaagtagtggccgtgggcagtaatgtgaccgggttgaaacctggggattgggttataccagcaaacgccggattgggcacatggcggactgaagctgtgtttagcgaggaagccttgatccaagtgccatcagatattcccttacaaagcgctgccaccctgggagtcaatccatgtacagcttacagaatgctcatggattttgagcagctacagccaggagattccgttattcagaacgccagtaacagcggcgtcggacaagcggtaatacagattgctgctgcattgggcctgcggacaattaacgtggtcagagaccgtcctgatatccagaagctaagcgaccgccttaaatctctaggggccgaacatgtgatcactgaggaggagctccgaaggccagaaatgaagaatttttttaaagacatgccacagcctagacttgccctgaattgcgtcgggggtaagtcctccaccgagctgttgcgacagctcgcaagggggggtacaatggttacttacgggggtatggccaaacaacccgtcgtcgcttctgtctcactgctgatttttaaagatctcaaattgagggggttctggctatcacagtggaagaaagaccacagccctgaccaatttaaagagcttatcctgaccctatgtgatctgattaggcgcggccagctcaccgccccagcctgtagccaagtgcctctccaggactatcagtctgcgttagaggcgtctatgaaaccattcatctctagcaaacagatcctgaccatgtag

SEQ ID NO: 124690 - DNA, 789 bp, synthetic construct
  misc_feature 1..789: note = Description of Artificial Sequence: Synthetic coding sequence
  source 1..789: mol_type = other DNA
atgattcaaggcaactatggtttcttgccagagctgccagctgtgggcggcaacgaaggggttgctcaggtcgtcgccgtggggtccaatgtcaccggtttgaagcctggggactgggttatacccgccaatgcgggtctgggtacctggcgaacggaagcggtgttcagcgaggaggccttgatccaggtgccctctgatatcccactgcagagtgccgccacactgggtgtcaatccgtgtacagcttacagaatgttgatggatttcgagcagctgcagcctggggatagtgtgatccagaacgccagcaactcaggagttggtcaggcagtgatccagattgcagccgcccttgggctgcgcactattaacgtcgttagggaccgcccagatatccagaaactgtccgaccgattgaagtctctcggtgctgagcatgttatcaccgaggaggagcttcggagacccgaaatgaagaattttttcaaaatacgcaaactcagactcaggaaggaggagatgctgaaccagaatcacatcgtctacaagggcagcagggagtctgagctcgcaagtgtctctccgaactcgaaaccgctcaatctgcccgaaccccctcctcacaacatgccccgtcacgcccctgcgactgcctgcagccagttgtgttggtgggaaaaacttcaccgcgcagctgccgcggtatcagcttggaggaaccacggtaacctatggggggatggtcaggcggctagacgtagtctctgtgagccagcacatttctag

SEQ ID NO: 124691 - DNA, 570 bp, synthetic construct
  misc_feature 1..570: note = Description of Artificial Sequence: Synthetic coding sequence
  source 1..570: mol_type = other DNA
gctaccctcggagtgaatccgtgcacagcatatagaatgctgatggacttcgaacagctgcagcccggggatagcgtcattcagaatgcgtcgaactcaggagtaggccaggccgttattcagatcgcagcagccctcggcctgcggaccatcaatgtggtaagggaccggcctgatatccagaagctgagcgacaggctgaagtccctgggcgcagagcacgtcattacagaggaggagctgcgtcgaccagaaatgaagaatttttttaaaatacgcaagttgcgtctaagaaaggaagagatgctaaatcagaatcatattgtgtataaaggctcgagggagtcagagctggcctcagtgtcacccaactcaaagccactaaaccttcccgagcctcctccccacaatatgcctaggcatgccccagctacagcatgtagtcagctgtgctggtgggaaaagctccacagagcagccgctgcagtgtcagcttggagaaaccacgggaacttatggggcgacggccaggcagcgcgaaggagcctgtgcgagcccgcgcacttttag

SEQ ID NO: 124692 - DNA, 1200 bp, synthetic construct
  misc_feature 1..1200: note = Description of Artificial Sequence: Synthetic coding sequence
  source 1..1200: mol_type = other DNA
atgcagtccttaagtctgggtcagacaagtatttctaagggcctgaactatctcaccatcatggcccccggtaacctgtggcatatgcgcaacaactttctattcggctcccgctgttggatgacaaggtttagcgctgagaacatctttaaatccgtctcctttcgactgtttggcgtgaaatgtcataacaccgattcagagcctctcaaaaatgaagacctgttgaagaacctgctgacaatgggcgtcgatatagacatggcaagaaagcgccagccgggagtcttccataggatgatcactaacgaacaggacctcaagatgtttttattaagtaagggggcctcgaaggaggttattgcctcaattatcagccggtaccctcgcgcaataacacggactccggagaacttatcgaagcgctgggacctgtggcgtaagatcgtcacttctgaccttgagatagtgaatatcttggagagatcgcccgaaagcttctttcgttcaaataataacttgaaccttgaaaacaatataaagtttctctattcagtgggcctgactaggaaatgtctgtgcaggctgctaacgaacgcccctagaactttctctaatagcctggatctaaacaaacaaatggtggaattcctgcaggcggcaggcctctctctcggccataacgaccccgcagacttcgtgaggaaaattatctttaaaaatcctttcatcttaatccagtccactaaaagggtgaaagcgaatatagaatttctcaggtcgacattcaatcttaactcagaggagctgttggtgcttatatgtggccctggggccgaaatactggacttgtccaatgactatgcgcggaggtcctatgccaatattaaggagaaacttttctcccttgggtgtactgaggaggaggtgcagaaattcgtgctcagttacccagacgtcatttttcttgccgagaaaaagttcaatgataagattgactgcctgatggaggaaaatatctccatcagtcagattatcgaaaaccctcgggtcttggactcctctattagcacccttaagtcacggatcaaagagctcgttaacgctggatgcaacctttccaccctgaacatcaccctgctgtcatggagtaagaaacgctacgaagcaaagttgaagaaactgagcaggtttgcttag

SEQ ID NO: 124693 - DNA, 477 bp, synthetic construct
  misc_feature 1..477: note = Description of Artificial Sequence: Synthetic coding sequence
  source 1..477: mol_type = other DNA
atgcaatcgttgtcattgggccagacatctatctcaaaagggctgaactatctgacaatcatggcccctgggaacctgtggcatatgaggaacaattttctttttgggagccgatgctggatgacaagattttctgctgagaacatctttaaatccgtgtcttttcgactattcggcgtgaagtgccataatactgactccgagccgctgaaaaacgaggatctgctgaaaaatctacttacgatgggtgtagacattgacatggcacggaaaaggcagccgggcgtgttccacaggatgatcaccaacgagcaggatctcaagatgtttttacttagcaagggggccagcaaagaggtaatcgcatcaatcatttccagatacccccgcgctatcacaagaaccccagaaaatctcagtaaacgatgggatctgtggcgcaagattgtaacatcagatctcgaaatcgttaattag

SEQ ID NO: 124694 - DNA, 2184 bp, synthetic construct
  misc_feature 1..2184: note = Description of Artificial Sequence: Synthetic coding sequence
  source 1..2184: mol_type = other DNA
atgaatcagaagctgttaaagctggagaacctcctgagatttcatactatctaccgccagctgcactccctgtgtcagagacgtgccttgcggcagtggcgccatggcttctcgagcgcgtatccagtgtggacagcacagctttgtgcttggccttggccaactgatgttctgaccggggcggcactctctcagtacagacttttggtcacaaaaaaagaggagggtccctggaagtctcagctcagcagtactaagagcaaaaaggtagtagaggtctggatcggcatgactattgaggagctggcaagagccatggaaaaaaacaccgattatgtatacgaggctctgttgaacaccgacattgacattgacagcttggaagccgatagtcacttagatgaggtttggataaaggaggtgattacaaaagcagggatgaagttgaagtggagtaagctcaagcaggacaaagtgcgcaagaataaggacgcggtcagacggccacaggccgatccagccctcctcaccccacggagcccagtcgtaaccatcatgggacacgtggatcacggaaaaaccaccttgctagataaattccgaaagacgcaggtggctgctgtagagacgggcggcatcacacagcatataggtgctttcctcgtgagccttcctagtggggagaagataacttttctggatactccaggacatgcagccttttcagccatgagagcccgcggcgcacaagtaacagatatcgtcgtgcttgtcgtagccgccgacgacggggtgatgaagcaaactgtggagagcattcagcacgctaaggacgctcaggtcccaatcatactggcagtgaataagtgcgataaggcagaagctgatcccgaaaaagtcaagaaggagttgctcgcctacgatgtagtgtgcgaagattatggaggcgacgtgcaggcagttcctgtaagcgccctgaccggggataacctgatggctttggccgaggcaacagtggctctggctgaaatgttagagcttaaagccgatcccaacggccctgtagaaggaacggtcatcgagtctttcacagacaaaggccgcggactggttaccactgctattattcaacggggaaccctacgcaaaggctctgttctagttgcaggcaagtgttgggcaaaggttcgccttatgttcgacgagaatggtaagactatcgacgaagcgtatccctcaatgcctgtcgggatcaccggatggagggacctgcccagtgctggggaggagatattagaggtggagtcagagcctcgcgcccgagaagtcgtggactggaggaagtacgagcaagagcaggaaaagggacaagaggacttgaagatcatcgaggaaaaaaggaaggagcataaggaggcacatcagaaggctcgggaaaaatatggacatttgctctggaaaaagcgcagtatcctgaggttcctggaacgcaaagagcaaatacccctaaagcccaaagagaaaagagagcgagattctaacgtactgagcgtgattatcaagggagacgtggatggcagcgttgaggctatactgaacattatcgacacatacgacgcatcacacgaatgcgaactggagttagttcactttggcgtaggagatgtgagtgcaaatgacgtgaacttggccgagaccttcgatggcgtcatctatggtttcaacgtcaacgccggtaacgtcatacaacagtctgcagctaaaaagggcgtgaaaattaagttacataaaattatttataggctcgtggaggatctgcaggaggagctcagttcaagactcccatgtgccgtggaggagcatccggtgggcgaggcctccattttggccacatttagcgttacagaaggcaagaaaaaggttcctgtggccggctgtagggtgcagaaggggcagctggagaagcagaagaagttcaagttaacgcggaacggccatgtcatctggaaggggagcttgacatctttgaagcaccacaaagacgacatttctattgtgaaaacagggatggactgcggcctcagtctcgatgaggataacatggaattccaggtgggagatcggatcgtgtgttatgaggagaagcagatccaggccaaaacctcttgggaccccggattttag

SEQ ID NO: 124695 - DNA, 219 bp, synthetic construct
  misc_feature 1..219: note = Description of Artificial Sequence: Synthetic coding sequence
  source 1..219: mol_type = other DNA
atgaatcagaagttgctgaagctggagaacttgctcaggtttcacaccatttatcggcagctccactcgctgtgtcagagaagagcactgcgccagtggaggcacgggtttagtagcgcctacccagtgtggaccgctcagctgtgtgcctggccctggcctaccgatgtgctgactggagccgcgctgagtcagtaccgattactggttacgaagtag

SEQ ID NO: 124696 - DNA, 2184 bp, synthetic construct
  misc_feature 1..2184: note = Description of Artificial Sequence: Synthetic coding sequence
  source 1..2184: mol_type = other DNA
atgaaccagaagctattaaagctggagaatctgctgcgtttccatacaatctaccgacagctgcacagcctctgtcagcgcagagccctcagacaatggagacacgggttcagtagcgcttaccctgtatggaccgctcagctctgtgcgtggccctggcccaccgatgtgcttacaggcgccgctctgagtcagtaccgcctcctggtgacaaagaaggaggaggggccctggaaatcccagctgtcatccaccaaatctaaaaaagtggtggaagtgtggattggaatgactatcgaagagctggccagagcaatggaaaaaaatacagactatgtctacgaagccctgctgaacacagacattgatatcgatagtctcgaggctgatagtcacctagacgaggtctggatcaaggaagtcattaccaaggcagggatgaagctgaagtggagtaagctcaagcaggataaagtccgtaagaacaaggacgccgttcgaagaccccaggcggacccggccctgttaaccccccggtctccagttgttacaatcatgggccacgtggatcacggaaaaacaaccctgctggataaattcagaaaaacacaagtggccgcagtcgaaaccggcgggatcacacagcatattggcgccttcctcgtgtccctgccctctggtgagaagatcacttttttggatacccccggacacgcagcattctcagccatgagggcacgaggggcccaagtcactgacatcgtcgtgttggttgtcgccgctgacgacggtgttatgaagcagactgttgagagtatccagcacgccaaagacgcacaggtgcccattattctcgccgtcaacaaatgcgataaggccgaggcagacccagagaaggttaaaaaggagctactggcatatgacgtggtctgcgaggactacggcggggatgtgcaggccgtgccagtgtcagcactaacaggcgataatctcatggctttagccgaggctactgttgctctggcagaaatgctggagctgaaggcggaccccaacggcccagttgaaggcactgtcattgaaagtttcaccgataaaggacgaggtttagtgactaccgccatcattcagagggggaccctgagaaagggaagtgtcctggtggccgggaaatgctgggcgaaagtgagactcatgtttgacgaaaatggaaaaacaattgacgaagcctatccaagcatgcctgtcgggatcaccggatggagggatttgccgtccgccggcgaagaaatactcgaagtagagtcggagcccagagccagggaggtcgtggactggcggaagtacgaacaggaacaggagaagggccaagaagacttgaagatcatcgaagagaagcggaaggagcacaaggaagctcaccagaaggctagagaaaagtatgggcacctcctctggaaaaagcgcagtatactaagatttttggaacggaaggagcagatccctttgaaaccaaaagaaaaacgtgagcgagactcgaatgttctgagtgtaatcatcaagggagacgtagacggtagcgtggaagccatcttgaatatcatcgatacctatgacgcttctcacgaatgtgaactcgaattggtacattttggtgtgggggacgtgagtgcaaacgacgtgaatttagctgagacgtttgacggcgtcatctacgggtttaacgtcaatgcaggcaatgtcattcagcagtctgctgcaaagaaaggcgtgaaaatcaaattgcataaaataatctatcgcctagtagaagatctccaggaggaattatctagtaggttaccgtgtgccgtggaagagcaccccgttggtgaagcctctatactggctacgtttagtgtgacagagggaaagaaaaaagtgcctgtggccgggtgccgtgtgcagaagggccagctggaaaaacagaaaaaatttaagttgactcgcaatggacacgtgatttggaaaggttcacttacatccctgaaacaccacaaggacgatatcagcattgtgaagaccggaatggattgcggactgagtctggacgaagacaacatggagtttcaggtcggagaccgcattgtgtgctatgaagagaagcagattcaagctaaaacatcatgggatccgggattttag

SEQ ID NO: 124697 - DNA, 2184 bp, synthetic construct
  misc_feature 1..2184: note = Description of Artificial Sequence: Synthetic coding sequence
  source 1..2184: mol_type = other DNA
atgaatcagaagctgctgaagctggagaacctgctccggttccacacaatctaccgacaactgcactctttatgccagagacgggcattacggcagtggcggcatgggttctcttccgcctacccggtctggaccgcccagctgtgtgcttggccttggcccaccgacgtacttacgggggctgccttgtcccagtaccgactcctggttaccaagaaggaggaaggaccctggaagtcacaattaagtagcacaaaatcaaagaaggtcgttgaggtttggattggtatgacaatagaggaactggctcgtgcaatggagaagaacaccgattacgtctacgaggctctcctgaacaccgacatcgacatcgacagcctggaggccgactcacatctggacgaggtatggatcaaagaagtgattactaaggccgggatgaaattaaaatggtcaaagctgaagcaggacaaggtaaggaaaaacaaggacgctgtgaggcgaccacaggctgaccccgctttattgacccctagatcccctgtcgtgaccatcatgggacatgtcgaccatggaaagaccacgcttctggacaaattccgtaagacacaggtagctgcagtggagaccggcggaatcacacagcatattggcgctttcttagtgagcttgccctccggtgaaaaaatcaccttcctggacactcctggccatgctgcgtttagtgctatgcgggccaggggcgctcaagtcacagacattgtcgtcctcgtcgtggccgcagatgacggcgtgatgaagcaaaccgttgagtccatccagcacgctaaggacgcccaagtgcctatcattctggccgtgaacaaatgtgacaaagccgaagctgaccctgagaaagttaagaaagaattattagcctacgatgtcgtctgcgaagattacggtggagatgtccaggctgtgcccgtttcagctctcacaggtgacaacctgatggcactggccgaggccacagtggctctagccgagatgctggagctcaaggctgaccccaacggcccagtcgagggtacagtgattgagagcttcacagacaagggcagagggctagtgacaaccgcaatcatccagaggggaacacttaggaagggctcagtgctggttgccggaaaatgttgggccaaagtgcgattaatgttcgatgagaatggaaaaacaatcgatgaggcataccccagcatgcccgtgggcattacagggtggcgggacctcccttcagcgggagaggagatcttggaagttgagagcgagccacgagctcgcgaggtggtggactggcggaaatacgaacaagaacaggaaaaggggcaggaggacttgaaaatcatcgaagagaaaagaaaagagcacaaggaggctcatcagaaagcaagggaaaaatacggtcacctcctttggaagaaaaggagcattctcaggtttttagagcggaaagagcagatccctctcaagcctaaggaaaagcgcgaacgcgacagtaatgtcctctcagtgatcataaaaggcgatgtagacggcagtgtcgaggcgatactaaacatcatcgacacctacgacgctagccatgagtgtgagctggaactcgttcacttcggtgttggggatgtgtcagcaaatgacgttaatctggccgagaccttcgatggagtgatctacggctttaacgtaaatgccggcaacgtcatccagcagtctgcggccaagaagggcgtgaaaattaagctgcacaaaattatctaccggctggtagaggatctgcaggaggaactttctagccgcctgccatgcgcagtggaggagcatccagtgggagaggcttctatcttagcaacattcagcgtcaccgagggaaaaaaaaaagtccccgtggcaggctgtagagtgcaaaaaggtcagcttgagaagcagaagaaattcaaacttactcgtaacgggcacgtcatttggaagggctctctgacttcactcaagcaccataaagacgacataagcatagtaaagacaggcatggactgtgggctgtcacttgatgaagataacatggagttccaggtgggagatcggattgtttgttacgaggagaagcagatccaggcaaagacatcctgggatcccgggttttag

SEQ ID NO: 124698 - DNA, 213 bp, synthetic construct
  misc_feature 1..213: note = Description of Artificial Sequence: Synthetic coding sequence
  source 1..213: mol_type = other DNA
atgaatcagaaactactgaaactggagaatcttttgagatttcatacgatttatagacaattacatagcctctgccagcgccgtgccctacggcagtggcgccacggcttttcgtcggcctatcccgtatggacggctcagctgtgtgcttggccatggcccacagatgttctgacgggcgcagctctctcacagtacagattgctcgtctag

SEQ ID NO: 124699 - DNA, 24 bp, synthetic construct
  misc_feature 1..24: note = Description of Artificial Sequence: Synthetic coding sequence
  source 1..24: mol_type = other DNA
atgaaccagaagctgctcaagtag

SEQ ID NO: 124700 - DNA, 33 bp, synthetic construct
  misc_feature 1..33: note = Description of Artificial Sequence: Synthetic coding sequence
  source 1..33: mol_type = other DNA
atgaatcaaaagctgctgaagcttgagaactag

SEQ ID NO: 124701 - DNA, 81 bp, synthetic construct
  misc_feature 1..81: note = Description of Artificial Sequence: Synthetic coding sequence
  source 1..81: mol_type = other DNA
atgaatcaaaaactgcttaaattagagaatcttcttagattccataccatttatcggcaactgcactccctctgccagtag

SEQ ID NO: 124702 - DNA, 216 bp, synthetic construct
  misc_feature 1..216: note = Description of Artificial Sequence: Synthetic coding sequence
  source 1..216: mol_type = other DNA
atgaaccaaaaattgctaaaactggagaatctccttagattccatacaatttatcgtcagctgcactctctgtgccagcggcgcgcgctccggcaatggcgacacgggttctcttcggcatacccagtgtggactgcacaattgtgtgcctggccttggccaaccgacgtgctgaccggagccgccctgtcacagtatcgcctcctcgtcacatag

SEQ ID NO: 124703 - DNA, 1398 bp, synthetic construct
  misc_feature 1..1398: note = Description of Artificial Sequence: Synthetic coding sequence
  source 1..1398: mol_type = other DNA
atgaatcagaagctgctgaagctggagaacttactccgctttcacacgatctatagacaactccacagtctctgccagaggcgggccctccgccaatggcggcacggcttttcttcggcctacccagtgtggacagcccaactgtgcgcttggccatggcccaccgacgtgttaaccggcgcagcgttgtctcagtacaggctcttggtgaccaaaaaagaggagggaccctggaaatctcagctgtcttcaacgaagagcaaaaaagtggtggaggtgtggataggcatgacaatcgaagaactcgcgagggctatggagaaaaacaccgattacgtgtatgaggccttactcaatacagatatcgacatcgactctttggaggccgattctcatctcgatgaagtgtggattaaggaggtcataaccaaggccggaatgaagcttaagtggagtaagctgaaacaggataaagtccgaaaaaacaaagacgctgtaagacgcccacaggcggacccagccctcctgactccacgctcacccgtcgtcaccattatgggccacgtcgatcacggcaagacaactctcctggacaagttcagaaagacccaggtggccgccgtggaaaccggcgggattacccaacacattggggcatttttggtgtcacttccttccggagagaaaatcacgtttctggacacacccggacacgctgctttctctgctatgcgtgctaggggggcgcaagtgactgatattgttgtgttagtcgtggccgccgacgacggggtgatgaagcagaccgtggaatctattcagcatgccaaagacgcccaggtccccataattctggcagtcaacaagtgcgataaagccgaagctgacccggagaaagtgaagaaggagctcctggcctacgacgtagtgtgtgaagattatggtggagacgtccaagccgtgccggtgagcgcactgacaggggataatcttatggccctcgctgaggctacagtggccctggccgaaatgctcgaactgaaggcggaccctaatggtccggtggagggtacagtgattgaatctttcactgacaagggccgggggttagtgaccaccgcaattatccaacgggggactctcaggaagggctctgtcttggtcgccggaaaatgctgggctaaggtccgtctaatgttcgacgagaacggcaaaactatcgatgaggcgtacccgagtatgcctgtcggaataacggggtggcgggatctccccagcgcaggagaggaaattttggaagttgagagtgaaccacgagcccgagaggttgtggattggaggaagtatgagcaggaacaggagaagggccaggaggatttgaaaaaggaaaaaaactag

SEQ ID NO: 124704 - DNA, 456 bp, synthetic construct
  misc_feature 1..456: note = Description of Artificial Sequence: Synthetic coding sequence
  source 1..456: mol_type = other DNA
atgaaccgtcatttatgtgtgtggctgttcaggcacccatctctgaatggatatctgcaatgccacattcagctgcatagccaccaatttaggcagatccatcttgacacccgcttgcaggtttttcggcagaatcggaactgtatcctgcatctcctgtctaaaaactggagtaggagatactgccatcaggatacaaaaatgctctggaagcacaaagctctgcaaaaatatatggaaaatttgtcaaaggagtatcagaccctggagcagtgtcttcaacatatccccgtgaatgaggaaaatcgcagatcactgaatcggcgccacgcagagcttgctccactcgccgctatttatcaagaaatacaagaaaccgaacaggctatcgaagagctggagtcaatgtgcaaaaaaactgagtcttgctctgtcgcccaggccgggatgcagtag

SEQ ID NO: 124705 - DNA, 1338 bp, synthetic construct
  misc_feature 1..1338: note = Description of Artificial Sequence: Synthetic coding sequence
  source 1..1338: mol_type = other DNA
atgaatagacatctctgcgtctggctgttccggcatccgagtctgaacgggtacttgcagtgccacattcaactgcacagccatcagtttcgacagatccacctggatacacggcttcaagtgttccggcaaaatcgtaattgcatactgcacttgctctctaagaactggtctcgtcgatactgccatcaggacactaaaatgctgtggaagcacaaggccctgcaaaagtatatggagaacctgtctaaggagtatcagacactggagcagtgtctgcagcacatccccgtcaatgaagagaatcggcgctcactcaatcgtaggcacgcagagctagcacctttagccgccatttatcaggaaatccaggagactgagcaagcaatcgaggagcttgaaagtatgtgtaagtctctgaacaaacaggatgaaaagcagctacaagaattggcactggaagaaagacagaccattgaccagaagattaacatgttatacaatgaactgttccagagcctggtccccaaagaaaagtacgacaagaacgacgtgatcttggaggtgaccgccggtagaactactgggggcgacatatgtcagcagtttacccgcgagattttcgacatgtatcagaactattcttgttacaaacattggcagttcgagcttctcaactatacccccgccgattatggcggactacaccacgcagccgcgcgaatctctggtgacggagtgtataaacaccttaaatacgaagggggcatacatcgtgtccagagaatcccggaggtaggattgtcaagtagaatgcagcgaattcacaccggtaccatgtcagtaattgtgctcccccagcctgacgaggtagacgtgaagctggatcctaaggatctgagaattgacaccttcagggcaaaaggtgcaggtggtcagcatgtcaacaagactgattccgctgtccgcttggtccacattccaacgggcttagtggtggagtgccagcaagagagaagccagatcaagaataaggagatcgcgttccgggtgctgcgagctcgcttgtatcaacagataattgaaaaagacaagcgacaacagcaaagcgcacgcaagcttcaagtggggacaagggcccagtcggagaggatccgcacatacaatttcacacaagatcgtgttagcgaccacagaatcgcttacgaggtgcgcgatattaaagagttcttgtgcggaggcaagggtctcgaccagcttatacagcgcctgttacagtctgctgacgaggaggcaatagcagaactgctcgacgagcatttgaaatctgcgaagtag

SEQ ID NO: 124706 - DNA, 1338 bp, synthetic construct
  misc_feature 1..1338: note = Description of Artificial Sequence: Synthetic coding sequence
  source 1..1338: mol_type = other DNA
atgaaccggcatctttgtgtgtggctctttaggcatcccagcctgaacggataccttcagtgccatatccaactgcattcccaccagtttcgacagatacacttggatacacgcctgcaggtgttcagacaaaaccgcaactgcatcctccacctcctttccaagaactggtcccgccggtattgtcatcaggacactaaaatgctgtggaaacacaaagctctccaaaaatacatggagaacttgagtaaggaataccagaccttggagcagtgtctccagcacatccctgtgaatgaggagaatcgtagatcgctgaataggcgacatgctgaactggcgccgttggccgctatttaccaagagattcaggagactgagcaggccatcgaagagctcgagagcatgtgcaagagcctgaataagcaggacgagaagcagctgcaggaactggctctggaagaacggcaaacaatcgaccagaagattaacatgctttataacgagttatttcagagcctggttcccaaggagaagtatgacaagaacgacgtgatactcgaggtcaccgccggtcgaacgacaggaggagacatttgtcagcagttcactcgagagatctttgacatgtaccaaaactactcatgctacaaacactggcagttcgaattacttaattatacaccagctgattatggagggctacaccacgcagccgctcgaatcagcggggacggggtttataaacacctgaagtatgaaggaggcatacatcgggttcagcgcattcccgaggtgggcttgagctcaaggatgcagcgaatacacacaggcacaatgagcgttatcgtccttcctcagcctgacgaggtggacgtgaaactggatcccaaggatctccgtattgacacgtttcgggccaaaggtgccggtggacagcacgtcaacaaaacagattctgctgtcagactcgtccacattccaactggcctggtcgtcgagtgtcagcaggaaagatcccagattaaaaacaaggagatagccttcagggttctgagagccagactgtatcagcaaatcattgaaaaggacaaaagacagcaacaatcagcccgcaaactgcaggtgggcactcgtgctcagagcgagcgaattcgaacttataacttcactcaggatagggtcagtgatcatcgaatcgcatacgaggttcgcgacattaaggaattcttgtgcggaggaaaagggctagaccaactcatacagaggctgctgcagtcagccgacgaggaggctatcgccgaactgcttgatgaacacctcaaaagcgctaagtag

SEQ ID NO: 124707 - DNA, 1407 bp, synthetic construct
  misc_feature 1..1407: note = Description of Artificial Sequence: Synthetic coding sequence
  source 1..1407: mol_type = other DNA
atgggcaacggtgaggttgtgcttttctcagatgccgagatgaatcgacacttatgcgtttggctcttcaggcacccatcccttaacggatacctgcagtgtcacattcagctacactcgcatcagtttcggcagatacacttagacacaagattacaggtgtttcgccagaaccggaattgtattttgcacctgctgtcgaagaactggtcaagaaggtactgccatcaggacaccaaaatgctctggaagcacaaagcactgcagaagtacatggaaaatctttccaaagaatatcagaccctggagcagtgcctacagcatatccccgtgaatgaggagaatcggcgaagccttaatagacggcacgcagagctggcccccctcgccgcaatatatcaggaaatccaagaaactgaacaggcaatagaggaattggaaagcatgtgtaagtcactgaacaaacaggatgagaagcaattgcaagagctggctctggaggagcgacagacaatcgaccagaagattaatatgctgtataacgaacttttccagagtctggtgcctaaagaaaagtacgataagaatgacgtaattctggaggtgactgccgggcgaactacgggcggcgacatatgtcaacagttcacaagggaaatctttgatatgtatcagaattattcttgctataaacactggcagttcgagctcttaaactataccccagccgattacggagggttgcatcacgcggccgctaggatatcaggggatggggtgtataagcacctcaagtatgagggtggcatacatcgggtgcagagaattcccgaagtgggtctgagtagcaggatgcagagaatccataccggcacaatgtcggtgatagtgctgccgcaacccgacgaggtcgacgtaaagctagatcctaaggatcttaggatcgacacttttcgcgctaagggggcgggaggccagcacgtcaacaaaaccgatagtgctgtccgtctcgtccacattcctactggccttgtggtcgaatgccagcaggagagatcacagatcaagaataaggagatcgccttcagggtgttacgggcgagactctaccaacagatcatcgaaaaagataagcgccagcagcagtccgccaggaagctccaagttggcaccagagctcagtccgaaagaattagaacctacaatttcactcaagacagggtgtctgaccataggatcgcatatgaggtccgggacatcaaggctcaatcacacagcactggaggctctcgagacccggcccattcgacattcctaagcctagattcagtcaggagcccaggtattctgattatgacctcctctgttcgcaacttctacgtcgtgggccgtgcttggatctcatag

SEQ ID NO: 124708 - DNA, 2274 bp, synthetic construct
  misc_feature 1..2274: note = Description of Artificial Sequence: Synthetic coding sequence
  source 1..2274: mol_type = other DNA
atgagcctacttttcagtcggtgcaatagtattgtaacagttaaaaagaacaaacgacatatggctgaagtcaacgcttccccgctcaaacactttgtgactgccaaaaaaaagatcaatggtatcttcgaacagttgggggcctacatccaagagtcggcaacctttctggaagatacttatagaaatgccgaattggatccagtgacaaccgaggagcaagtattagacgtaaaaggctacctcagcaaggttcggggtatatctgaagtcctggctcgacggcacatgaaagtggcattctttggtcggacatcgaatggcaaaagtactgtgattaatgctatgttatgggataaagttttgccaagtggaatcggccacaccactaattgctttctcagggtcgaggggactgacgggcacgaagccttcctgctgacagaagggtccgaggaaaagaggtctgcgaagaccgtaaaccagcttgctcatgcattgcaccaagataaacagctgcatgccggcagtctggtctcagtgatgtggcctaattccaagtgtccactcttaaaagacgatctcgtactaatggatagccccggcattgatgtgactacggagttagactcctggatcgacaagttttgtctagatgctgacgttttcgttctggtggccaactcagaatccactttaatgcaaacagagaaacacttctttcacaaggtatccgagagactatctcgcccaaacatctttatcctcaacaaccggtgggatgctagcgcgtctgaacctgagtatatggaggaggtaagaagacagcatatggagagatgcacctcattcctggtggatgagctgggcgtggtggacagatctcaggccggcgatcgcatcttctttgtgagtgccaaggaggttcttaacgcccggatacagaaggcccagggcatgccggagggtgggggtgccttagccgaaggttttcaagtgcggatgtttgaatttcagaatttcgaacggagatttgaggaatgtatttctcagtccgccgttaagaccaagtttgaacagcacaccgtcagggccaaacaaatcgccgaggcagtgcgactgatcatggatagccttcatatggccgcgcgcgagcagcaggtgtattgtgaagaaatgcgggaggaaaggcaggacagactgaagttcattgacaaacaactcgagctgctcgcccaggattataaactgcgtataaagcagataacggaggaggttgaaaggcaggtatccactgcaatggctgaggagatccggcgcttgagtgtgctcgtggacgattatcagatggatttccatccaagccctgtggtcctgaaggtgtataagaatgagttgcatcggcatattgaagaagggcttgggcgaaacatgtccgatcgctgttcaacagccatcaccaactcactccagaccatgcagcaagacatgatcgacggactgaaacccttactgcccgtgtccgttcggtctcagattgatatgctggtgccacggcagtgctttagcttgaactatgacctgaattgtgataaactctgcgctgatttccaggaagacattgagtttcatttttccctcgggtggaccatgctcgtgaatcgctttctggggcccaaaaactccaggcgcgctctgatgggatataacgaccaggtgcagcggccaattcccctgaccccagcaaatccctccatgccacccctgccgcagggttcgctgacccaggaagaattcatggtgagcatggtgactgggctagccagtctaacatccaggacatctatgggtattctggtcgtggggggagtggtgtggaaggccgtaggctggcgacttatcgcactctcctttgggctgtacggcctgctgtatgtctacgagcgcctgacttggactactaaggccaaggaacgagccttcaaaaggcagttcgtcgagcacgcatccgagaagttgcagctcgtaatcagctataccggatccaattgtagccatcaagttcagcaggagctgtcgggaacttttgctcacctctgccagcaggtcgatgttacacgggagaatctcgaacaggagattgcagccatgaataagaagatcgaggttctggattctctgcagtcaaaggcgaagctgctccggaacaaggccggatggctggactccgaactgaatatgtttacccaccaatatttgcagccttctcgctag

SEQ ID NO: 124709 - DNA, 1311 bp, synthetic construct
  misc_feature 1..1311: note = Description of Artificial Sequence: Synthetic coding sequence
  source 1..1311: mol_type = other DNA
atgcacccgcatctgtcaaccctcagtctccctcgcaggaggtctatggcctttctgagttcctggggagcccttgccgagggctttcaggtgcgaatgttcgagttccagaattttgagcgaagattcgaggagtgcataagccagagtgctgttaagacaaagttcgaacaacataccgtccgagcaaagcagatagccgaggctgtcaggctcatcatggattcactgcacatggcggcccgggaacagcaagtatactgtgaggaaatgagagaagagcggcaagataggctgaagtttattgataagcaactcgagctgcttgctcaggattataaactgcgaatcaaacagattactgaggaggtggagcgccaagtatccacagccatggctgaagagattcgacggctgtccgtgcttgtggacgactatcagatggacttccacccctctccagtggttctcaaagtgtataagaacgagctgcatagacatatagaagaaggcctagggagaaacatgagtgacaggtgttctacagctattacaaattcgctgcaaactatgcagcaggatatgatcgatggactgaagcccctgttgcctgttagcgttcgctctcaaattgacatgctcgttcctcgacagtgcttctcgttaaactatgatctgaattgcgataagctctgtgcagacttccaggaggatattgagtttcattttagcctcggttggacaatgctggtgaaccgctttttaggacctaaaaattctcgacgcgccttgatgggctacaacgatcaagttcagcgtccaatcccactaacacctgctaatccgagcatgcccccactgcctcagggcagcctcacccaggaggaatttatggttagtatggtaactgggttagcctcgctgacatccaggacgtctatggggattttagtggtgggaggagtagtatggaaagcagtcgggtggagactgatcgctttgagtttcgggctttacggtctgctatatgtctatgagaggttgacttggactacaaaggctaaagaaagggcattcaaacgtcagttcgttgagcatgcgtcagaaaaactgcagctcgtgatctcatacacaggatctaactgttcccaccaggtgcagcaggaattatctggaacatttgcccacctctgccagcaagtcgatggcgaaaccctgtccgaaaggtcaatggcaaagtcaaccctgatgctgctgaccctcctgtttctgtgttcttttgccggcgcccaggatgtgctgacccaatag

SEQ ID NO: 124710 - DNA, 297 bp, synthetic construct
  misc_feature 1..297: note = Description of Artificial Sequence: Synthetic coding sequence
  source 1..297: mol_type = other DNA
atgagccttctgttcagtcgttgcaattccatagtgactgtgaaaaaaaacaagaggcacatggctgaagtaaatgcttctcccctgaagcactttgtaacagcgaagaagaagatcaatggtatattcgagcagctgggcgcctacattcaagagtccgccacctttctggaggacacttacagaaatgccgagcttgaccccgtgactacggaggaacaggtgctagacgtgaagggatatctctctaaagtccgaggcatctccgaagtccttgcccggcggcatatgaagtag

SEQ ID NO: 124711 - DNA, 2274 bp, synthetic construct
  misc_feature 1..2274: note = Description of Artificial Sequence: Synthetic coding sequence
  source 1..2274: mol_type = other DNA
atgagcctgctgttcagccgttgtaattctatcgtcacagtgaagaagaataagcgccatatggctgaagtgaatgcatcaccactgaagcatttcgtcaccgccaaaaaaaagataaatgggatcttcgagcagctgggtgcctacatccaggaaagtgccacatttctcgaagacacctaccgaaatgctgaactggatccggttacgacagaagaacaggtgctcgatgtgaaaggttacctgagcaaagtgagaggtatctctgaggtgttggcacggcgccatatgaaggtggcgttttttggacggacatcaaacggtaagagcacagtgataaacgcaatgctttgggataaagtcctcccttctggcatcgggcacacaactaattgtttcttgcgggtggagggcacggacggacacgaggcctttctgctgaccgaaggctccgaagagaagagaagcgcgaagaccgtgaaccaattggctcacgctttacaccaagacaaacagctgcacgctggctctctcgtgagcgtcatgtggccgaatagtaagtgcccgcttctcaaagatgacctggttctgatggacagccctggtatcgacgtaactacagagctcgactcttggatcgacaagttttgcttagatgcggacgtcttcgtactggtcgccaattccgagtctaccctgatgcagacagagaagcattttttccataaggtgtccgagagacttagccgtcctaatatattcatcctgaataaccggtgggatgcctcagctagcgaacccgagtacatggaggaggtccggaggcaacatatggaaagatgtaccagctttctcgttgacgaactgggcgttgttgatagaagccaggccggcgatagaatattctttgtgtcagcaaaagaggtactcaatgctagaatacaaaaagctcagggcatgccggaagggggtggagctctcgcggagggcttccaggtccggatgtttgaattccagaatttcgagaggcggttcgaggagtgcattagccagagtgctgtaaaaacgaagttcgagcagcatacggtgagagccaagcagatagctgaggctgtccgcctgatcatggatagcctgcacatggccgccagagagcaacaggtgtactgcgaagagatgagagaagagaggcaggatcgactaaagtttattgataaacagttggagctgctggctcaggattacaagctgaggatcaaacagattacagaagaggtggaacgccaggtctccaccgctatggcagaggagatccgtaggctgtccgtgctggtggacgattaccagatggattttcaccccagtcctgtggtgctgaaagtctacaagaacgagctgcaccggcatatagaagaggggcttgggcggaacatgtctgataggtgttccaccgctatcactaattccctgcagaccatgcagcaggacatgatcgatggactcaagcctttattgcccgtgtcggttcgtagccaaattgacatgcttgtgccacggcagtgcttcagtcttaactacgatctcaattgcgacaagctgtgtgctgactttcaggaggacatcgaatttcatttctcactaggatggacaatgcttgtgaacaggtttctggggccaaagaattcacgccgagcgcttatgggctacaacgatcaggttcagcgaccaatacctctcactccggcaaatccaagcatgcctcctttacctcagggaagcctcacccaggaagagttcatggtgagcatggttacaggtttggcgtcactcactagcaggacttccatgggcatcttggtggtgggtggcgtggtgtggaaggctgtgggatggaggctcattgccctgtcattcggattgtacggactgctgtacgtgtacgagcggctcacctggaccacaaaggctaaggaaagggctttcaagcgccagtttgttgaacatgcctcagaaaagctgcagctggtgatcagttatacggggtccaattgctcccatcaagtccagcaggaactcagcggaactttcgcccatctgtgccagcaggtcgatgtcactcgggaaaatctcgaacaggagatcgcagccatgaacaagaagatcgaagttctggactctcttcagtctaaggctaaactgctaagaaacaaggcaggttggttggactcagaactgaatatgttcacccaccagtatttacagccatctcgatag

SEQ ID NO: 124712 - DNA, 1395 bp, synthetic construct
  misc_feature 1..1395: note = Description of Artificial Sequence: Synthetic coding sequence
  source 1..1395: mol_type = other DNA
atgagtctgcattttctgtattattgcagtgaaccaaccctcgatgtaaaaattgccttctgccaaggcttcgataagcaggtggacgtgtcttacatcgccaagcactacaacatgtccaaatccaaggtggataatcagttttactcagtcgaggtgggtgactccacctttacagtgttaaaacgctaccaaaacctcaagccaatcggaagcggagcacaggggatagtttgtgctgcctacgatgctgtgctggacagaaatgtggccatcaaaaaactaagtcgaccattccagaatcagacccacgcaaaaagagcttaccgggaactggtgttgatgaaatgtgtgaatcacaagaatattatttcactgctgaacgtgttcactccccaaaagacgctcgaggaatttcaggacgtatacctggtaatggaacttatggatgcgaacctgtgtcaggtcatccagatggagctggatcacgagcgcatgagctacctgctctaccaaatgctgtgtggaattaaacatttgcactccgcgggcataatacaccgcgatctgaagccgtccaatatagttgtgaagagcgattgtacactaaaaatcctcgattttgggcttgcacgtactgccggtacatcttttatgatgactccttacgtggtcacacgatattatagggcacctgaagttatattgggcatgggatataaagagaacgtggacatctggagtgtgggctgcatcatgggcgagatggtccggcacaagatcttgtttcccggtcgagattatatagaccagtggaacaaagtgatcgaacagttaggtacaccctgccccgaattcatgaagaaattgcagccaactgtccgcaactacgtggaaaaccgaccaaaatacgctggcctgactttcccgaaactgttcccagactctttattccccgctgacagcgagcataataaactgaaggccagtcaggcacgcgatctgctgtcaaaaatgttggtcatcgatccagcgaagaggatttccgttgacgatgctttgcagcacccctacattaacgtgtggtatgacccagccgaggtggaagctccccctccccagatttatgacaaacaacttgatgaaagagaacataccattgaggaatggaaggaactgatttacaaggaggtgatgaacagcgaagagaagaccaagaacggcgtggtgaaagggcagccatccccatccggagccgctgtaaatagtagcgaatcccttccacctagctcatctgtaaatgatatttcatcgatgtcaacggaccaaacactcgcctccgacacggatagtagcctggaggcatcagctggaccgttgggatgctgccggtag

SEQ ID NO: 124713 - DNA, 1269 bp, synthetic construct
  misc_feature 1..1269: note = Description of Artificial Sequence: Synthetic coding sequence
  source 1..1269: mol_type = other DNA
atgagccttcacttcctgtattattgcagtgaaccaactcttgacgtgaagatcgcattctgtcagggctttgataagcaagtagacgtcagctatatcgccaagcattacaatatgtccaaaagtaaggtcgataaccagttctattctgtggaggtgggtgacagtacatttacagtgctcaaacgttaccagaacttaaagcctatcggaagcggcgcccaagggatcgtctgtgcagcctacgatgcagtcctggaccggaacgtcgcaatcaaaaagctgagtaggcccttccagaatcagacacatgccaaacgggcctaccgggagctcgtgctcatgaagtgcgtcaaccacaagaatatcatcagcctgctgaacgtgtttacacctcagaaaacacttgaggagttccaggacgtttatctggttatggagcttatggatgcaaacctctgccaggtcatccaaatggaactcgatcatgagcgcatgtcctacctcctgtaccagatgctgtgtggcatcaagcacttgcatagtgcgggtatcattcatcgggacctcaaaccatccaatatcgtcgttaagagcgattgtacccttaagattctggattttggcctggcgcggacggctggcacaagctttatgatgactccttatgtagttacgagatactatcgggctccagaagtgatactcggaatgggttacaaagaaaatgttgatatatggtcagtagggtgcatcatgggcgagatggtgcgacacaagatcctcttccctggccgcgattacattgatcagtggaacaaggtcatcgaacagctaggaaccccctgcccagaattcatgaaaaaactgcaaccgaccgtcagaaactacgtcgagaatcggcctaaatatgcaggattaacatttcctaagctctttcctgatagcctcttccctgccgactccgagcacaacaagcttaaggctagtcaagcccgtgacttgctgtccaaaatgctggtaattgatcctgctaaacgcatctcagtcgatgatgcgctacagcatccctatatcaacgtctggtacgatccagccgaagtggaagcacccccacctcagatttatgataaacagctggatgagagagaacataccattgaggagtggaaggagttaatttacaaagaagtgatgaattctgaggagaaaaccaagaacggagtggtgaagggccaaccctcgccctcagctcaggtgcagcaatag

SEQ ID NO: 124714 - DNA, 960 bp, synthetic construct
  misc_feature 1..960: note = Description of Artificial Sequence: Synthetic coding sequence
  source 1..960: mol_type = other DNA
atggagcttatggacgccaatttatgccaagtgattcagatggaactggaccatgagcgcatgtcctacctcctatatcaaatgttatgcggcatcaagcacctgcacagtgccggcatcatacaccgggacctgaagcccagcaacatcgtggtgaaaagcgattgtactctgaaaatcttggacttcgggctcgccagaaccgctggtacatctttcatgatgacgccttatgttgtcaccagatattacagggccccagaggtaatcctaggcatggggtacaaggaaaacgtggacatatggtcagtcgggtgcattatgggcgaaatggttagacataagatactgtttccaggaagggactacatagatcaatggaataaagtaatagagcagctcgggactccttgtccagagtttatgaaaaaactgcagcctactgtgcggaactacgtggaaaacaggccaaaatacgccggattgaccttccctaagctgttccccgactctcttttccctgcagattccgagcataataaactcaaggcttcacaggcacgggatctgttgagtaaaatgctggtcatcgacccagccaaaaggataagcgtggatgacgctctgcagcacccctatattaatgtctggtacgaccctgcagaagtggaagcccctccaccacaaatttacgacaaacagctggacgagcgggagcatactattgaggagtggaaggaattgatatataaggaggtgatgaactctgaggagaagacgaagaatggggtggtgaagggacagcctagccctagcggagctgcagtgaacagcagcgaaagcctcccacctagctctagcgtgaatgacatctcctctatgtccactgatcagaccctggcctcagatacagactcttctctggaggcctcagccgggccattgggatgctgcaggtag

SEQ ID NO: 124715 - DNA, 834 bp, synthetic construct
  misc_feature 1..834: note = Description of Artificial Sequence: Synthetic coding sequence
  source 1..834: mol_type = other DNA
atggagttaatggatgcgaacttgtgccaggtgatccagatggaattagatcacgaacgcatgtcctacctgctttatcagatgctttgcgggataaaacatctgcactctgcgggaattatccacagagacctcaagcccagcaacatcgtcgtcaagagcgattgtaccctgaaaattctggacttcgggctggcccgcacggccggtaccagcttcatgatgacaccatatgtggtgactcgctactatagggccccagaggtgatactgggaatgggctacaaggagaacgtggacatttggtccgtgggatgtatcatgggggagatggtccgccacaagattctattcccggggcgagattatatcgaccagtggaataaggtgatagagcagctgggaactccatgtcccgagttcatgaagaagctgcagccaactgtgcggaattacgtagaaaacagacctaaatacgccggtctgactttccccaaactttttcctgatagtctgttcccagccgattctgagcataataagctgaaggcaagtcaggctcgtgaccttctatctaaaatgctggtgatcgaccccgccaaacggatctcagtggacgacgcattgcagcatccttacataaacgtgtggtacgaccccgccgaagtggaagcaccccctcctcagatttacgataagcaactggacgagagggaacacacaattgaggagtggaaggagctgatttacaaggaggtgatgaatagcgaagaaaagacaaagaacggtgttgtgaagggccaacctagccctagtgctcaggtgcagcagtag

SEQ ID NO: 124716 - DNA, 1269 bp, synthetic construct
  misc_feature 1..1269: note = Description of Artificial Sequence: Synthetic coding sequence
  source 1..1269: mol_type = other DNA
atgagcctacacttcctatattactgctcggagcccaccctggatgtgaagatcgccttttgccagggcttcgacaaacaggtagatgtgtcctacattgctaagcactacaacatgtccaagagcaaggtggacaaccagttttattccgtagaagtaggtgactcaacctttactgtcctgaagcgttaccagaatttaaagccaatcggttctggggcccaggggattgtgtgtgctgcctacgatgccgtgcttgaccgaaacgtggccatcaaaaagctgtcacggccttttcaaaatcagacacacgccaagcgagcctatcgtgagctggtgttgatgaaatgcgttaaccataagaatattatatcgctgcttaacgtatttacgcctcagaaaactctggaggagttccaagacgtctatttagttatggagcttatggacgcaaacctgtgccaagtgatccagatggaactggatcacgagcgcatgtcttacctgctgtatcagatgttgtgcggcattaagcacctgcacagtgccggcattatccaccgagaccttaagcccagcaacattgtggtaaagagtgattgtacccttaaaattcttgacttcggactggcacgcaccgccggaacctcattcatgatgacgccctatgtggtgactaggtattatcgcgctcctgaggttatcttgggaatggggtataaagaaaacgtggatatttggagtgtgggatgcatcatgggagagatggtcaggcataagatcttgtttcccggccgcgattatatcgatcagtggaacaaagtcatcgagcaactgggaacaccctgtccggagtttatgaagaaacttcagccgaccgtccggaattacgtggagaatcggcctaaatatgccgggttaacatttccgaagttatttcccgacagcctgtttcccgctgactctgaacataataaattgaaggcttcacaggccagggatctcctgtctaaaatgttggtgatagaccccgccaagcgcataagcgtggatgacgccctgcagcatccttacatcaatgtctggtacgatcctgcggaagttgaggcacctccgccacagatatatgataagcagcttgacgagagagagcatacaatcgaggaatggaaggagctgatttataaggaggtgatgaactctgaggagaaaacaaagaatggagtggtgaagggccagccgtccccatcagctcaagtccaacagtag

SEQ ID NO: 124717 - DNA, 1281 bp, synthetic construct
  misc_feature 1..1281: note = Description of Artificial Sequence: Synthetic coding sequence
  source 1..1281: mol_type = other DNA
atgtccaagtctaaggtggataatcagttttacagtgtcgaagtgggggattctacgtttacagttttgaaaagataccagaatctaaagccaatcggatcaggagcacaggggattgtgtgcgccgcctacgacgccgtgctagaccgtaacgtcgctattaagaagctttccagaccatttcagaaccagacccatgccaagagggcgtaccgggagctcgtcctgatgaaatgcgtaaaccataaaaacattattagcctgctgaacgtctttaccccgcagaagacattggaagaatttcaggacgtctatctcgtcatggaactgatggatgcaaacctgtgtcaggtaatccagatggaattagaccatgagcggatgtcctacctcctgtaccagatgctgtgtgggattaaacaccttcattctgcaggtattattcacagggaccttaaaccctcaaacattgtggtcaaatcggattgcacactgaagatccttgattttggattagcaaggacagccggtacaagtttcatgatgacgccatacgtagtgacgaggtactacagagctcccgaagtgattttggggatgggatataaagagaacgtggatatatggtccgtgggctgcatcatgggagaaatggttcgccacaagattctcttccctgggcgggactatatcgatcagtggaataaggttatcgagcagctaggtaccccctgtccggaattcatgaaaaagctgcagcccaccgttcggaattacgtcgagaaccgaccaaagtacgctggtctgactttccccaaactgttccccgactctctgtttcctgccgattctgaacataataagctgaaggcttcacaggcccgcgatctgcttagcaaaatgctggtgatcgacccagccaaaagaatctcagtcgatgacgctttgcagcatccatacattaatgtctggtatgaccctgccgaagtcgaggcccctcccccgcagatctacgataagcagcttgacgagagagagcatacgattgaggagtggaaagagcttatctataaagaggtcatgaatagcgaagagaagaccaagaatggtgttgtgaaaggacagccatcaccttcgggtgctgccgtgaattcatctgaatcattaccgccctcctcatcagttaacgatatctcgtctatgagcactgatcaaactttagcgtccgataccgacagctctctggaggcctccgccggccccctgggttgttgtcgatag

SEQ ID NO: 124718 - DNA, 1281 bp, synthetic construct
  misc_feature 1..1281: note = Description of Artificial Sequence: Synthetic coding sequence
  source 1..1281: mol_type = other DNA
atgtctaagtcaaaggtcgataaccagttttactccgtagaggtaggagattctacttttaccgtgctgaagcgttatcagaatctgaaacctatcggatcgggggctcaggggatcgtgtgtgcggcctacgacgcagttctggaccgcaacgttgcgattaaaaaattgtctcgccctttccaaaatcagacacacgccaaaagagcttaccgagagctcgttcttatgaaatgcgtgaaccataagaacataatctccttactgaacgtgttcaccccacagaaaacgctcgaggagtttcaggatgtttacttggtgatggaattaatggacgcaaacctgtgtcaggtgatccagatggagcttgaccacgagcgaatgtcttatttgctgtatcagatgctttgcggcatcaaacatctgcatagcgccggcatcatccatagggatctgaagcccagcaatatcgtggtcaaatccgattgcaccttaaagattctggacttcggactggccagaaccgcaggtaccagcttcatgatgacaccttacgtggttacccgatattacagagctcctgaggtgatcctgggaatgggctataaggagaatgtagacatttggtcagtcggttgcattatgggcgaaatggtgcggcacaagatcttgttcccaggccgtgattacatagaccagtggaacaaagtgatagaacagcttggcacgccgtgccctgagttcatgaagaaacttcaacctaccgtgcgaaactatgtggaaaataggccgaagtacgcgggcctcaccttccctaagctgttcccggacagcctctttccagccgatagcgaacacaacaagctcaaagcgtcccaggctcgggacttgctttccaaaatgctcgtgattgatcccgctaaaagaattagcgtcgatgatgctttgcagcatccatacataaacgtgtggtacgaccccgcagaggttgaggctccacctccgcagatctacgacaagcagctggacgagcgtgaacatacgattgaagaatggaaagagctcatttacaaagaggtgatgaactccgaagaaaaaacgaagaatggtgtggtgaagggtcagccgtcgccttctggcgccgctgtgaactcgtccgagagtttacctccctctagcagcgttaacgacatatccagcatgtccaccgatcagacactagccagcgacaccgacagtagcctggaagcctccgccggacccctgggctgctgtagatag

SEQ ID NO: 124719 - DNA, 960 bp, synthetic construct
  misc_feature 1..960: note = Description of Artificial Sequence: Synthetic coding sequence
  source 1..960: mol_type = other DNA
atggagctgatggatgccaacctttgtcaagtgattcaaatggagctggaccatgaaaggatgtcctacctcctgtatcaaatgttgtgcggaatcaagcacctgcactctgcgggcatcatccaccgggatctcaaacctagcaatattgttgtgaagtccgattgtactctgaaaattctcgactttggcctggcgcgaacagctggcaccagctttatgatgaccccctatgttgtgacacggtattaccgggcccctgaggtgattctcggcatggggtacaaagagaacgtcgacatgtggtcagtgggatgtattatgggggaaatgatcaagggcgccgtcttgttccccggaactgaccacatcgaccagtggaataaggtgattgagcagttaggtaccccatgtcctgagttcatgaaaaagctgcagcccacagttcgtaactacgtggaaaatcggcccaagtacgcagggttgacctttcctaagttgtttcctgacagcctctttcccgccgactctgagcacaacaagctcaaggctagccaagcccgggatctgctgagtaaaatgctcgtcatagaccctgcaaagcgcatttccgttgacgacgccctccagcacccctacattaatgtgtggtatgaccctgccgaagtggaggccccgcccccacagatctacgataaacagctggatgagcgggaacacacgatagaggagtggaaagaacttatttataaggaggttatgaactctgaggaaaaaactaagaacggcgtggtgaagggtcagcctagcccatctggtgcagcagtcaatagctctgaatcgttgcctccctcttccagcgtgaatgatattagctccatgtcaacagatcagacccttgcatccgatacggattcaagcctcgaagcatcagccgggccgctcggctgttgtcgctag

SEQ ID NO: 124720 - DNA, 102 bp, synthetic construct
  misc_feature 1..102: note = Description of Artificial Sequence: Synthetic coding sequence
  source 1..102: mol_type = other DNA
atgagcaagagtaaagtggacaatcaattttatagcgtagaggtgggggactcgacattcaccgtactgaagcggtaccagaatcttaaaccaatcgggtag

SEQ ID NO: 124721 - DNA, 156 bp, synthetic construct
  misc_feature 1..156: note = Description of Artificial Sequence: Synthetic coding sequence
  source 1..156: mol_type = other DNA
atgtctctgcacttcctgtactactgtagtgagcctacactggacgtgaaaatcgctttctgccagggattcgacaagcaggtggatgtgtcttatatcgcaaagcattataatatgtcgaagagcaaggttgacaatcagttttactcagtgtag

SEQ ID NO: 124722 - DNA, 276 bp, synthetic construct
  misc_feature 1..276: note = Description of Artificial Sequence: Synthetic coding sequence
  source 1..276: mol_type = other DNA
atgtcacttcactttttatattactgcagcgagccaaccctggatgtgaagatagccttctgccagggcttcgataagcaggtagatgtcagctacatcgccaagcactataacatgtcaaaaagtaaagtagacaaccagttttattcagtggaggtgggggactcaacattcaccgtgctgaagcggtaccaaaatttgaagcccatcgggtcaggtgcacagggcattgtgtgtgcggcctacgatgctgtgctagatagaaacgtggcctag

SEQ ID NO: 124723 - DNA, 225 bp, synthetic construct
  misc_feature 1..225: note = Description of Artificial Sequence: Synthetic coding sequence
  source 1..225: mol_type = other DNA
atgagcaaatcgaaagtggataaccagttctacagcgtggaggtgggagactccacctttacagtgctgaagaggtatcaaaatttgaagccaattggcagtggcgcacagggcattgtgtgtgcagcgtacgatgctgtgctagatagaaacgtggccatcaaaaaattgagccgccctttccagaatcaaacacacgccaagcgtgcatacagggaactttag

SEQ ID NO: 124724 - DNA, 366 bp, synthetic construct
  misc_feature 1..366: note = Description of Artificial Sequence: Synthetic coding sequence
  source 1..366: mol_type = other DNA
atgagcctgcatttcttatactattgttccgagccaacgttggatgtgaaaattgcgttttgtcagggctttgataaacaagtggacgtgtcctacatcgctaagcattacaatatgagcaaatctaaggtggacaatcagttctattctgtggaggtgggcgactcgacatttaccgtgctgaaaagatatcaaaacctgaaacccattggcagcggagcccaaggaatcgtctgcgccgcatacgacgccgtcttggatcgaaacgtagccataaagaaactttcccggccatttcaaaatcagacccacgccaagcgtgcctacagagaactcgtgcttatgaagtgtgtgaaccacaagtag

SEQ ID NO: 124725 - DNA, 354 bp, synthetic construct
  misc_feature 1..354: note = Description of Artificial Sequence: Synthetic coding sequence
  source 1..354: mol_type = other DNA
atgtcgctccacttcctgtactactgttccgaaccaactttggacgtgaaaatcgcattttgccagggcttcgataagcaagtcgacgttagctatatagcgaagcactataatatgagcaagtcgaaagtggacaatcaattctatagcgtggaggtgggagactccaccttcacagtcctcaaaagataccagaacctgaaacccatcgggagcggggcgcagggaatcgtatgtgccgcatacgatgccgttctggaccgcaacgttgctattaagaagctctcacgcccatttcagaatcaaacccatgctaagcgagcctaccgcgaactcgtgctgatgaagtgttag

SEQ ID NO: 124726 - DNA, 426 bp, synthetic construct
  misc_feature 1..426: note = Description of Artificial Sequence: Synthetic coding sequence
  source 1..426: mol_type = other DNA
atgagtctccattttctgtactactgcagcgagcctactctcgatgtcaaaattgccttctgccagggattcgataagcaggtcgacgttagctatatagcaaaacactacaacatgtctaagtccaaggtcgacaatcagttctattcagtcgaagtaggggatagtacttttaccgtgctgaagcggtaccagaatttgaagcctatcggttctggcgctcagggcatcgtgtgtgcagcctatgacgcagtgttggatcgcaatgtcgcgatcaagaagttgagtaggcccttccagaaccagacccacgcaaaacgcgcctaccgtgagttagtcctgatgaaatgtgtgaaccacaagaacatcatcagtttactgaacgtgttcaccccccagaagacacttgaggaattccaggattag

SEQ ID NO: 124727 - DNA, 255 bp, synthetic construct
  misc_feature 1..255: note = Description of Artificial Sequence: Synthetic coding sequence
  source 1..255: mol_type = other DNA
atgagtaagagcaaagttgacaatcagttctattctgtggaggttggagattcaacgttcaccgtgttgaagcgctaccagaaccttaaaccaatcgggtccggagcccaggggatcgtgtgcgcagcctacgacgccgtgctggatcggaacgtggcgatcaaaaagctttcacggccctttcagaatcagactcacgctaaacgggcttatcgtgagctcgtattaatgaaatgcgtgaaccataaaaactag

SEQ ID NO: 124728 - DNA, 159 bp, synthetic construct
  misc_feature 1..159: note = Description of Artificial Sequence: Synthetic coding sequence
  source 1..159: mol_type = other DNA
atgagtaagtcaaaggtggacaaccagttctacagcgtggaggtgggggactccacgttcaccgttctgaaacgctatcagaatctcaaacctatcgggagtggggctcaaggcatcgtgtgcgctgcttatgacgcagtgcttgaccggaatgtatag

SEQ ID NO: 124729 - DNA, 147 bp, synthetic construct
  misc_feature 1..147: note = Description of Artificial Sequence: Synthetic coding sequence
  source 1..147: mol_type = other DNA
atgtccttacacttcctgtattactgttcagagcccacgctggacgtaaagatcgcattctgtcagggattcgacaagcaggttgacgtaagctacattgccaagcactacaacatgagtaagtccaaggtggacaaccagttctag

SEQ ID NO: 124730 - DNA, 1008 bp, synthetic construct
  misc_feature 1..1008: note = Description of Artificial Sequence: Synthetic coding sequence
  source 1..1008: mol_type = other DNA
tagaacgtcgcgatcaagaagctgtctcgcccttttcagaatcagacacacgccaaaagggcatatcgtgagctggtactcatgaaatgcgtgaatcataagaacattatcagtctgcttaatgtatttactccacagaagacactggaagaattccaggacgtctacctggtcatggagctgatggacgcaaacctctgccaggtgatacaaatggagttggaccacgaacgaatgtcctaccttctctaccagatgctgtgcggcatcaaacacctccattccgccggaatcatacacagggacctgaaacctagcaacatcgtggtcaagtccgattgcacacttaagatcctggatttcggcttggccagaacagctggcaccagttttatgatgacgccttatgtagtgaccaggtattaccgtgcacctgaagtaattttgggaatgggttataaggaaaacgtcgatatgtggtcagtgggttgtataatgggggagatgataaagggcgcagtgctgttccccggcacagatcacatcgatcaatggaataaggtcatcgagcagctgggtacaccctgtccagagtttatgaagaagctgcaaccaaccgtgaggaactacgtggaaaatcgacccaagtatgccgggctcaccttccccaaactgttccccgactccctgttccccgctgacagcgaacataataagctaaaggcaagccaagcacgggatctcctgagcaaaatgctggtgatcgacccagctaaaaggatttctgtagacgacgcgttgcagcacccctacattaacgtgtggtatgaccccgcagaggtggaggctccgcccccccagatttacgacaaacagttggacgagcgagaacatactatcgaggagtggaaggaacttatttacaaagaggtgatgaatagcgaggaaaagaccaagaacggggtggtgaaagggcaacctagcccaagcgcccaagtccagcagtag

SEQ ID NO: 124731 - DNA, 1764 bp, synthetic construct
  misc_feature 1..1764: note = Description of Artificial Sequence: Synthetic coding sequence
  source 1..1764: mol_type = other DNA
atggccgagaagggcgactgcattgcttcggtgtacgggtatgatctaggagggcgatttgtagacttccagcccttgggctttggcgtcaatggtctggtgctgagtgcggtcgatagccgcgcctgtaggaaggtggccgtaaagaaaatcgcgctcagcgatgcccgctccatgaagcacgcactcagagagataaagattataagacgcctggaccatgacaacatcgtaaaagtttacgaagtgttgggcccaaaaggcaccgatctccaaggtgaactgttcaagtttagcgtcgcctatatcgtgcaggaatacatggaaactgacctggccagactcctagagcaggggactctggccgaagaacacgcgaaactgtttatgtatcagctgctccggggactgaagtacatacacagcgcaaacgtactgcatcgggatctgaagcccgccaacattttcatctctaccgaagacctcgttctgaaaatcggcgattttggccttgccagaattgtcgatcagcattatagtcacaaagggtatctctccgaagggctggtgaccaaatggtatcgctctccacgacttctgctgagccctaacaactacacaaaagctattgacatgtgggccgcggggtgcattttggcagaaatgctgacaggtcgaatgctgtttgctggggcacatgaactggaacagatgcagttaatcttggagacgatccccgtgatcagggaagaggataaagatgaattactgagagtgatgccatctttcgtctcatctacctgggaggtgaagagaccactgaggaagcttttaccggaggtgaactctgaagctatcgattttctcgagaaaatcctaacattcaacccaatggacagattgaccgctgaaatgggcctgcaacacccatacatgtctccatactcttgcccggaggatgaaccaacttctcagcatccattccgtatcgaggacgagattgacgacatcgtgctaatggccgccaaccagtcccagctgagtaactgggacacgtgcagtagtcgttaccccgtatctcttagtagcgatctggaatggcgccccgatcgctgccaagatgcctcggaggtgcaacgcgaccccagagccggctccgcaccccttgcagaggacgtccaggtcgatcctcgaaaggacagccatagttccagcgagcgatttctggagcagtcccattccagcatggaaagggcgtttgaggccgactatgggcggtcttgtgattataaggtcggatcacctagctaccttgataagctgctctggcgggacaacaaaccccatcactatagcgagccaaaattaatactggatctgagccactggaagcaggcggcgggtgcccccccaacagccactggtctcgccgatacaggagctcgcgaggacgagcctgcatccctttttctcgagattgcccagtgggtaaagtccacgcagggcgggccggagcatgcctccccgcctgccgacgaccccgagagaaggctgtcagcaagtcccccgggtaggccggctcccgtcgatgggggggcatctccccaattcgacctcgatgtgttcatcagtcgcgccttgaagctctgtaccaagccagaagacttacctgacaataaacttggtgatttgaatggtgcgtgcatccccgagcatcccggcgatctagtgcaaacggaagctttctcaaaggagaggtggtag

SEQ ID NO: 124732 - DNA, 1131 bp, synthetic construct
  misc_feature 1..1131: note = Description of Artificial Sequence: Synthetic coding sequence
  source 1..1131: mol_type = other DNA
atgtgggccgctgggtgtatcttggccgaaatgctcaccgggaggatgttgttcgcgggtgcacacgagctggaacaaatgcagctcatcttggaaaccattcctgtcatcagggaggaggacaaagatgagctgctgagggtcatgccaagtttcgtctccagcacatgggaggtcaagcgcccccttagaaaactcttacccgaagtgaactccgaggcaatcgattttcttgaaaaaattctaaccttcaacccaatggatcgcctgacagctgagatgggcctgcagcatccctatatgtctccctactcttgccctgaggacgagcctacaagccagcaccctttcagaatcgaggacgagattgatgatatcgtgctaatggctgccaatcagtcccaattgtctaactgggacacatgttcctctcgataccctgtttcactttccagtgatttggaatggaggccagacagatgccaagatgccagcgaagtccaaagggatccacgcgctggttcagcgcctctcgcagaggacgtccaggtggaccctagaaaagacagccattcaagctctgagcggttccttgagcaaagccattcatctatggagcgcgctttcgaggctgactatggaagaagctgtgactataaagtgggttctccctcttatctcgacaagctgttatggagagacaacaagccacaccactacagtgaacccaagttaatcctcgacctgtcacactggaaacaggctgccggagctccaccaaccgcgacaggattagccgataccggcgcccgcgaagatgagcctgcctcattgtttctggagattgctcagtgggtgaagtccactcaaggaggcccagaacacgcttctcctcccgcagacgatcccgagaggcggctgtccgcctctccccccggccggccagcccccgtggatggaggagcttccccacagtttgatttagacgttttcatctcaagggccctcaagctgtgcactaagccggaagatcttcccgacaataagctaggcgatctgaacggcgcctgtatccctgaacacccaggcgatctagttcaaaccgaagcattctctaaggaaaggtggtag

SEQ ID NO: 124733 - DNA, 2034 bp, synthetic construct
  misc_feature 1..2034: note = Description of Artificial Sequence: Synthetic coding sequence
  source 1..2034: mol_type = other DNA
atggagtctgatctgcaccagattatccattctagtcagcccctgacccttgagcatgtgcgatacttcttatatcagctcctgagagggctgaagtatatgcacagcgcccaagtgatccacagagatcttaagcctagcaacctgctggtgaacgaaaattgtgagctgaaaatcggggactttggcatggctagaggactctgcacctccccagcggagcatcagtacttcatgaccgagtatgtcgcgacacgctggtacagggcccctgagttgatgttaagtctccacgaatacacccaggccatcgacctttggtccgtcggttgtatcttcggggagatgctggcaagaagacaactcttcccagggaagaactacgtgcatcagttgcagttgatcatgatggtcttaggaactccatcgcctgctgttatccaggcggttggagctgaacgtgtgcgcgcttacatccaaagtctcccccctcggcagccagtgccatgggaaacggtctaccccggcgccgatagacaggccctttctctgctgggaaggatgttaagatttgagccaagtgccaggatttctgccgcagccgctctgcgccacccctttttagctaagtatcacgaccctgatgacgaacccgactgtgcacctccattcgatttcgctttcgatagggaggccctcacacgggagaggatcaaagaggcaatcgttgctgaaatagaggactttcacgcacggcgggaggggatcaggcagcagatcaggttccagcctagtctgcaacccgtggcttcggagcccgggtgcccggatgtcgagatgcctagcccttgggctccttccggagattgtgctatggagagcccaccacctgctcccccgccttgccctggcccagcccccgataccatagaccttaccctacagcctcctcctcccgtctcagagcctgcccctcccaaaaaggatggagctatcagcgacaatactaaggccgccctgaaggccgccctgctgaaaagcctgcggtcccgcctgcgagatggcccctctgcgccactagaggcaccagagccaaggaagcccgtcaccgcacaggaaaggcagagagagagagaggaaaaacggaggagacgccaggagcgagctaaggagagagaaaagcgccggcaggagcgtgaacggaaggagcgcggggccggagcctcaggtggcccaagcacagatccgctcgccggtttggtcctgagtgacaacgacaggtccctcttagagcgttggactcgtatggccaggcctgcagctccagctctcacctccgtgccagccccagcacctgcccccacacccacccctactcccgtacagccaactagtccaccacccgggccagtggcccagccaacggggcctcagcctcagagtgcaggaagcaccagcgggccagtgccccaaccggcttgtcctccccccggccccgctccacacccaacaggtcccccagggccaatccccgtgccggctccacctcagatagctaccagcacttcacttctcgccgcccagtcgttggtgcccccccctggactccctggctctagcacacctggcgtgctgccatatttcccgccggggcttccaccgcctgacgctgggggcgcgcctcagagcagtatgagcgagagcccagacgtgaatctggtcacccagcagctgagcaaaagccaggtggaagatccactgccgcctgtgttcagtgggacacctaagggaagtggggcgggatacggggtaggttttgacctagaggagttccttaatcagtcttttgacatgggcgtcgctgatggaccccaggacggacaggcggattcagcatcattgagcgcatctctgctagctgattggctggagggtcacggcatgaatcctgcagatatcgagtcactccagcgggagatccagatggatagtcctatgctgctcgctgacctgcctgacctgcaggacccatag

SEQ ID NO: 124734 - DNA, 2451 bp, synthetic construct
  misc_feature 1..2451: note = Description of Artificial Sequence: Synthetic coding sequence
  source 1..2451: mol_type = other DNA
atggcagagcctcttaaagaggaagacggagaggacgggtcagcagaacccccgggcccagtgaaagctgagccagcccataccgcggcctcggtggctgcaaagaaccttgcactgctgaaagctcggagctttgacgtaacatttgatgtgggggacgagtatgagattatcgagacgatcggaaacggggcctacggtgtggtgagtagtgcaagacgcaggctgactgggcagcaagtagccatcaaaaagattccaaatgctttcgatgtagtcaccaatgctaaacgaacactgcgcgagcttaaaatccttaaacactttaaacatgacaatattattgcaattaaagacattcttcgcccgacggttccttatggcgagtttaagtctgtctatgttgtcctagacctcatggaatcagacctgcatcagatcatccactcatcacaacccctcactcttgagcacgtgcgctacttcctgtatcagctcctgaggggactgaaatatatgcatagcgcacaggtgattcatcgggacctgaaaccctcaaacttgctggtgaacgaaaattgcgagctgaaaataggcgacttcgggatggctcggggcctctgtacatcccctgctgaacatcagtactttatgactgagtacgtcgccacccggtggtacagggcccccgagctgatgctatccctgcacgaatacacccaggcgatcgacctctggtccgtgggctgcatcttcggggaaatgcttgcgcggcgccaacttttcccgggcaagaattatgttcaccagctgcagctgatcatgatggtcttggggactccatcccccgctgtcatccaggccgtgggcgctgagagagtaagagcttacatccagagtctgccccccagacagcccgtgccgtgggaaactgtctaccctggagccgaccgccaagctttaagtttgctgggacgaatgctcaggttcgagccctctgcccggatctctgctgctgcagcactccgtcaccctttcctcgccaagtaccatgatcctgatgacgagccggactgcgcacctcctttcgacttcgcattcgatcgcgaggccttgacaagggagaggataaaagaggccattgtggccgagattgaggattttcacgcaaggcgagagggaattcggcagcagatcaggtttcagccaagcctgcaacccgtggcatcggagccagggtgcccggatgtagaaatgcccagcccatgggctccttctggtgactgtgctatggagtctcctccacctgctccgcctccctgtcccgggcccgctccagacaccatcgaccttacccttcagccccctcccccagtaagtgagccagcgccacccaaaaaggatggcgctatttcagataacaccaaggccgccctcaaagctgcgctgctcaagagcctccgcagccgtttacgggacgggccctcagcaccgctcgaggcccctgaacccaggaaaccagtgacagcccaggagcgacagagagaaagggaagaaaaaaggagaagaagacaggagcgagctaaggaaagagagaaaagaagacaagagcgagaacggaaagagcgtggagccggggcctcagggggcccaagtacggatcccttagccggtctcgtcctgagtgataacgatcgcagcttgctagagcggtggacacgcatggcacgacctgcggcgccagctctcacttcggtgcctgcccctgcaccagcacctacacctacacctactccagtgcagcccacctcccctccaccaggccccgtggctcagcctactggacctcaacctcagagcgctggcagcacctcgggtcccgtgccccagccagcctgcccacctccaggaccagcaccacacccgaccggtccacccggccctatcccagtgcccgcccccccgcagattgctacctccacatctctcttggccgcacagagcctggtcccacccccaggattgcctggctcaagcacgcccggagtgctgccatactttccccccggattacccccaccggatgctggaggcgcaccacagtcgtccatgtcggagtctcctgacgtgaaccttgtgacccagcagctctctaagagtcaggtggaggaccccctgcccccagtgttttcaggcacacccaaaggttccggcgccggctacggagtcggcttcgacctggaagagtttttaaatcagagtttcgatatgggcgtggcagatgggccccaagacggccaagcagacagcgctagcctcagcgctagcctgctggcggactggcttgaaggacacggaatgaaccccgcggacatcgaaagcctgcagcgcgaaatccagatggattctcccatgttactcgctgacctgccagatctgcaggacccttag

SEQ ID NO: 124735 - DNA, 2451 bp, synthetic construct
  misc_feature 1..2451: note = Description of Artificial Sequence: Synthetic coding sequence
  source 1..2451: mol_type = other DNA
atggccgagcctctcaaggaggaagacggtgaagacggcagcgctgagccacctggccccgtcaaggccgagccggcacatacggctgcgagcgtggccgctaagaatttggctcttctaaaagctcgatcctttgatgtgacattcgacgtcggggatgagtatgagatcatcgagacgattggaaacggcgcttatggagtggtgagcagcgctcggcgccgtttaaccggccagcaggtggcgattaaaaagatcccaaacgctttcgatgtggttaccaacgcaaagcgaacgttgagggaactgaaaatcctgaagcacttcaagcatgacaatatcatcgccatcaaggacatcttgagacctacagtcccctacggagagtttaagagtgtgtatgtcgtgttggatcttatggagagtgatctccaccaaatcatccactcctctcagccactaaccttggagcatgtcaggtatttcctttatcaattgctgagaggactgaaatacatgcatagtgcacaggtaattcaccgagatctcaaacctagcaaccttcttgtgaatgagaactgcgaactgaagatcggcgacttcgggatggctcgtggactctgtacaagcccagccgagcatcagtatttcatgaccgagtacgtggctacacgatggtaccgagcccctgagctgatgctgtccctccacgagtatacgcaagcaattgatctatggtctgtgggatgcatttttggagaaatgctggcaagacgtcagctcttccctggcaagaattacgtgcaccagctgcagctgataatgatggtactgggaacccccagcccggccgttattcaagccgttggagctgagagagtgagagcctatatccagagtcttccccccaggcaacccgtgccttgggagaccgtctatcccggggcagacaggcaagcactgtctcttctcgggaggatgctccgattcgagccttcggcaaggatctccgctgctgcggctctgcggcatccctttctagcaaagtaccatgaccctgacgatgagcctgactgtgcacccccttttgactttgcctttgatagagaggccctgacccgggaaaggattaaagaggctatcgtcgcagagattgaggatttccacgccaggagggaagggatccggcagcagatcaggtttcagccctcactccagcccgtggcatccgagcccggctgtcctgatgtggaaatgccatcaccctgggccccttcaggggactgtgctatggagtctccaccccccgctccccctccgtgccccggcccagcaccagacacgattgacctgaccctgcagcccccccccccggtctcggagcccgctcctcctaagaaggacggcgccattagtgataataccaaggccgccctgaaagctgcgcttttgaagtctctaaggagtcggctgcgcgatggtccctcagcccctttggaggcacctgagccgcggaagcccgtgaccgcacaggaacggcagagagaaagagaagagaagcggcgtcggcgacaggagagagccaaagagcgcgagaagaggagacaggaaagggaacggaaggagcgaggagccggcgcctcgggggggccaagcacagacccattagccgggctggtactaagcgataacgatcgttccttgctggagcgttggacacgcatggcgaggcctgctgctcctgcactgacatcagttcccgctccagcgccggcccccacacccacacccacacccgtacagcccaccagccctcctccgggccccgttgctcaacccacaggcccgcagccacagagcgctggaagtacctctggtcccgtgcctcagcctgcatgtccaccacccggcccggcaccgcatcctacaggtccgccaggtcccatcccggttccagcccccccccagatcgccacttctacctctctgctggccgcgcagtctttagtaccaccccctggactgcctggaagcagcacaccaggcgtcttgccatattttcctcctgggctccccccacccgatgccggcggcgcccctcagtctagcatgtccgaatctcctgatgtcaatctggtaactcagcaactatcaaaatcccaagtcgaggatcccctaccgccagtgtttagcggcacccccaaggggtccggcgcagggtatggagtgggttttgatttggaggagtttttgaaccagtcctttgacatgggagtggccgacggcccccaggatggccaggccgatagcgctagcctgtcagcgagccttctcgccgattggctagagggccatggcatgaaccccgcagacatcgagtcactgcaaagagagatccagatggactcccccatgctgctggccgacctccccgatctgcaggacccttag

SEQ ID NO: 124736 - DNA, 2451 bp, synthetic construct
  misc_feature 1..2451: note = Description of Artificial Sequence: Synthetic coding sequence
  source 1..2451: mol_type = other DNA
atggccgaacccctaaaagaagaggacggagaagacggtagcgccgagcctccagggcctgtgaaggcagagcccgcccacacggcagccagcgtggccgccaaaaacctcgctctgctgaaggcacggagttttgacgtaaccttcgacgtgggagacgagtatgagattatagaaacaattgggaatggagcctatggagttgtgtcttcagcgaggaggagattgactggccagcaggtggctatcaaaaagatccccaacgccttcgatgtagtcaccaacgcaaaacggaccctgcgggagctcaagatcctcaagcacttcaaacatgacaacatcatcgccataaaggacatcttgagacctaccgtgccatacggagagttcaagagcgtctatgtcgttctggatctgatggagtctgacttgcaccagataatccacagtagccagcctctgactctggagcatgtgagatattttctgtatcagttgctccgaggtctgaagtatatgcattctgcccaggtcattcacagagacctgaaaccatccaacctgctcgtgaatgagaactgcgagcttaaaatcggcgacttcggtatggcccgtggtttgtgtacaagcccagcagagcatcagtatttcatgactgagtacgtggctaccagatggtatcgagcacctgagcttatgctctcgcttcatgaatacacacaggctatcgacctgtggagcgtgggatgcattttcggagagatgctcgcgagaaggcagctctttccaggaaaaaactatgtgcaccaattgcagctgatcatgatggtgctgggaacccctagccccgcagtgattcaggctgtgggcgctgagagagttagggcctacatccagagtctccccccccggcaacccgttccctgggaaacagtttatccaggcgctgatagacaggcactgtcactcctgggacgaatgcttagattcgaaccttccgcccggatcagtgccgcagctgcattgcgtcacccatttctggccaaatatcacgatcccgatgatgaacctgactgcgcccccccctttgattttgcatttgatcgagaggctttaaccagagaacggattaaggaggctatagtggccgagattgaggacttccacgctcgcagagagggcatcagacagcagatcagatttcagccttccctgcagcccgtcgcgtctgagcctggatgtcctgatgttgagatgccgtcaccttgggctccctctggagactgcgctatggaatctccgcccccggctccaccaccatgtcctggaccggctccagacaccatcgatttaaccctccagccaccgccgccagtgagcgaacccgctccccccaaaaaagatggggctatctcggacaacacaaaagcggctcttaaggccgccctcctcaagtccttgaggtccagattgagagatggaccgagcgctcccctggaagctcccgagccccgcaagcctgttaccgcccaggagagacagcgggaaagggaggagaagcgccgacgaaggcaggagagggctaaggaacgcgagaagcgtagacaggagagagaacgaaaggagaggggggcaggggccagcggcggcccatccacagatccgctggcgggcttggtcctcagcgacaacgacaggagtttgttggagcgttggacacgaatggcccgccccgcagccccagccctgacctctgtgccggcccccgcaccggctcccacacccacccccacacccgttcagcccacgtctcctcctcccgggcccgtcgcccaaccaacaggccctcagcctcagtcagcaggcagcacctccggtcccgtccctcagcctgcgtgcccgccccctggtcctgccccacaccccacaggccctccgggaccgatcccggttcccgcccctccccaaatcgcaaccagcacttcccttctggccgcccaatctctggtgcccccccccggcctccccggttcttcaaccccaggtgtcctgccatacttcccgccgggactgccacctccagatgctggcggggctccacagtcctccatgagcgagtctcctgatgtgaacttagtgactcagcagctgtccaagtctcaagtggaggaccctctgccaccagtttttagtgggaccccaaaaggtagtggggccggttatggggtgggttttgacctcgaagaattcctcaaccagagctttgatatgggagtggccgatgggccacaagacgggcaggctgactcggcctcactgagtgcgagtcttctggcagactggctcgaaggccatggtatgaaccctgctgatatagagagcctccagcgcgaaattcagatggactctccgatgctgctagctgatctcccagacctccaggacccatag

SEQ ID NO: 124737 - DNA, 726 bp, synthetic construct
  misc_feature 1..726: note = Description of Artificial Sequence: Synthetic coding sequence
  source 1..726: mol_type = other DNA
atggcagagcccctgaaggaggaggacggagaggacggttctgccgaacccccaggccctgtcaaggcagaaccggcccacaccgcagcaagtgtcgccgcaaagaatttggcacttttgaaagctagaagctttgacgtgacatttgatgttggagatgaatatgagattattgagacaatcgggaacggggcttacggagtggtaagtagcgcccgccgaagactgaccggccaacaggtcgctattaaaaaaatccccaatgcttttgatgttgtcacgaacgcaaaaagaacactgcgagagctgaaaattctgaaacactttaagcacgacaacatcatcgcaatcaaggacatcctgagaccaacggtgccatatggcgaattcaagagcgtgtacgttgtgcttgacctgatggagtctgacctccaccaaattattcactccagccagcctttaacccttgagcacgtgcgatacttcctgtaccagctgctgaggggattaaagtacatgcactccgctcaggtgatacacagggatctgaaaccatccaacctactggtgaatgaaaactgtgagctaaagattggtgactttggaatggcaaggggcctgtgtacatctcctgccgaacaccaatactttatgactgaatatgttgccactagatggtaccgcgcccctgagctcatgctctccctacatgaatacacccaatag

SEQ ID NO: 124738 - DNA, 2136 bp, synthetic construct
  misc_feature 1..2136: note = Description of Artificial Sequence: Synthetic coding sequence
  source 1..2136: mol_type = other DNA
atggctgaaagagagagcggaggactcggcggcggcgccgcttctccccccgccgcctctcccttccttggtctgcatatagcctctccgcccaatttcaggttgacacatgacataagtttagaggagttcgaagatgaggatttaagtgagatcaccgatgagtgcggaatctctcttcaatgcaaggataccttgagtctgcgccctccgcgcgcgggactccttagtgccggtggcgggggtgcagggagcaggctgcaggctgagatgcttcagatggacctgattgacgcgaccggtgacaccccgggcgcagaagacgacgaagaggacgacgatgaagagagggcagcgagacgtccgggggccggtccaccgaaagcagaatcgggtcaggagcccgctagtcgaggccaaggccagtcacaaggccagagccaaggccccggatccggggatacctaccgccccaagaggccaacaaccttaaacctctttccacaagtgccgagaagccaggacactctgaacaataatagtctggggaaaaagcatagctggcaggaccgggtgagcagatcatcctctccattgaagaccggagagcaaaccccaccccacgagcacatctgcttgtcggacgaacttcctccccaaagcggacctgctcctactactgacagggggacatcaaccgactcaccgtgtaggcgcagcacagccacccagatggctcccccaggtggacccccagccgctccacctggaggaagagggcacagtcacagggaccgcatccactaccaagccgatgtgcggctggaagccaccgaagagatctatctgaccccagtgcaacggccaccagatgccgcagaaccgacaagcgcattccttccgcctacagagagccggatgagcgtcagttcggaccccgaccctgctgcctatccttctacagccggaaggccacacccatctatcagcgaggaggaagaaggctttgattgcctcagctctccagaacgcgctgagcccccgggcggaggatggcggggaagtctgggcgaacccccgccccccccccgggcctctctctctagtgatacttccgccctgtcgtacgatagcgtgaagtatacactggtggtcgatgaacacgcccagctggagctcgttagcctgagaccttgttttggagactattcagatgagtcagacagtgccacagtgtacgacaattgcgcgagcgtaagctcaccttatgagtccgcaatcggcgaagagtatgaggaagctccgcgccctcaacctcctgcctgcctcagtgaggacagtaccccggatgagccagacgtccacttttccaaaaagttcctcaacgtgttcatgagcgggagatcccgctccagttccgctgagtcctttggtctgttcagctgcatcattaacggtgaggaacaggaacagacacatagagccatatttcggtttgtgcctagacacgaggacgagcttgaactggaggtggatgatccacttctggtggaactgcaagccgaggattactggtatgaggcgtacaatatgagaacaggtgctcgcggggtgtttcctgcttattatgccattgaagtcactaaggagcccgagcacatggctgctctggccaaaaacagcgattgggtggaccagttcagagttaagttcttaggatcggtgcaggtcccctaccataaaggaaatgacgtcctgtgcgccgccatgcagaagatagcaactacgagacgtttaacagtgcattttaaccccccatctagctgcgtactggaaatctcggtgagaggagtgaagattggagtgaaagcagacgactctcaggaagctaagggcaataagtgtagccacttcttccagctgaagaacataagcttttgcgggtatcatcccaaaaacaataagtattttgggttcattaccaagcaccccgcagatcaccgatttgcctgtcatgtgttcgtttctgaagactcaacaaaagcactcgcggagtccgtgggcagagcattccagcagttctataagcagttcgttgagtatacatgccccactgaagacatctatctggaatag

SEQ ID NO: 124739 - DNA, 1797 bp, synthetic construct
  misc_feature 1..1797: note = Description of Artificial Sequence: Synthetic coding sequence
  source 1..1797: mol_type = other DNA
atgttacccgattttccaagtccatccacttgggcacctgggttgcttcttcccagtggcccggccctattaagccctagcgtgcttcaggactctctctcattgggccggtccgaacagccacacccaatatgtagctttcaggacgactttcaagaattcgagatgattgatgataacgaagaggaggacgatgaagacgaggaagaagaggaggaggaggaggaaggtgatggtgagggtcaagagggcggagatcccgggtctgaggccccagcacccggcccccttatcccgagcccgagcgtggaagaaccacacaaacaccggcctactacactgcgcttaaccaccctcggagctcaggactcccaggaccctgaggcagcagccggccctgggggggtggaactcgtcgatatggaaaccttgaatcccacccgggatactatcaccccattgtgggcagcaccaggtcgggccgctcgaccaggcagggcgtgttctgccgcatgcagtgaggaagaggatgaggaagatgacgaggaggaagaggatgcagaagactcggccggatctcccgggggccgcggcactgggccctcggcccctcgtgatgcctcccttgtatatgacgcagttaagtacacactggtggtcgacgagcatacgcaacttgaacttgtgtcactccggagatgtgccggcctaggccatgattcagaagaagatagtggtggcgaggctagcgaagaagaggcaggtgcggcactgctcggcggcggacaggtctcaggggataccagtccggactccccagatctcacatttagcaaaaagttcttgaatgtttttgtcaactcgacaagccggtcctcttccacagaatcctttggcctgtttagctgtctggtgaatggtgaagagcgcgaacagacacaccgggcagtctttaggttcatccctagacatcccgatgaactcgaactagacgtcgatgacccagttctggtcgaagccgaggaagatgatttctggttccgcggcttcaacatgcgcacaggagaacgaggcgtgtttcccgccttctacgcccacgcggttccaggaccagccaaagaccttctgggaagcaaaagatctccctgctgggtggagcgctttgatgttcagtttctaggatctgtggaagtgccatgtcatcagggcaacggcatcttatgtgccgcaatgcagaagattgctacagcacggaagctcactgtgcatcttcggccacctgccagttgcgatctggaaatttccctgcggggggtcaaacttagtctctcaggcgggggccccgagttccagcgctgtagccatttctttcaaatgaaaaacattagcttttgcggctgccaccccaggaattcttgcgaggctccccagggcgccgcatttcagtgggagcgcggggtggatcgcaaacgagtcctccaaactcggggcaatgtgcagccacacctcggcgcaggccagggagccgcactgaacagggctactgaaggaagctctacgggctccgagaaaggcgaatggaccccactggttatcatggagcttactcaatccgtaaacagctgttacttcgggttcattaccaagcaccctttgctgagcagattcgcttgccacgtctttgtcagccaggagtcaatgaggccggtagcccaatccgtgggccgggctttcttagagtattatcaagagcatctggcctatgcctgccctacagaggacatctatctggagtag

SEQ ID NO: 124740 - DNA, 2472 bp, synthetic construct
  misc_feature 1..2472: note = Description of Artificial Sequence: Synthetic coding sequence
  source 1..2472: mol_type = other DNA
atggccgatcgcgcggaaatgtttagtttgtcaacctttcattctttgagcccacctggatgccgccctccacaggacatcagcctggaggaattcgatgacgaagacctgtctgagattaccgacgattgcgggctaggactaagctatgactccgaccattgcgagaaggattccctgagcttgggcaggagtgagcagccacatccaatatgtagcttccaagatgacttccaggagttcgagatgatcgatgacaatgaagaggaagatgatgaagatgaggaggaggaagaggaagaggaagagggagacggcgaaggacaggaggggggcgacccaggatctgaggcaccagcgcccgggcccctcatcccctccccctcggtggaggagccccacaagcaccggccaacaacactcaggctgaccactctcggggctcaagattcacttaacaacaacggtgggttcgacctggtcaggcccgccagttggcaggagaccgccctgtgctcacccgctcccgaggcccttagagagctgccaggccccctgcccgccacagacaccggacccggcggagctcagagtcccgtgaggcccggctgcgattgtgaaggaaatcggccagccgaaccaccagccccgggcggaacatccccttccagcgaccccgggatcgaggccgatctgaggtcaaggtcctcaggcggaagagggggcaggaggagcagtcaggagctgtcatccccaggctctgattccgaggacgcaggtggccgactgggacgcatgatcagtagcatctctgagactgagctagagttgtcgtccgacgggggctcctcatctagtggccggtcttcgcacctcaccaactcgatcgaggaagccagttcaccagccagcgagcctgaacccccacgcgaacctccaaggagaccagcttttctgcctgtgggacccgatgatacaaacagtgagtacgaatctggatctgaatccgagcctgacctatcggaagacgccgacagtccgtggctcctcagtaatctggtatctcgcatgattagcgagggcagctcgccgatcagatgtccgggacagtgtctgtctcctgcaccaagacctcccggcgaaccggtgtcgcctgccggcggggccgcacaagactctcaggatcccgaggctgctgctggaccaggtggagtcgagcttgttgacatggagactctgtgcgccccccccccccccgcacctgcagccccccggccaggacctgcccagcctggcccttgcctattcctaagcaatccaaccagagacacaatcacgcccctttgggccgctcctggtcgagctgccaggcccgggcgggcctgctctgccgcctgcagcgaagaggaggatgaggaggacgacgaagaagaagaggacgcagaagatagcgcaggctcccctggcggccgaggcaccggtccctcggcaccacgcgacgcatctctcgtgtatgatgccgttaaatatactctcgtagtggatgaacatacccagctggagctggtcagccttcgccgatgcgccgggctcggacacgattcagaggaggatagcggaggagaggccagcgaagaggaggccggagccgcgttgctcggcggcggccaggtctccggggatacctctccagattctcctgatttgactttttccaagaaattcctgaatgtctttgtgaacagcacctcaagatcttcctctacagagtcctttggtctgttcagctgcttggttaatggagaggagagggagcagacacacagagctgtgtttcgattcatcccccgacaccctgatgagttggagctggatgtggacgacccagtgttagtggaggctgaagaggacgatttttggttccgtggattcaacatgcggaccggagagcgaggggtcttccccgctttctatgcccatgctgtgcctgggcctgctaaagatctactcggctcgaagcgctctccttgttgggtagaacgcttcgacgtgcagttcttgggtagtgtagaggtgccatgccatcagggaaatggtatcctttgcgccgccatgcagaagattgccaccgcacgaaagttaacagtccacttacggcctccggcctcatgtgacctggagatatcacttcggggcgtcaagctctctttaagcggcggggggcccgaattccaacgctgcagtcacttcttccagatgaagaatatttccttctgcggctgtcaccctcggaatagctgttatttcgggttcatcactaaacatccgctgctctccagattcgcctgtcacgtgttcgtcagtcaggagtcaatgcgccctgttgctcaatcagtgggcagggccttcctggagtattaccaggagcatcttgcgtatgcatgtccgacagaggacatttacctggagtag

SEQ ID NO: 124741 - DNA, 1335 bp, synthetic construct
  misc_feature 1..1335: note = Description of Artificial Sequence: Synthetic coding sequence
  source 1..1335: mol_type = other DNA
atggctgatagggcggagatgttcagcctctcaacatttcattcccttagcccccctggctgtcgccctccgcaagacatcagcctggaagaatttgacgatgaagatcttagcgagataaccgacgattgtggtctggggttgtcatacgattctgaccattgcgagaaggacagtctgtccctcggtcgttccgaacagccgcacccgatttgctcttttcaggacgacttccaagaatttgagatgatcgatgataacgaggaggaagaggacgaggaagacgatgaggaagaggaagatgccgaagacagcgcaggaagccccggcgggaggggtacaggcccctcagcgcctagggacgcctcattggtctatgacgctgtgaagtacaccttggtggtcgatgagcatacacaactggagcttgtctctctgcgacgttgcgcaggcttaggtcacgattctgaggaggacagcggcggggaagccagtgaggaggaggcgggagcggctcttctgggaggagggcaagtctccggagacactagcccagattcacctgatttaacattcagtaaaaagttcctaaacgtgttcgtcaactcaaccagtcggagctcatccaccgaatccttcgggctattctcatgtctggtgaatggggaagaacgggagcagacccaccgagctgtgttcagatttatcccacgccatcccgatgagctagaactcgacgtggacgatcccgtgctagtggaggccgaggaggacgacttttggtttaggggcttcaatatgagaaccggggaacgaggcgtctttccggccttctatgctcatgccgtgccaggtccagccaaggatctgcttggctcaaagaggagcccatgctgggtggagcgcttcgacgttcagtttctgggctccgttgaagtaccatgccaccagggcaacggcatactttgcgcagccatgcagaaaatagcaacagcaagaaaactgacagtgcatctccgcccgcctgctagctgcgatttggagatttctctgcgaggcgttaaactgagcctgtccggaggcggccctgaattccaaaggtgctcacattttttccagatgaagaacatctcattctgcggatgtcaccccagaaattcgtgttacttcggatttatcaccaagcacccactcctgagcaggtttgcgtgtcacgtgttcgtttcccaggaatcaatgaggcccgttgcccagagcgtaggaagagcattcctcgagtattaccaggaacatttagcctacgcctgccccacagaggatatttatcttgagtag

SEQ ID NO: 124742 - DNA, 1677 bp, synthetic construct
  misc_feature 1..1677: note = Description of Artificial Sequence: Synthetic coding sequence
  source 1..1677: mol_type = other DNA
atgatatccagcatctctgagacagagcttgaactcagtagtgatgggggcagcagcagctccggacgctctagccacctgacaaacagcattgaggaagccagctcccccgcctctgaacctgagcctcctcgggaaccccctagacggccagcattcctgccagtggggcctgacgacaccaatagcgaatatgagtcaggttctgagagcgaaccagacctgtctgaggacgccgattccccatggctactcagcaacttggtctcgagaatgatctccgaagggtcttcgcctatcagatgtcctggacaatgtctgagtcccgccccacggccgcccggtgagcccgtaagtcccgctggaggtgcggcccaggactcgcaggacccggaagctgctgctggtccaggaggagtggaacttgtggacatggagaccctgtgtgctccaccccccccagctccagcggcacctcgcccaggccctgctcaaccaggaccttgtctgttcttgtccaacccaacaagggataccataactcccttatgggccgctccaggcagggcagcaaggccagggcgtgcgtgttctgccgcttgtagtgaagaagaggatgaagaagacgacgaagaagaggaggacgctgaggactcagctgggtccccggggggacgtggaaccgggccctctgctcccagggatgcctctcttgtatatgatgccgttaagtataccctcgtggtggatgagcacacccagctggagctggtctctttgagaagatgcgcagggctggggcacgactcagaggaggactctggcggcgaggcctctgaggaagaggccggggctgctctgctgggcgggggccaggtctccggggacacatcacctgatagtcctgatctcacattctccaagaagttcctgaatgttttcgtgaactcaactagccggagctctagcacggagtctttcggactgttttcctgcctggtcaatggcgaggaacgcgaacaaacccatagagctgtatttagatttattcccagacaccctgatgagctcgagctcgatgtcgatgaccccgtactggtggaagccgaggaggatgacttctggttcaggggttttaatatgcgcaccggagagcgaggggtctttccagcattctacgcacatgccgtgcccggccccgccaaagaccttctcggctctaagaggtcgccatgctgggttgagcgctttgacgtgcagttcttggggtccgtcgaggtgccttgccaccaaggtaacggcattttgtgcgccgcaatgcagaaaatagccacagcccgcaagctgaccgtgcacctgcggccacccgccagttgcgacctggagatctctttacggggcgtcaagctctccctcagtgggggcggcccagagtttcaacgctgtagccatttctttcagatgaaaaacataagtttttgcggatgccatccgcgcaattcttgctactttgggtttattaccaagcaccctctcctctcaagattcgcttgtcacgtctttgtttcacaggaatctatgcgccccgtggcacaatccgtgggaagagccttcctggagtactatcaggaacacctcgcatatgcatgccctacagaggatatctatctggagtag

SEQ ID NO: 124743 - DNA, 1677 bp, synthetic construct
  misc_feature 1..1677: note = Description of Artificial Sequence: Synthetic coding sequence
  source 1..1677: mol_type = other DNA
atgatatcatcaatctccgagaccgagcttgagctgagcagcgacggcggatcctcatcaagcggacggtcttctcacctgaccaatagcatcgaagaggctagcagcccagcttctgaaccagagcccccaagagaacccccgagacgtcctgctttcctgcccgttggacctgacgatacgaactctgagtacgaaagtggatctgaaagtgagcccgacctgtctgaggatgcagacagcccttggctcttatccaaccttgtttcccggatgatctccgaggggagcagcccaattcggtgcccagggcagtgcctttctccagctcccaggccacccggcgaacccgtgtcgcctgcgggcggagcggcccaggatagccaggatccggaagccgctgccggaccagggggagtggagttggtcgacatggagactctgtgcgcccctcccccccctgccccagccgccccaaggccgggcccagcccagcccggcccttgcctcttcttatctaacccgaccagagatactattacacctctctgggcagcgcccggcagagccgcacggcctggccgagcctgtagcgccgcctgctcagaggaggaggatgaggaagatgatgaagaagaagaggacgctgaagatagtgccggaagccctggcggtcggggaacagggccttccgctcctagagatgccagcctggtgtatgacgctgttaagtacactttagtcgttgatgaacatacacagcttgaactcgtatccttgcggagatgcgccggcctcgggcacgactctgaggaggatagcggaggcgaggcaagtgaagaagaagcaggcgctgctctcctgggtggcggccaggtgtctggggacacgagtcctgacagtcccgaccttactttcagtaaaaaatttctcaacgtgttcgtaaacagcacttctcgatcttctagtactgaaagtttcggcctctttagctgcttggtgaacggggaggagcgggaacagacccaccgcgccgtattcagattcatacccaggcacccagacgagctggaattggacgtcgacgatcctgtactggtggaggcggaggaagatgacttttggtttcgtggattcaatatgcgcacaggtgagcggggcgtgtttccagcattctatgctcatgccgtgccgggtccagctaaagatctgctaggaagtaaacgcagtccctgctgggtcgagaggttcgacgtgcagtttctgggttcagttgaggttccatgccaccaggggaatggcatcctttgtgccgctatgcagaaaattgcaacggcaagaaagctcaccgtgcacctgcggccccctgcttcctgcgacctggaaatcagcctacgcggcgtaaagttgtcgcttagcggcggtggcccagaattccagagatgcagtcacttctttcagatgaagaacatatctttttgtggttgtcacccccgtaacagctgttacttcggattcatcaccaaacatccgctcctgagtcgatttgcctgccatgtgttcgtttcacaggagagcatgagaccagtggctcagtctgtgggcagagccttcctggaatattatcaggaacacttggcatacgcctgcccgacggaagacatatacctggagtag

SEQ ID NO: 124744 - DNA, 1641 bp, synthetic construct
  misc_feature 1..1641: note = Description of Artificial Sequence: Synthetic coding sequence
  source 1..1641: mol_type = other DNA
atggctgacagggccgaaatgtttagtctttcaaccttccattcgttgtctccccccggctgccggccaccacaggacatttccctcgaggagtttgacgacgaagacctgtcagagattacagacgattgtggacttggcctgtcatacgattccgaccactgcgaaaaagattctctcagccttggtcgaagtgaacagccacaccccatctgcagcttccaggatgacttccaggagtttgaaatgatagacgataatgaagaagaggatgatgaggacgaggaggaggaagaagaggaagaggaaggcgacggtgagggacaagagggcggcgatcccggttccgaagcacctgcaccgggtccactaattcctagtcccagtgtcgaagagccgcataaacacagaccgactaccctgcgactgaccacactcggggctcaagacagcctgaacaataacggggggttcgacctggtcaggcccgctagctggcaggagaccgccttatgcagccctgctcctgaggccctgagagagctgccaggcccacttcccgctacagatacaggccccgggggggctcaaagcccagttaggcccgggtgcgactgtgagggcaaccggcccgctgaacctccagcacctgggggaacctcaccctcatccgaccccggcatcgaggctgatctgcgatctcgatctagcggaggtaggggagggcgacgaagctcacaagagctgtcctctcctggatcagactccgaagacgccgggggccgactgggacggatgatctcatctatttcagagactgagctcgaactctcctccgacgggggtagttcatcctcaggacggtcatctcatctaaccttcagcaagaagttcctgaacgtgttcgttaattcaacgagcaggtcgtctagcacggagagctttggtctgttctcttgcttagttaatggtgaggaacgcgaacaaactcatcgggctgtgttccgctttattccacgacaccccgatgagttggaactagatgtcgatgatcccgtcttggtggaggccgaggaagacgacttctggtttcggggatttaacatgaggactggtgagaggggcgtgtttcctgctttttacgctcacgccgtgcccggaccagctaaagacctgctcggctctaaaagatctccctgctgggtagagcgctttgacgttcaattccttgggagtgttgaagtgccatgccatcagggtaatggaatactgtgtgcggccatgcagaagatcgcaaccgcaaggaaacttacagtacatctgcgacccccagcctcctgcgacctggaaatcagcttaagaggcgtcaaactctcgctatcaggcgggggcccagaattccagcgttgttcacattttttccagatgaagaatatttccttttgtggctgccaccccagaaatagctgttactttggattcattaccaaacaccctcttttgtccaggttcgcttgccatgtatttgtatcacaggagtcaatgagacctgtggcccagtcggtgggccgggcgtttctcgaatattatcaagagcacttagcttacgcatgccctaccgaggatatttatctggagtag

SEQ ID NO: 124745 - DNA, 1149 bp, synthetic construct
  misc_feature 1..1149: note = Description of Artificial Sequence: Synthetic coding sequence
  source 1..1149: mol_type = other DNA
atgtctgatagtaagtgcgatagtcagttctattccgtccaggttgccgactccacctttacagtcttgaagcgctatcagcaactcaagccaatcggcagtggcgctcaaggaatagtatgtgccgcatttgataccgttctggggataaacgttgcggtcaagaagcttagcaggccattccaaaatcagacccatgcaaagcgcgcttacagagagttggtgttgttaaagtgcgtgaatcacaaaaacatcatctctctattgaacgtattcaccccgcagaaaacgctggaagaattccaagacgtgtaccttgtgatggagctcatggacgctaacctatgccaggtcattcatatggagctggatcatgagaggatgtcgtacctgctgtaccagatgctttgcgggatcaaacatctccactccgccggaattattcaccgggatctgaaaccttcgaacattgtggtcaagagcgactgtacgcttaagatactggactttggactggcaaggacagcctgcaccaattttatgatgaccccctacgtggtgacaaggtattatcgggcccccgaggtgatactgggcatggggtacaaggagaacgttgacatctggagcgtcggatgtatcatggctgagatggttcttcacaaagtcctctttcccggacgggactatatcgaccagtggaataaggtgatcgagcagctgggaactccatctgcagaattcatgaagaaattgcagccaacagtgagaaactacgttgaaaaccgcccaaagtaccctggtatcaagtttgaggaactgttcccagactggattttcccgagtgagagcgaacgggataaaattaaaactagtcaggctcgggacctcctctcgaaaatgctggtcatcgacccggataagcgcatttcggtggatgaggccctgaggcatccatatatcacagtgtggtacgatcccgctgaagcggaagcccccccaccacagatctatgacgcacaacttgaggaacgggaacacgccattgaagagtggaaggagctaatctataaagaagttatggattgggaagagagatctaaaaatggggtcgtgaaagaccagccaagcgcccaaatgcagcagtag

SEQ ID NO: 124746 - DNA, 1149 bp, synthetic construct
  misc_feature 1..1149: note = Description of Artificial Sequence: Synthetic coding sequence
  source 1..1149: mol_type = other DNA
atgtccgactctaaatgtgatagccagttctacagcgtacaggtggcagacagcacctttacggttttgaagcgttatcagcagctcaaaccgatcgggtccggtgctcagggcattgtgtgcgcagcatttgatactgtgctcggcattaacgtagccgtgaagaagctttccagaccattccagaatcaaacacacgccaagagggcatatagagagctggtcctccttaagtgtgtgaaccacaaaaatataatttcccttctgaacgttttcaccccacaaaagacccttgaagaattccaggatgtgtacctcgtgatggagctgatggatgctaacctatgtcaggttattcacatggagctggaccacgagaggatgtcctacctgctgtaccagatgctctgtggaatcaaacatctacattccgcgggaattattcatcgcgatctgaaacctagcaatatagttgtgaaatctgattgcaccctgaaaattctggactttgggctcgccaggactgcctgcacaaattttatgatgacaccttacgtcgtgacgcgttactaccgcgcacccgaggtgatattgggcatgggatacaaggaaaatgtggatatctggtccgtgggatgtatcatgggggaattggtaaaaggatgcgtgatcttccaagggaccgaccatatagaccagtggaacaaggtgatcgaacagctagggacccctagcgccgaatttatgaagaaattacagccgacagtgagaaattacgtggagaaccgacccaagtatcctgggattaagttcgaggaactttttcccgactggattttcccttctgaatctgaacgggacaaaattaagaccagccaagcccgggacctgctatctaaaatgctcgttatcgatcctgacaagcgaatttcagtggatgaggccttgagacacccctatataacggtgtggtacgatcctgctgaagcagaagctcccccaccacagatttacgatgcgcagctggaggaaagggagcacgctatcgaagaatggaaggagttaatctacaaggaggtcatggactgggaggaacggtctaagaatggggtggttaaagatcagccaagcgcacagatgcagcagtag

SEQ ID NO: 124747 - DNA, 375 bp, synthetic construct
  misc_feature 1..375: note = Description of Artificial Sequence: Synthetic coding sequence
  source 1..375: mol_type = other DNA
atgtcagacagcaagtgcgactcccaattctatagcgtgcaagtggccgatagtacctttacagtcctgaagagataccagcaactcaaacccattggatccggagctcagggcatcgtttggcgccatcactgttctgctctcccattcataggtcgcatgcgcccggtttctgtaattgtgactccttggattaatcaggaggggatgctgtgcgagggcctcgggtggccaagtttgccatggtgtctcacctcaaccgtgtgtcctgcccagaatgttaggattgtttccctcactctcaacgtatccctgctgcacggaaagaccgtaagccgacggtccatcactggacagctcaaatgctgcatctag

SEQ ID NO: 124748 - DNA, 729 bp, synthetic construct
  misc_feature 1..729: note = Description of Artificial Sequence: Synthetic coding sequence
  source 1..729: mol_type = other DNA
atgtcagatagcaagtgcgactcgcagttttattctgtgcaggtcgccgactcgacttttactgtgcttaagcgctatcaacagctcaagccgattgggtcgggcgcccagggcattgtgtgtgccgccttcgacacggtattaggcatcaatgtggccgtgaaaaagctgagcaggccttttcagaatcagacccacgctaaacgggcctacagagaattggtattactcaagtgcgttaatcacaagaatatcatttccttgctcaacgtgtttactcctcaaaagacactggaggaatttcaggatgtgtatttggtgatggagttgatggacgctaacctgtgccaagtgattcacatggaactggaccatgaaaggatgagttacctgttgtatcagatgttgtgtggtatcaaacaccttcactcagccgggatcatccaccgagacttgaagccatctaatattgtagtgaagagcgattgtaccttgaagatccttgactttggtctagccaggacagcctgcactaatttcatgatgacaccatacgtggtgaccagatattaccgagctcccgaggtgatcctggggatgggatacaaagagaatgtagatatctggtcggtaggctgcattatgggggaactggtcaaaggatgcgtaatttttcaaggtaccgataggattctgccaagggatctgggccccgcgatgctgtcatag

SEQ ID NO: 124749 - DNA, 1275 bp, synthetic construct
  misc_feature 1..1275: note = Description of Artificial Sequence: Synthetic coding sequence
  source 1..1275: mol_type = other DNA
atgtcagacagcaaatgtgactcacaattctattcggtgcaggtggctgattctacctttacggtgttgaaaaggtaccagcaattgaagcccattggttctggggcgcagggcattgtctgtgcggccttcgacacggtattaggaatcaacgtcgcggtcaaaaagctctccaggcctttccagaaccaaacacacgctaaaagggcgtaccgggagctggttttactcaaatgcgtgaaccacaagaacataatctcactcttaaatgttttcacacctcaaaagaccctcgaggaattccaagatgtgtacctggtaatggagctgatggatgccaacttgtgtcaggttatccatatggaattagatcacgaaaggatgtcctacctgctttaccagatgctgtgtggcattaagcatttacattccgcaggcatcatccaccgagacctgaagccgtccaatatagtcgtgaaatccgactgcactctgaaaatccttgatttcgggctcgctaggaccgcttgcactaattttatgatgacaccctacgttgtgacacggtactatagagccccggaagtgatcctgggaatggggtacaaggagaacgtggatatctggagtgtgggctgcatcatgggcgagctggtgaaaggatgcgtcattttccaaggtacagaccatatcgaccaatggaataaggttatcgaacagctcggtacgcccagtgcggaatttatgaaaaagctccagccaaccgtaaggaattacgtggagaaccgccctaaatatcccggcatcaaattcgaagaactttttcctgattggatctttccaagcgaatctgaacgggataaaatcaaaacttcccaagccagggatctcctgagcaaaatgctggtcattgatccagacaagaggatttccgtggacgaggcccttcgacacccatacattacagtctggtatgatcccgcagaagccgaggccccacccccccagatctacgatgctcagctcgaagaaagggagcacgccatcgaggaatggaaagagttgatctataaagaggtcatggactgggaggagcggtccaaaaatggggtggtcaaggatcagccttccgacgccgccgtcagtagcaatgcaacgccgagccagagcagttccattaatgacataagcagcatgtcgactgaacagaccctggccagcgataccgactcaagcctggacgctagcacgggcccactcgagggttgccgctag

SEQ ID NO: 124750 - DNA, 1275 bp, synthetic construct
  misc_feature 1..1275: note = Description of Artificial Sequence: Synthetic coding sequence
  source 1..1275: mol_type = other DNA
atgtccgattcaaagtgcgacagccagttttattccgtccaagtggccgatagcacatttaccgtcctgaaacgttaccagcagttgaaacccattggttctggcgcccagggcattgtgtgcgccgcctttgacaccgtcctggggatcaacgtcgccgtgaaaaaactgtcaaggcctttccaaaaccaaacgcatgccaagagggcgtaccgggagctcgtccttcttaaatgcgtgaaccataaaaacatcatttctctgttaaacgtgtttacaccgcagaaaacactagaagaattccaagatgtgtatctggtcatggaattgatggacgcaaacctctgccaggtgattcatatggaactcgaccatgaaagaatgtcgtacctactatatcaaatgctgtgcggcataaaacacttgcactcggccggaatcattcaccgcgacctgaagccttccaacatcgtggtaaaatctgactgcaccttaaagatactcgacttcggactggcacgcacggcctgtaccaacttcatgatgaccccgtatgtcgtgacacggtattaccgtgctcctgaagtgattctcgggatgggatataaagaaaatgtagacatctggagtgttgggtgtattatggcagagatggtcctgcacaaggtgttgtttccgggcagagactacatcgaccagtggaataaagtaatcgagcagttgggaaccccatcggcagagttcatgaaaaaacttcagccaactgtgaggaactatgtggagaacagaccaaaatatccaggtattaaattcgaggagttgttccccgattggatctttccctccgaaagcgagagagataagattaaaacttcacaagccagggacctcctgtcgaagatgctcgtaatcgaccctgacaagcgtatttcagtcgatgaggctttaagacatccgtacattacggtttggtacgatcctgcagaagccgaggctccaccaccacagatatatgacgcgcagcttgaggaacgcgaacatgcaatcgaggaatggaaggaactaatctataaggaagtgatggactgggaagagagatcaaagaacggagttgtgaaggaccagcctagtgatgccgctgtttcgtccaacgctactccctctcaatctagttcaatcaacgacatttccagcatgtctactgagcagactttggcgtcagataccgactcttccctggatgcttctacaggtccgttggagggttgccggtag

SEQ ID NO: 124751 - DNA, 315 bp, synthetic construct
  misc_feature 1..315: note = Description of Artificial Sequence: Synthetic coding sequence
  source 1..315: mol_type = other DNA
atgtctgacagcaagtgcgactcccagttttactcagtgcaggtggccgacagcacgtttaccgtcctgaagcggtaccaacaactgaagcctatcggctctggcgcccagggtatcgtctgcgccgcctttgatactgtcttaggcatcaacgtcgccgtcaagaagttgagccggccttttcagaatcagactcacgccaagagagcctaccgggagttggtgcttctgaagtgcgttaatcacaagaatatcatcagcttgcttaatgtctttacccctcagaaaactttggaggagtttcaggatgtttag

SEQ ID NO: 124752 - DNA, 645 bp, synthetic construct
  misc_feature 1..645: note = Description of Artificial Sequence: Synthetic coding sequence
  source 1..645: mol_type = other DNA
atgtcggattctaagtgtgattcacagttttacagcgtgcaggtagccgactctactttcactgtcctgaagcggtatcaacaattaaaacccatagggagcggggcgcaaggaatcgtgtgcgctgccttcgataccgttttgggcataaacgtagctgtcaagaaactgtccaggccttttcaaaatcagacccatgccaaacgagcataccgggaactggtgctactgaaatgtgttaatcacaagaacatcatctcactgctgaacgttttcacccctcaaaaaacattggaggagtttcaggacgtgtatcttgtcatggaactcatggatgccaacttgtgccaggtgatccacatggagttagatcacgagagaatgtcctacctgctgtaccagatgctctgcgggatcaagcatttgcactcagctggaattatccatcgggacctcaaaccttccaatattgtggtgaagtcggactgtacgcttaagatattagatttcggcctcgccagaaccgcctgcaccaactttatgatgactccctatgtcgttacccgttattatcgggctccagaggtaatattgggcatgggatacaaggagaacgcaattaagtactggacattgtggcactag

SEQ ID NO: 124753 - DNA, 1347 bp, synthetic construct
  misc_feature 1..1347: note = Description of Artificial Sequence: Synthetic coding sequence
  source 1..1347: mol_type = other DNA
atgctctggctggctctggggccgtttccggctatggagaaccaagtccttgtgattcgtatcaagattcccaattcgggagcagtggattggactgttcactctggtccgcagcttttgtttagagatgtgctggatgtcataggccaggtattaccggaggccaccaccactgcatttgagtatgaggatgaggacggcgatagaatcactgtgaggtcggacgaagagatgaaggccatgctaagttactattactcaactgtgatggaacagcaggtgaatggccagctcatcgagcccttgcagatctttccccgggcatgtaaacctccaggcgagcggaacattcacggactcaaagttaatacacgcgccggcccgagccagcactcctcaccagccgttagcgatagcctgcctagtaacagtcttaaaaaaagctccgccgagctgaaaaaaatcctagctaatggacagatgaatgagcaggacattcgataccgtgataccttggggcatgggaatggaggcaccgtgtacaaggcataccatgtacccagcggtaagatcctggccgtcaaggtgatcctgcttgacatcactctggagctgcagaagcaaataatgagcgaattggaaattttatacaagtgcgactcctcctacattatagggttttatggtgcattctttgtcgagaaccgtatttcaatatgcactgaatttatggacggaggttcacttgacgtgtatcggaaaatgcccgagcacgtcctaggtcggatcgccgtggccgtagtgaaaggccttacctacttatggtcactcaaaatccttcaccgggacgtcaagcctagcaacatgctcgttaatactcgaggacaagtgaaattgtgcgattttggtgtgtcaacacagctcgtgaatagcatagccaaaacctacgttgggacgaacgcatacatggccccagagcggatctctggcgaacagtacgggattcactcagatgtttggtcactgggcataagcttcatggagctagcattgggacggttcccatatccccagatccaaaaaaaccaaggctcacttatgcccctccagctattgcagtgtattgtcgatgaggattccccagttttgccggtgggagagttttctgaacctttcgtgcacttcataactcagtgtatgcgcaagcagcctaaggagagaccagcccctgaggagcttatgggccatccgttcattgtccagttcaatgacggtaatgcggctgtggttagtatgtgggtgtgccgggctttggaagaacgccgatctcagcagggaccaccttag

SEQ ID NO: 124754 - DNA, 1317 bp, synthetic construct
  misc_feature 1..1317: note = Description of Artificial Sequence: Synthetic coding sequence
  source 1..1317: mol_type = other DNA
atgttatggcttgcgctggggccgttcccggctatggaaaaccaggtgttggtgatccgcatcaaaatcccgaactccggagcagtcgattggactgttcatagcggtccccaacttctatttcgggacgtcctcgatgttatcgggcaggtcctgcctgaggctaccaccacggccttcgagtatgaggacgaagacggcgaccgaattacagtaaggtccgatgaagagatgaaggccatgctgagctactactacagcacggtgatggagcagcaggtgaacgggcagcttattgaaccccttcagatcttccctagagcgtgcaagcccccgggagaacgaaacatacacgggcttaaagtgaacaccagggcagggccatctcaacacagttctcctgctgtgtcggacagcctcccaagcaatagcctgaaaaaatcatccgctgagttgaagaagattctcgccaacggtcagatgaacgagcaggatatcagatatagggatacccttggacacggtaacggtggcactgtgtataaagcttaccatgtaccatccgggaagatcttagccgttaaagtgattcttctggacattaccctggagcttcagaaacaaataatgagcgaactggagatcctgtataaatgtgattccagctacattatcggtttctacggagctttcttcgttgagaacagaatcagcatatgtacagaattcatggacggcggcagcctcgatgtgtacagaaagatgcccgagcatgttctgggaagaattgccgtggcggtggttaagggactgacctacctgtggtccctgaaaattttacatcgtgacgtcaagccgtcgaatatgctggtgaacaccaggggacaggtgaagttgtgtgattttggggtgtcaacgcagttggtcaacagcattgccaagacttacgttgggaccaacgcatacatggccccggagcgcatcagcggagagcagtacggcatccattctgatgtgtggtccctgggcattagctttatggaaattcaaaaaaatcagggaagtttgatgcctcttcaactcctgcagtgtattgttgatgaagacagcccggtccttcccgtgggcgagttctccgagccctttgtgcatttcattacccagtgtatgcggaaacaacctaaggaaagaccggcccctgaagaactgatgggccaccccttcattgtccaattcaatgacggaaatgcggctgtcgtaagtatgtgggtctgcagggcgctggaggagcgcaggagtcagcagggaccaccttag

SEQ ID NO: 124755 - DNA, 1335 bp, synthetic construct
  misc_feature 1..1335: note = Description of Artificial Sequence: Synthetic coding sequence
  source 1..1335: mol_type = other DNA
atgctctggttggcgctgggccccttccccgctatggaaaaccaggtacttgtgatcaggatcaaaatccccaactctggtgctgtggattggactgtgcattccggaccgcagctgttgttccgggatgtactcgacgtgatcgggcaagttctgcccgaagcaacaacgaccgcctttgaatatgaagacgaggacggcgacagaattaccgttcggtccgatgaagagatgaaggccatgctttcttactattactccacagtcatggaacagcaggtgaacgggcagcttatagagcccctgcagatcttccctagggcctgcaaaccacccggcgaaagaaatattcacgggctaaaagttaataccagagccggaccatctcagcactcttcgccggctgtctctgatagcttaccctccaacagtctgaagaaatctagtgcggaacttaagaagatcctagccaacggacagatgaatgagcaggatatcaggtacagggacacactgggccatggaaacggcggcactgtgtataaggcataccacgtgccatcaggaaaaatcctggccgtgaaagtgattctgttggacatcacgctcgagctccagaaacaaattatgtcagaactggagatcctctacaaatgcgatagtagctatatcatcggattctacggggctttctttgtggagaacagaatttcaatctgcacagagttcatggatggggggtcattagatgtctatagaaagatgcccgagcacgtactggggcgaatcgcggttgcagtcgtgaagggtttgacctatctgtggagtcttaagatactacatagagatgtcaagccatcaaatatgctggtgaatacaagaggccaagtgaaactgtgtgatttcggtgtgtctactcagctggtaaactctattgccaaaacatatgttgggacaaacgcttatatggctcctgagcgtatctcaggcgagcagtacgggatacactcagacgtgtggtccctcggaatttcctttatggagatacagaagaaccagggtagtctgatgcccctgcagctcctgcagtgtatagtggatgaggattccccggtgctgccggtgggggagttctctgagccattcgtgcacttcataacgcaatgcatgagaaagcagcctaaggagcggcccgctccagaagaactgatgggacatcccttcatcgtgcaatttaatgacggcaatgctgcagttgtgtcaatgtgggtttgtcgggccttggaggagcgtagatcaccggcctccttgccgtcgccctcatccagcatttag

SEQ ID NO: 124756 - DNA, 1239 bp, synthetic construct
  misc_feature 1..1239: note = Description of Artificial Sequence: Synthetic coding sequence
  source 1..1239: mol_type = other DNA
atgatggagggccatttcccccagtcagacgtgattggacaagttctcccagaagccactactacggcttttgagtacgaggatgaggatggcgaccgcattacagtgaggtcagatgaagagatgaaggctatgctcagttattattactctactgtgatggaacagcaggttaatggacaattgatcgagccgttgcagatcttcccacgggcctgcaaaccacctggtgaacgtaatattcacggcctcaaggttaatactcgggccggcccatcccagcattcctctcctgccgttagcgattctctccccagtaacagcctgaagaaaagcagcgccgagctgaagaaaattttggccaacggacagatgaatgagcaggatatcagatacagagacactctcggacatggaaacggaggcacagtgtataaggcttatcacgtgcctagcggaaagatcctggccgtgaaggtcatcctcctggacatcactctggagctccagaagcagatcatgtccgaacttgagatcttgtataagtgcgatagctcctacattattgggttctacggagccttctttgttgaaaacaggatctccatttgtacagagttcatggacggcggctctttggacgtttataggaagatgcctgaacacgtcttaggcaggatagccgtcgccgtggtgaaggggcttacctatctatggagcctgaaaatactgcatcgggacgtgaaaccttcaaacatgttagtaaacacacgaggacaggtgaagttatgtgactttggggtatcaacccagttggtgaactccatcgctaagacgtatgtgggcacaaacgcttacatggcgcccgagaggattagtggcgagcagtacggcatccattccgacgtgtggtctctcggcatctcatttatggagttagccttggggaggttcccctatcctcagatccagaagaaccaaggcagcctgatgcccctgcaattgctgcagtgcatcgtcgacgaagatagcccggtgttgccagtgggagaattctcagagccctttgtgcattttataacacaatgcatgagaaagcagccaaaggaaagacccgcccccgaagagcttatgggccacccttttatcgtccagtttaatgatggtaacgctgctgtggtgagtatgtgggtctgccgggctctggaggaaagacgctcccaacagggtcctccctag

SEQ ID NO: 124757 - DNA, 1005 bp, synthetic construct
  misc_feature 1..1005: note = Description of Artificial Sequence: Synthetic coding sequence
  source 1..1005: mol_type = other DNA
atgagccagagcaagggcaaaaaaaggaatcccggcctcaagattccaaaggaggctttcgagcagccacagacgtctagcacccccccccgggatcttgattcgaaggcttgtattagcatcggcaaccagaattttgaagtgaaagccgacgacctggagccaatcatggagttgggacggggtgcatatggcgtggtggaaaagatgcgccacgtcccctctggccaaatcatggctgtgaaaagaattcgagcaactgtgaatagtcaggaacagaagagactgctgatggacttagatatctctatgcggaccgtcgattgccccttcactgtaactttctacggtgcactttttagggagggggacgtgtggatttgtatggagctgatggatacctctttagacaaattttacaaacaggtgatcgataagggtcagaccattccagaggacatcctgggtaagattgccgtgtccattgtgaaagcactcgaacacctccactccaagttatccgtgattcaccgggatgtgaaaccgtccaacgtcctcatcaatgcactgggccaggtcaagatgtgtgattttggcatctctggctaccttgtggacagtgttgccaagactatcgatgcaggctgtaagccttatatggcacctgagcgcatcaacccagagctcaaccagaaaggctattccgtaaagtcagatatatggagcctcggcataacaatgatcgaactggcaatcctacggttcccctatgatagctgggggaccccttttcagcagcttaagcaggtggtagaagagccgtctccacagctgcccgctgacaagttttccgcagaatttgtggattttactagccagtgcctaaagaaaaactcaaaagaaaggccaacttaccccgagttgatgcaacacccattctttaccctgcatgaatcaaaaggcaccgatgtggcctcttttgtcaagttgattctcggagactag

SEQ ID NO: 124758 - DNA, 1005 bp, synthetic construct
  misc_feature 1..1005: note = Description of Artificial Sequence: Synthetic coding sequence
  source 1..1005: mol_type = other DNA
atgtctcagagtaaaggaaaaaaacggaatcccggcctgaaaatccctaaagaagcgtttgagcagccacagacgagttccactcctcccagggacctagatagcaaggcgtgcatcagtatcggaaaccagaatttcgaagtgaaagccgacgacttagaacccattatggagctaggaaggggagcatatggcgtggtggagaagatgaggcacgtccccagcggtcagattatggcagtcaaacgcattagggccaccgtcaactcccaggaacagaagagactgctgatggacctagacattagcatgagaactgttgactgtcctttcacagttaccttctatggcgcgctgttccgagaaggggacgtctggatatgcatggagctgatggacacaagcctggataagttttataagcaggtcattgataaagggcagacaatccccgaggacatccttggcaaaatcgccgtatctatcgtcaaggcgctggaacatctacattccaaactgagcgtgatccaccgcgatgtcaaaccgtctaatgtgctcattaacgcactggggcaggtcaagatgtgcgattttgggatctcaggatatctcgttgatagtgtcgcaaaaactatagatgccggatgtaagccttacatggctccggaaagaattaacccagagttgaatcagaagggctactccgtcaaatctgacatctggagtttggggatcacaatgatcgagctggcgatcctgagatttccgtatgactcctggggtaccccattccagcagttaaagcaggtagtggaggagccatctccccagcttcccgccgacaagttctccgcagagtttgtggactttactagccagtgcctgaaaaagaactcgaaagagcgacctacttaccctgagctaatgcagcaccctttttttacccttcatgaaagtaaagggactgatgtggcttcctttgtgaagctcatcttgggagattag

SEQ ID NO: 124759 - DNA, 2865 bp, synthetic construct
  misc_feature 1..2865: note = Description of Artificial Sequence: Synthetic coding sequence
  source 1..2865: mol_type = other DNA
atggaagaggaagaaggtgcggttgcaaaggagtggggtacgactcctgccggacccgtgtggaccgctgtcttcgactacgaggcagcaggcgacgaggagttgacacttagacggggagatcgggtacaggtgctctcccaggattgcgcagtgtccggagatgagggatggtggacaggccagctgcccagtggaagagtgggagtctttccatcgaattatgtggcaccgggcgctcccgctgctcccgcagggctgcaacttccccaagaaataccctttcacgagctgcagttagaggaaataatcggcgtaggcggctttggcaaggtgtacagggctttgtggagaggagaagaggttgccgttaaggctgcacggcttgatcccgagaaagaccctgctgtcaccgcggaacaggtgtgccaggaggcacgtctgttcggagcactacagcaccctaacattatagctctaaggggagcttgtctaaaccctccccatctttgcctggtgatggagtatgcacgcggcggcgcactcagccgcgtgcttgccggtcgacgcgtgcctccccacgtcctggtgaactgggccgtccaggttgctcgcggtatgaattatctacacaatgacgccccagtccctatcatccacagggatcttaagagcataaacatcctcattcttgaggctattgagaatcataatctcgctgacaccgtgttgaagatcacggactttggcctggcaagggagtggcataaaactacaaagatgtcagctgccggaacctacgcctggatggctcctgaggtgatccgtctcagcttgttttccaaatcaagcgatgtctggtcgttcggggtgctgctgtgggagctgttgaccggggaagtcccctaccgggagatcgacgcgttagccgtagcgtacggcgtcgccatgaacaagcttaccctacccattccttcaacctgtccagagcctttcgctcgactccttgaagaatgctgggacccagacccacacgggagacccgattttggatccattcttaaaaggcttgaagtcatagagcaatccgcccttttccagatgcccctcgaatctttccactcgctccaagaagattggaagttggaaatccaacacatgttcgacgacctgcgaactaaggagaaagaactacgctccagagaggaggagctgctcagagctgctcaggaacagagattccaagaagagcagctgcgacgccgggagcaggaactagctgaacgcgagatggacatcgtggagcgagagctccatctgttgatgtgtcagctgtcacaggaaaaaccccgagtcagaaaacggaaaggaaattttaagaggagtcgcttgctcaaactgcgagaaggagggtcgcacattagtctgcctagcggctttgagcataaaatcaccgtgcaagcctctccaacactggacaagaggaagggatctgatggggcctctcccccggccagcccttccattatccctagactgcgcgctatacgcctgacccccgtggattgtggaggctcaagttcaggctcatccagtggtggttccgggacgtggtcccgaggcggcccaccaaagaaagaggagcttgtgggtgggaaaaaaaagggccgcacctggggccccagctccactctgcagaaagaacgggtgggcggcgaggaacgccttaagggtcttggcgagggctccaaacagtggtcctcatcggccccgaaccttggaaaatcgcctaagcacacgcccattgcacctggatttgcgtctctgaatgagatggaggaatttgctgaagcagaggatggtggaagtagcgtccccccctctccgtactctaccccatcctacctctctgtgccactccccgctgaaccaagtccgggagctcgcgcaccatgggagcctacaccgagcgcaccccccgcacgctgggggcacggcgccagaaggcggtgcgatctggcccttttgggatgcgccacactcttgggcgctgtgggattgggcgctgacgtggccgaggcgcgcgctgcagacggtgaagaacagcgaagatggctagacgggctctttttccctagagccggacggttcccacgaggactctcaccccccgccagaccccatggacgacgggaagatgttggcccagggttgggcctggcaccgagtgccacattggtgtcactatcttctgtgagcgactgcaacagcacaaggagcctattaagatcagatagcgacgaggcagccccagccgctccttccccccccccatcccccccagcccccacccccacacccagcccgtccaccaacccactcgtagacttagaactcgaatcatttaaaaaagacccgagacaatcacttacaccgactcacgtaacagccgcctgcgctgtcagtaggggccaccggagaacaccttcagacggcgcgctcggtcaacgcgggccaccagagcccgctggccacgggccggggccacgcgatctcctcgactttccgagactgcctgatccccaagcactctttcctgccaggcgacggccacccgagtttccaggccgccctaccacgcttaccttcgctcctaggccgaggcccgccgccagcagacctcggctggatccttggaagctggtatcgtttgggcggaccctaactatttcccctccctcccggccagatacacccgagtcacccggcccaccaagtgtccagccgacgcttttggatatggatatggaaggacagaaccaggactctaccgtgccactctgcggcgctcacggaagccactag

SEQ ID NO: 124760 - DNA, 2544 bp, synthetic construct
  misc_feature 1..2544: note = Description of Artificial Sequence: Synthetic coding sequence
  source 1..2544: mol_type = other DNA
atggaaccactcaagagccttttcctgaagtctcccctcgggtcctggaatggaagtgggtctgggggggggggggggggcggcggcggacgtcccgagggctcacctaaagctgctgggtatgctaacccagtgtggactgccctctttgattacgaaccttcaggccaggatgagctagccctgcgcaaaggggatcgtgttgaagtactttctcgcgacgcagccattagtggcgacgaaggctggtgggccgggcaagtgggaggccaggtgggaatctttcccagtaattatgtgagtcgggggggcggccctcccccatgtgaggtggcgtctttccaggagttgagactggaagaggttatcggtataggggggtttggtaaagtgtaccgtggatcatggcggggtgagctggtcgctgtgaaggccgctagacaagatccagacgaagatatctccgtaaccgctgagtccgtcagacaggaggcgcgactcttcgccatgttggcacaccccaacattatcgctctgaaggccgtttgtctcgaagagcccaacctgtgtctagtcatggagtatgcagcgggggggcctctgagtagggccctcgcaggccgaagggtgccaccacatgtcctggtgaactgggctgtccagattgcacgggggatgcactacctgcactgcgaagccctggtcccggtcatccacagggacctgaaatccaataacatcttacttctccaaccaattgaatccgatgacatggaacataagactctgaagatcaccgattttggtttggccagagagtggcataagactacccagatgagcgccgccggtacgtacgcatggatggctccagaagtgatcaaagcgtcaactttttcaaagggcagcgacgtctggagctttggggtgctcctctgggagctgttgacaggggaagtaccctaccgtggaattgactgtttagcggtcgcatacggggtggcggttaataaactgaccctcccaattccatcaacttgccctgagccgttcgctcagctgatggctgattgctgggctcaagacccgcatcgccggcctgactttgcctctattttgcaacagttggaggccttggaggcacaggttttgcgagagatgcctagagactccttccactcaatgcaagaaggttggaagagggagatccagggtctgttcgatgaactgcgggcaaaggagaaggagttgttgagcagagaggaggagcttacccgggctgcgagagaacagcgcagccaggcagaacagctccgcagacgcgaacatttgcttgcacagtgggagctggaggtctttgagcgagaactgactctgctgttgcagcaggtagacagagagagaccccacgtcagaaggcggcggggcactttcaaaaggtctaagttgcgggcccgcgatgggggtgagaggatcagtatgccactggacttcaagcatcgcataacagtgcaggccagccccggtctcgatcgccgccgcaatgtgtttgaagtcggcccgggtgacagcccgactttcccaaggtttagagcgatacagctcgaacccgcagaaccagggcaggcctgggggcgccagtctcccagacgattggaggattcaagtaatggggagcgccgagcctgttgggcttggggtccttcctctccgaaaccaggagaagcccagaatggacgccggcggtctcgtatggacgaggccacctggtatctagattctgatgattctagccccctcgggagcccctctactccaccagcactgaacggaaacccaccgcggccttctctggaacctgaggaaccgaagaggccagtgccggctgaacgtggcagcagctccggcacccccaagcttatccagagagcattgctgcgggggaccgccttgcttgcaagcctagggctgggccgggacttacaacccccaggcggtccggggagagagagaggagagtcacccacaacaccacccacacctactcccgccccgtgccccacggaacctcctccctcccctcttatatgcttttctctgaagacaccagacagtcccccgacaccagctccactgctgcttgaccttgggatccccgtggggcagaggtccgcaaaatcccctaggcgcgaggaggagccccgaggtgggactgtgtccccacctcccggaacgtcccgatctgccccagggacaccaggtacccctcggagcccgcccctcggtctcattagccggccccgcccttccccactcagaagcagaattgatccttggagttttgtgtccgccggaccaagacctagccccctgccttctcctcagcctgcgccccgccgggccccatggacactgttccccgactctgaccctttttgggattcccctcctgccaatcccttccagggaggcccacaagattgcagggcgcaaacaaaagatatgggcgctcaggccccctgggtgccagaggctggcccttag

SEQ ID NO: 124761 - DNA, 1773 bp, synthetic construct
  misc_feature 1..1773: note = Description of Artificial Sequence: Synthetic coding sequence
  source 1..1773: mol_type = other DNA
atggaacataaaaccttaaagattaccgatttcggactcgcgagagagtggcataagactacccagatgtccgctgctgggacttatgcttggatggcacccgaagtaattaaggcgtccacattttctaaagggtccgacgtgtggagttttggcgtactgttatgggaacttctgactggagaagtgccctatcggggcattgattgtctcgctgttgcatacggtgtcgccgtcaataagctgacacttccaattcctagtacatgtcccgagccatttgcccaattgatggccgattgctgggctcaggaccctcaccgcagacctgatttcgccagtatactccagcagctggaagctctcgaagctcaagtgctacgggagatgccaagagattcctttcattcaatgcaggagggttggaagcgggagattcagggactcttcgacgaacttagggccaaggaaaaagagctgttgtccagagaagaggagctgaccagagccgccagggaacaacgtagccaggccgagcaactgagacgaagggaacatctcctggctcagtgggagttggaggtctttgagcgggaactgacactgttgctccagcaagtagaccgtgagcgcccgcatgtacgtaggcggaggggaaccttcaaacggagcaagctacgtgccagagacgggggggagcgtatatctatgcccctcgatttcaaacaccgaataactgtgcaggccagtccaggtttagatcgtagaaggaacgtttttgaggtggggccaggcgactcacctactttcccccgtttcagagcgatccagctcgagccagcagagccaggacaggcttgggggcggcagagccctcgcaggctcgaggattcgtcaaacggcgaaagacgggcctgttgggcttggggcccctcttcccccaagccaggggaagctcagaatgggaggagaaggtcccgcatggacgaggccacatggtatctggactccgatgattcatctcccctcggctcccccagtactcccccagcactgaacggcaaccctcccaggccctcactcgagccagaagaaccaaagcgcccggtgccggccgagcgcgggtcgagcagcggtaccccaaaactgatccagcgagctttgctgcgggggactgctctgttagcttcgttaggactgggacgtgatcttcaaccccctggagggcccggcagggaaagaggcgaatcacccacaactcccccgacgcctaccccagccccctgcccaacagaaccccccccctcccctctgatttgcttttcgctcaagacccccgacagccctccgacccctgcacccttactcctggacctgggaataccggtgggccagcgctcggcaaagtcacccagacgggaggaggaacccaggggaggaacggtgagcccccctcccggcacctcccgctctgcccctggcacacctggaactccccggtccccccctctcgggttgatctcgcgtcctcgccccagcccactcaggtcccggatcgatccctggagtttcgtctctgctggcccgaggcccagcccgctgccttccccccagccagccccacgccgggccccatggactttgttccccgatagcgaccccttctgggattcccccccagccaaccccttccagggtgggcctcaggattgtcgcgcccagaccaaggatatgggagcccaggccccatgggtcccggaggccggaccatag

SEQ ID NO: 124762 - DNA, 2580 bp, synthetic construct
  misc_feature 1..2580: note = Description of Artificial Sequence: Synthetic coding sequence
  source 1..2580: mol_type = other DNA
atggcctgtctgcacgagactcgcacccctagtccttcttttggcggcttcgtctcgactttgtcggaggcctcaatgcgaaagttggaccctgacacctcagattgcacacctgagaaagatttgacgccaacacacgtgctgcagctgcacgagcaggatgccgggggaccgggcggcgcagccggtagtcctgagtctagagccagccgggtgcgtgcagatgaagtgaggctccagtgccaatcgggttctggcttcctggagggacttttcgggtgcctgcgtcctgtctggacaatgattggaaaggcctatagtactgaacacaaacaacagcaggaagatctgtgggaggtccctttcgaagagatactagatctccagtgggtgggatcaggggctcagggagcggtgttccttggtcgatttcacggtgaggaggtggctgtgaagaaggtccgtgatctcaaagagaccgacattaagcaccttcggaaactgaaacaccctaacatcatcaccttcaagggggtgtgcactcaagccccttgctactgtatcctgatggaattttgcgcccaggggcagttgtatgaagttctgcgggccggcagacctgtcacacccagccttctcgtggattggtcaatgggaattgccggcggaatgaactatttgcatttgcacaagatcatccacagggatttgaaatctccgaatatgctgataacctacgacgatgtcgtcaaaataagcgactttgggacgagcaaagagttgtccgacaagtcaaccaagatgagcttcgcaggcactgtcgcgtggatggctcctgaagttattcggaacgagccagtgagcgagaaggtggatatttggtcttttggggttgtgttatgggagctgttaaccggcgagatcccttataaagatgtggattcttccgccatcatttggggggtcggttccaacagcttgcatctcccagtcccttcatcctgtcccgacggcttcaaaatcctgctgcgccaatgctggaattcaaagccccgtaaccgccccagttttagacagatactcctgcatttagacatcgctagtgccgacgtgttgtcgactcctcaagaaacttatttcaaatcacaggccgaatggagagaagaagtgaagcttcactttgagaagatcaaatcagagggaacctgtcttcacagacttgaggaagagctcgtcatgagacgccgtgaagaacttcgccatgccttagacataagagaacattatgagcgaaaattggagagagccaataatctctatatggagctcaacgcgctcatgctccagctcgagcttaaggaaagagagctcctgcggcgggagcaagccctggaacggaggtgccctgggctcctgaagccgcacccatcaagaggccttttgcacggtaataccatggagaagctgatcaaaaagagaaatgttcctcaaaagctctccccacactcgaagcgccctgatattcttaaaaccgaatctttactaccaaagctggacgccgccctctcaggcgttgggctacctgggtgccctaaagggccgccttcacctgggcggagccgtcggggaaagacccgccatcggaaggctagtgccaaaggcagttgtggagacctgcctggacttcgcacagcagtgccgccccacgaaccgggcgggccggggtcccccggcggactgggcgggggcccctctgcttgggaagcttgccccccagccctgcgcggcctgcaccacgacttgctactccgaaagatgtcatcctcctcgcccgacctgctgagcgcagccctgggttcccgtgggcggggagctactggcggagccggggatcccggcagtccccctcctgcccgtggtgacacgcctccttctgaaggtagtgctcctggctctacgtcccctgattctccaggcggtgcaaaaggagagcccccccctccagtcggacctggcgagggcgtcggcttattgggcacaggcagggaggggactagtggacggggcgggtcaagggccggaagccagcacctaaccccggccgccctcttatatcgcgccgccgtaactcgctctcaaaaaagggggataagctccgaggaggaagaaggcgaagtcgactcagaggtggagctgaccagcagtcagcggtggccccaatctctgaatatgcggcaatctttgtctacattctctagtgagaacccttctgatggggaagagggcaccgcctctgagccatccccctcaggcacccccgaggttggatccaccaatactgatgaaagaccagatgagagatctgatgacatgtgttcacagggcagtgagatcccactagatcctcccccctctgaggtgatccccggtcctgaaccttcgtctctccctattccacatcaggagctcctgagggaacgaggaccaccgaatagcgaagattcagactgcgattccacagagctggacaacagcaattctgtcgatgctctccggccccccgcctccctccctccatag

SEQ ID NO: 124763 - DNA, 2901 bp, synthetic construct
  misc_feature 1..2901: note = Description of Artificial Sequence: Synthetic coding sequence
  source 1..2901: mol_type = other DNA
atggctaatttccaggagcatttgagctgcagctcctcaccccatctgcccttctccgagagcaagacctttaacggcctgcaggacgaactgaccgcaatggggaatcacccgagcccgaagctgttggaggatcaacaggagaaaggcatggtccggaccgaacttatcgaatccgtgcattcacctgttactactaccgtgctcaccagcgttagtgaggatagcagagatcagtttgaaaacagtgttttgcagcttagagagcacgatgagagcgagaccgcggtctctcagggcaattctaacaccgttgacggtgagtccaccagcggaacggaggacatcaaaattcagttctcccggagcggatccggttcagggggattcttggaaggtctgtttggatgtctcagacccgtgtggaatatcatcggcaaggcatactccactgactacaagctgcagcagcaggacacctgggaggtgccctttgaagagatcagcgaactccaatggctaggcagtggtgcgcagggggccgtgtttctggggaagtttcgtgccgaagaggtggcaattaaaaaagttcgtgagcaaaacgaaaccgacattaaacacctccggaagctgaaacaccccaatattatcgcttttaaaggagtttgcacccaggcaccttgctactgcattattatggaatactgcgctcacgggcagttgtacgaggtgttacgggcaggccggaagattactccgagactgttagtggactggtccactgggattgcgagcggcatgaattacctccacctccacaaaattatccaccgtgacctgaaatctccaaacgtcctcgtgactcacactgacgcagtcaagatatccgatttcgggacctctaaggaattatccgataaatctacgaaaatgtccttcgcaggcacagtggcctggatggctcccgaggtgattcgtaacgagccagtctcagaaaaggtcgatatctggtcctttggggtggtgctgtgggagttactgacgggtgagatcccgtataaggacgttgattcatctgctattatatggggcgttggctctaatagtctccacctgcccgtgccttcaacatgtcccgatggatttaagatactgatgaagcagacatggcagtccaagcctcgcaatcgccccagttttcgccagacattgatgcacctcgatatcgcctctgccgacgtgctcgcaactccccaggagacctacttcaaatcccaggcggaatggcgggaggaagtgaagaagcacttcgaaaagatcaagtccgagggtacatgtatccacagattagacgaagaactcattcggcggcgtagagaggagctgcgccacgctctggacatccgtgagcactatgagcgtaaactcgaaagggccaacaacctttatatggaactgtccgcaattatgttgcagctggagatgagagaaaaggaactgattaagagagagcaggcggtggagaagaagtatcctggaacttacaaacggcaccctgttagacccatcatccatccaaacgccatggagaagcttatgaagcggaaaggagtcccgcacaaatccggaatgcaaaccaagcgaccggatctcctccggagcgagggcattcctacaacagaggtagcacccacggcgagtcctctttcagggtcccccaaaatgtcaacctcatccagcaagtctcgctaccgctctaagccgcgccataggagaggcaacagtcgggggtcgcactctgattttgctgccatcctcaaaaaccagcccgcgcaggagaatagtccccacccaacatacctgcatcaggcgcagtcccagtatccgtctttacatcatcacaactctctgcaacagcaataccaacaaccacctcccgccatgagtcaatcacatcacccgcggctgaatatgcacgggcaggatatcgcaacatgcgcaaacaatttgcggtacttcggccctgcagctgctcttcggtcccctctcagcaaccatgcccagcgtcagctccccggatccagcccagatttgatcagcacagcaatggccgctgactgttggagatctagcgagccagacaagggtcaagctggaccctgggggtgttgccaggctgatgcttacgatccatgcttgcagtgtcgcccagagcagtacggcagcctcgacattcccagcgctgagccagtcgggaggagcccagatctgtctaaatcacctgcacataatcctttgcttgaaaacgcccaaagcagcgagaaaacggaagagaacgaatttagtggctgccggagtgaatcttcgttggggaccagccatcttgggactccccctgccctcccacgaaagactcgtccactgcagaaatccggggatgacagtagcgaagaggaggagggagaagtcgactctgaggttgaattccctaggcggcagcggccccatcgctgcataagttcttgtcagtcctactccacattcagttcagagaactttagcgtaagcgacggggaggaaggtaacacctctgatcacagcaactcccccgacgagcttgccgacaagctcgaggaccgacttgccgagaagctcgacgatttattgagccagacaccggagatccctatcgatattagctcacacagcgatggcctctcagataaagaatgtgccgtccgtagggtcaagactcagatgtccctgggcaagttgtgcgtagaggagagggggtacgagaatccaatgcagtttgaagaatccgactgcgactccagcgatggagagtgtagtgatgcgacagtgaggacaaacaaacactactcttctgcaacttggtag

SEQ ID NO: 124764 - DNA, 2901 bp, synthetic construct
  misc_feature 1..2901: note = Description of Artificial Sequence: Synthetic coding sequence
  source 1..2901: mol_type = other DNA
atggccaacttccaagagcatctgagctgttcctccagtccccatttgcctttcagcgaatcaaagaccttcaacgggttacaagatgaattgacggccatgggaaatcacccaagccctaaactcctggaggatcagcaggaaaagggaatggtgcggactgaactgattgagtcggtccacagtcctgtgactacgacagttctgacaagtgtaagtgaggattcgagggatcagtttgagaacagtgtcctgcaactgcgtgagcatgatgagagtgagaccgcagttagccagggtaatagtaatactgtggatggagaaagcacatccggaactgaggacataaagatccagttttcgcgaagcggatccgggtcaggtggctttctggagggactattcggatgcctcagacctgtgtggaacatcatcggaaaggcttattctacagactataaactgcagcagcaagatacatgggaagtgcccttcgaggagatcagcgagctgcagtggttgggctcaggtgctcaaggagcagtcttcctgggaaaattccgagctgaggaagtcgccattaagaaggtccgcgagcagaacgagactgacattaagcacctgagaaagctgaagcatcccaatatcattgcctttaagggcgtctgtacacaggcaccttgctattgcatcatcatggaatattgtgcccacggtcaactgtacgaagttctcagggccggacggaaaatcacaccaaggctgctggtagactggtccactgggattgcatctggaatgaactatctgcaccttcataagatcatccatcgagatcttaagtctcccaatgtgctggtcactcacactgacgcagtgaaaatctcagactttggcactagtaaggagctttcagataagtctactaagatgagctttgccgggaccgttgcctggatggcccctgaggtcattcgtaatgagcccgtttctgagaaggtggacatatggtcatttggagtggtgctgtgggagctgcttacaggagagatcccctacaaagatgttgactcctccgctattatttggggcgtcgggagcaactctctgcacctccccgtgccatctacttgtcccgacggtttcaaaattctgatgaaacagacctggcagtcaaaacctcgtaaccgcccgtctttccggcagaccctcatgcacctggatatcgcctccgccgatgtcctcgccaccccgcaagaaacatatttcaaatcccaggccgagtggcgagaggaggtgaagaagcacttcgaaaaaattaagtcggaggggacatgcatccatcgcttagacgaggagttgatccgtaggagaagggaggagctgagacatgcactggacatccgggaacattacgaacggaagctggagcgagcgaataatctctatatggagctctccgccatcatgctgcaattagaaatgagggaaaaggagctgattaagcgtgagcaagcagttgagaaaaagtaccccgggacctacaaaagacaccctgttagacctatcatccaccccaacgccatggaaaagctgatgaagcggaaaggcgtgccgcacaaaagcggtatgcagacaaaaaggccagacctcttacgatccgagggaatacccactaccgaagtggcgccaactgcgtctcccctgtccgggtcccctaaaatgtccacttcctcctcaaaatccaggtacagatccaaaccaagacataggcgcggaaacagtagaggtagccactccgattttgctgcaatattaaagaaccagcccgcgcaggagaactccccccatcccacttatctgcatcaggctcaaagccagtatcctagtttgcaccaccacaactccttgcaacagcaataccagcagccaccacccgctatgtcccagtcacatcatccacgattgaacatgcatgggcaggacatcgctacatgtgcaaacaacttgcggtattttgggcccgcagctgccttgcgttcccctctgtccaaccacgcccagcgacagctgcccggcagctctcccgacttaattagtactgctatggcagccgactgctggaggagcagcgagcccgataaaggccaagctgggccctgggggtgttgccaggcggacgcatatgacccatgtctgcagtgccgccccgaacagtatggtagtctcgacattccaagcgctgagcctgtcggaaggagcccagacctcagcaagagccctgcacacaatccgctcctcgagaacgcccagagcagtgagaagacagaggagaacgagttcagcggatgtcgcagcgaatcctcccttggaacgagtcaccttggcacacctcccgccttacctcgaaaaactcggcctttgcaaaaaagcggtgacgattcttccgaagaggaagaaggagaggtggactccgaggtagaatttccccgacgccagagaccccacagatgtatcagctcctgtcagtcttattcaaccttcagcagcgagaatttttcagtttcggatggcgaggaaggtaatacgagcgaccactccaattctcccgatgaactggccgataaattagaggacagactggccgaaaaactggacgacttgctcagccagacgcctgagatccctatcgatatttcctctcacagcgatggcttgagcgacaaggaatgcgcggtgcgcagggtcaagacccaaatgtccctgggtaaactttgtgtggaggaaagggggtacgagaatcccatgcagttcgaggagagtgactgtgattcatcagacggcgaatgcagcgacgccactgtgcgcactaataagcactactcttctgcgacctggtag

SEQ ID NO: 124765 - DNA, 414 bp, synthetic construct
  misc_feature 1..414: note = Description of Artificial Sequence: Synthetic coding sequence
  source 1..414: mol_type = other DNA
atggccaatttccaggagcacctttcctgctcttcatcaccccatctgccgttctcggagtctaaaacgttcaatggcctgcaagacgagttgacagctatgggaaatcatccatcccccaaactgctcgaagaccagcaagagaagggcatggttagaaccgagcttatcgagtctgttcactcccccgtcactacgactgtgttaacatcggtgtccgaggattccagggatcagtttgaaaacagcgttctgcagctgcgagaacatgacgagagcgaaactgccgtttcgcaaggaaattcaaacaccgtcgatggcgaaagcacatcagggacagaggatattaagatacagttttcccggtcagggtccgggtctggcggtttcctggagggtctgttcgggtgctag

SEQ ID NO: 124766 - DNA, 342 bp, synthetic construct
  misc_feature 1..342: note = Description of Artificial Sequence: Synthetic coding sequence
  source 1..342: mol_type = other DNA
atggccaatttccaggagcacctgtcttgctcttcatcccctcacctgcccttctcggagagcaaaacgtttaacggcctccaggatgaactgacagctatgggcaaccaccctagtccaaagttgcttgaggatcagcaagagaaagggatggtacggacagagctgatcgagtccgtgcattcacctgtcaccaccaccgtcctcacttctgtgagcgaggactccagggaccagtttgagaactctgtgctgcaactcagagagcatgatgaatctgagaccgctgtctcgcagggaaacagtaacacggtagatggtgagtctacatccggtacctag

SEQ ID NO: 124767 - DNA, 2469 bp, synthetic construct
  misc_feature 1..2469: note = Description of Artificial Sequence: Synthetic coding sequence
  source 1..2469: mol_type = other DNA
atgtcctacgtagaatgcaagtgcctgcagctggagaataaaaacacgtgggaagtaccgttcgaggagattagcgagctgcagtggcttggcagtggggcgcagggagcggtttttttagggaaatttcgggccgaagaggttgccatcaagaaagttcgtgaacagaacgagactgacatcaagcacttgaggaagctcaagcaccctaacatcatcgccttcaaaggcgtgtgtactcaggcgccgtgttactgcatcatcatggaatattgtgcccatggacagctttacgaagtccttcgtgccggccgaaagataacgcctagacttctggtggactggagcactggaatcgctagtggaatgaactatctacatctgcacaagatcatacacagggacctaaagtctccaaacgtcctagttacccacacagacgctgtcaaaatatccgacttcgggaccagcaaggagctgtccgataagagcactaagatgagcttcgccggcactgtcgcctggatggctccggaagttatcaggaacgagcccgtgtcagagaaagtggacatctggtccttcggggtggttctctgggagctgctgacgggggagatcccttataaggatgtggattcatcagctattatctggggggttggatccaattccctccatctgcctgtccccagcacatgtccggatggatttaagatattgatgaagcaaacctggcagtcgaagccccgcaaccgtccttcttttagacagaccctgatgcacttggatattgctagcgcagacgttctagcaactccccaagaaacctactttaagagccaggccgaatggcgtgaagaggttaaaaagcacttcgagaagataaagtccgagggcacttgcatacaccgactcgacgaggagctaatccgacgtcgtcgtgaagagctgagacatgctcttgatatccgagaacactacgagagaaaacttgaacgggccaataacctctacatggaactgagtgccataatgcttcaacttgagatgagagagaaagagctgatcaaacgggagcaggccgtggagaagaaataccccggcacttataagagacacccagtgcggcctattattcacccaaatgctatggaaaaactgatgaaacgaaagggcgtgccgcacaagtcgggcatgcaaacaaagcgtcctgacctccttcggtccgagggcatccccaccacagaagtagccccgacagctagccctctgtctggatctcctaagatgtctacaagctcatccaagtccaggtatagaagtaaaccgaggcaccggcgcggcaactccaggggctcgcactccgatttcgccgcgatcctgaagaatcagcccgctcaggagaattcaccacaccccacttacctccaccaggcacagagtcagtatcccagcctgcatcaccataacagcctccagcagcagtatcaacaacccccccccgctatgtctcagtctcaccacccaaggttaaacatgcacggacaggacatagccacatgcgccaacaaccttcggtacttcggccctgctgccgccctgcgatcccctctgtccaaccacgcacaacgccagctaccgggatcttcccctgacctgatctctacagctatggccgccgactgttggcggtcttccgagcccgacaagggacaggccggaccttggggctgttgccaggcagatgcctacgacccttgtctgcagtgccgtcccgaacagtatgggtcgcttgacatccccagcgctgagcccgtgggaagatctcccgacctttcaaaatctccagcccataatccccttttagaaaatgcacaatcatctgagaaaaccgaggaaaacgagttctccggatgcaggtctgagagtagtttgggtacctcacacctggggacccctccggcactgcccaggaagacccggcctctacagaaatcaggagacgatagtagcgaagaagaagaaggcgaagtggacagtgaggtcgaattcccacggcgtcagcggcctcaccgctgcatcagttcctgccaatcttactctacgttctcaagcgagaatttctctgtaagcgatggagaggaaggcaatacaagcgaccattccaacagccctgacgaactggcagataagctggaagatcgcctcgcggaaaagttggatgacctgctaagccagacaccagagatacccatcgacatcagcagccactccgatggactatcggataaggagtgcgcagtcaggcgggtgaagacccaaatgtccctgggtaaactgtgtgtagaagaacgaggctacgagaaccccatgcaatttgaggaatcagattgcgacagcagcgacggtgaatgctcagacgccacggttcgtaccaataagcactacagtagtgcaacgtggtag

SEQ ID NO: 124768 - DNA, 2280 bp, synthetic construct
  misc_feature 1..2280: note = Description of Artificial Sequence: Synthetic coding sequence
  source 1..2280: mol_type = other DNA
atgtattgtggtattcagattctggcactctgggagcggggagtctgcacacaggctccatgctattgcataattatggaatactgtgcccacggccaattgtacgaagtcctcagggctggtcggaaaattacacctaggttactagtcgattggtccactggtatcgccagtgggatgaactacttacacctgcacaagattatccaccgtgatctgaagagcccaaacgtgctcgtaactcatacagacgcagtgaaaatcagtgacttcggcacttcaaaagagctgtccgacaaatctactaaaatgtccttcgcaggcacagtagcctggatggcacccgaggtcatcagaaatgagcccgtttctgaaaaggtcgacatttggtcattcggcgtggtgctgtgggagctcctcaccggagaaattccttacaaggatgtggatagctcagccatcatttggggagttggttctaatagtttgcatctgcccgtacctagcacctgtccagacggttttaagatcctaatgaaacagacctggcagagcaagccaaggaatcggccgagctttcgacagacccttatgcacctggacatcgcatccgccgatgtgctggccacaccccaggagacttatttcaagagccaagccgagtggcgcgaggaagtcaagaaacacttcgagaaaatcaaatcagagggtacctgcattcaccgattggacgaagagctgatcagaaggcgcagggaggagcttcggcacgccctggatattcgggaacactatgaacggaaactcgaacgtgccaataatttgtacatggagctaagtgcaattatgctccaactcgagatgagggaaaaggagcttatcaagcgcgaacaggcggtggagaaaaagtatccgggaacttacaaacgccaccccgttaggcctattatccacccaaacgccatggaaaagctaatgaagagaaaaggggtaccccataaaagcggaatgcagacaaagcggccggaccttctgcggagtgaggggatccctaccaccgaggtagcccctaccgcaagtccactgagcgggagccctaaaatgtccacgagttcatccaagagtaggtataggagcaaaccccgccaccgtcgtggcaactctagagggtcacattcagattttgcggctattctaaagaaccagccagcccaggaaaacagccctcaccccacctacctccatcaggcccagtctcaatatccctccctccaccaccacaactcactccaacagcaatatcaacagccaccgcccgctatgagccagtcccatcaccctcgcctgaatatgcatggccaggacatcgctacatgcgcaaacaatctgagatactttggccccgccgcagccctcaggagcccattgtctaatcatgcgcaacgccagctgcctgggtctagcccagatttgattagcacggcaatggctgccgactgttggcgaagttccgagccagataaagggcaagctggaccttggggttgttgccaggcagatgcttacgacccttgcctgcagtgtcgtcccgagcagtatgggtccctcgacataccttctgcggagcctgtaggacgctcccccgatctgtctaaatccccggctcacaatcccctgctagagaatgctcagtcgtccgagaaaacggaggaaaacgaatttagtggctgtcggagcgaatcctccttgggcacctcacatctgggcacacctcctgcactcccgaggaagactagacctctacagaaaagcggggatgacagttctgaagaagaagaaggagaagtggatagcgaagttgagttcccccgtaggcagcgtccccacaggtgtatttcctcttgccagtcatatagcaccttttcttctgagaacttttcggtctctgacggcgaggagggaaatacctctgaccatagcaatagcccagacgagttggcggacaaactcgaggaccggctcgcggagaaactcgacgatctgctgagccagacccccgagatccccatcgatatctcgtctcactctgatgggctcagcgacaaggagtgcgctgtgaggcgtgttaaaacacagatgagcctgggcaagctctgtgtggaagagaggggctatgagaaccccatgcagtttgaggaaagcgactgcgatagttccgatggggaatgttctgacgctaccgtccgcacaaataagcattatagcagtgccacttggtag

SEQ ID NO: 124769 - DNA, 2841 bp, synthetic construct
  misc_feature 1..2841: note = Description of Artificial Sequence: Synthetic coding sequence
  source 1..2841: mol_type = other DNA
atggctgtcatggagatggcgtgccctggggcacctggatccgcggttggccaacaaaaggagctgcctaaagccaaggagaaaacacctcccctgggcaagaagcaatcctccgtctacaaactcgaagcagtggaaaagtctccagtgttctgtggcaagtgggagatattgaatgacgtgatcactaagggaactgcaaaagagggatctgaggcaggcccagccgctatttctatcatcgctcaggctgaatgtgaaaacagtcaggaattttctcctacatttagtgaaagaattttcatagccggatcaaagcagtattctcaaagcgaatccctggaccaaatccccaacaacgttgcacacgccaccgaaggcaaaatggctcgggtttgctggaaagggaaaagaagatctaaggcccggaaaaagaggaagaagaaatccagcaaaagcctggcccatgcaggcgttgcactggcaaaacctttgccaaggactccagaacaggagtcatgtaccatcccagtgcaggaggatgagtcgcctctgggggctccttatgttaggaatactccccagttcactaagccactgaaggagcctgggctcggtcaactgtgcttcaagcagctgggtgaaggcctgagggccttacctagaagtgagctgcacaaactgattagtccactgcagtgtctcaaccacgtttggaagcttcaccacccccaggatggcggtccactccctctgcccacccatccttttccatactctcgactgccccacccttttcctttccatcctctgcagccttggaagccccacccccttgaaagctttctgggaaagttggcatgtgtagatagccagaaacctctgcctgatccacacctctcaaagctggcctgtgtagactccccgaagccgctgcctggtccacatctggaaccatcatgcttgagccggggcgcccacgaaaagttcagtgtggaggaatacctggtccacgctctgcaggggagtgtgtccagcggccaagctcactccctcacctccctggccaaaacctgggccgcccgcggcagtagatcccgcgaaccttctcctaaaacagaggacaacgagggggtcttgctcacagaaaagctaaagccggtggactatgagtaccgcgaggaggtgcactgggcaacacaccaactgcgcctgggccgcggttccttcggcgaggttcataggatggaggataaacagacaggttttcagtgcgccgtaaagaaagtaaggctcgaagtgtttagggctgaggagttgatggcttgtgctggcctaacttctcccagaattgtaccgctgtatggcgcagtgcgcgaggggccatgggttaacatctttatggagctgctggaaggagggtctttgggccagctcgtcaaggagcaaggttgtctcccagaggatagagccctgtactatctgggccaggccctcgagggccttgaatacttacactcgagacgcattctgcacggcgatgtgaaagcagacaacgtgttgctatcaagcgacggctctcatgcggcactgtgtgattttggccacgctgtgtgcttgcagcccgacgggctggggaagtccctcttgacaggcgactacatacccggtaccgagacgcacatggcacccgaagtcgtgttaggccgttcatgtgatgcaaaggtggacgtatggtcctcatgctgcatgatgttgcatatgctgaacggctgtcatccttggacccagttcttcagaggtccactgtgtctgaagattgcttccgagccacctccagtgcgagagattcctcctagttgtgcacctctgacagcccaggccatccaggaaggactgcgtaaagagccaatacaccgggtgagcgcggcagaactgggaggcaaagtcaaccgggccttgcagcaagttggcggtctgaaaagcccttggagaggcgagtataaggaacccagacatccaccaccgaaccaggccaactaccaccagacacttcatgcccagccccgcgaattgagccctcgtgccccaggcccacgccccgccgaggagacaactggacgcgctcccaaattgcagccacccctgccaccagagccgcctgagccaaacaaatccccaccgctgaccctatccaaggaggagagtgggatgtgggagccattgcctttaagctctttagagcccgcgccagcaaggaatccttcttctccagagagaaaagccacagtacccgaacaggaactccagcaattggagatcgagttgttcctgaacagcctgtcgcaacccttctcactagaagagcaggagcagatactgtcgtgtctgagcattgatagtttgagtctgagcgatgactctgaaaagaacccgagtaaagcaagccagagctcccgcgataccctctctagcggcgtgcattcctggtcttcccaggctgaggccagatcctcctcttggaacatggtactcgccaggggacgtccgactgacaccccaagctacttcaacggggtcaaggtgcagatccagagcctgaacggagagcacttgcacatcagggagttccaccgcgtgaaggtcggcgatattgctacgggaatttccagtcagatcccagcagcagcctttagtctggtgactaaggacggccagcccgttcgttatgatatggaggtgccagactcaggaattgatctccagtgtaccctggctccagacggcagcttcgcgtggagctggagagtgaaacatggtcagcttgagaaccggccttag

SEQ ID NO: 124770 - DNA, 1302 bp, synthetic construct
  misc_feature 1..1302: note = Description of Artificial Sequence: Synthetic coding sequence
  source 1..1302: mol_type = other DNA
tgcttcaagcaactgggagaaggattaagggcactgcctaggtcagagctccacaagctgattagtccactccaatgcctcaatcacgtatggaagctccaccacccacaggacggtggcccactgccgctgccgactcaccacccattcccatttcacccattgcaaccatggaagcctcatcccctcgaatcgttcctagggaagctggcatgcgttgattcccagaagccacttcccgatccacacttgtctaagctggcatgcgtggactccccaaagccactccccgggcctcatctggaaccgtcgtgtctgtcccgaggagcgcacgagaagttctcagtcgaagaatacttagtgcacgccttgcagggctccgtttccagcggccaggcacactcattaaccagcctagctaagacatgggctgcaaggggaagtcgcagccgagagccctctccaaaaacggaggacaacgaaggtgtcctcctcactgagaagctgaaacctgtagactacgaataccgcgaagaggttcattgggccacccatcagctgcgcctcggcaggggctcctttggagaggtacatcggatggaggataaacagacaggattccagtgtgctgtcaagaaagtgagactggaggtgtttcgggccgaggaacttatggcttgcgcgggcctgaccagtccacggatcgttcccctgtacggcgccgtgagggaaggtccatgggtcaatatcttcatggagcttctggaaggtggctcactagggcagctggtcaaagagcagggctgcctccccgaagatagggctctgtactatctcggccaggctctggagggactagagtatctccattctcggagaatactgcacggcgatgtcaaagcggataacgtgctgctctcctctgacggcagccacgccgccttgtgcgactttggacacgccgtgtgtctacagcctgacggactcggcaaatcacttctgaccggcgattacatacctggcaccgaaactcacatggcacccgaagttgtgctgggaaggtcctgtgatgccaaggtggatgtatggtcatcttgctgcatgatgctgcacatgctgaatggctgtcatccctggactcagttctttagagggccactttgtcttaaagtgggcgatggcacgcagcacgggcagcagggcgagctgcagggccctggcgctcaggccgccgggtggcggggctgctccgctgtggccgatggtgcccgagggggcctggtaattcacgtgggctcatag

SEQ ID NO: 124771 - DNA, 3942 bp, synthetic construct
  misc_feature 1..3942: note = Description of Artificial Sequence: Synthetic coding sequence
  source 1..3942: mol_type = other DNA
atggagtcagggggtggaaacgctcccgcaggggccctgggcgcagcctcagagtccccccagtgcccaccacctccaggggttgaaggtgcagctgggccggcggagcctgacggcgcagctgagggagccgcaggcggaagcggagagggcgagagcggcggtgggcctcgacgcgcacttcgagcagtttacgtgaggtccgagtcttcacaaggaggggcggctggaggcccagaggccggggcccgacaatgcctcctgcgagcttgtgaggcggagggcgcccatctcacttccgtgccctttggcgagctggatttcggagagactgcagtgctcgacgccttctacgacgccgatgtggctgtggtggacatgagcgatgtgtctagacagccctctttgttttatcatctgggcgtccgtgagtcattcgacatggccaacaatgtgatattgtaccacgacactgatgctgatacagcactcagtcttaaggatatggtcacacagaagaatacagcttcatctggcaactattacttcatcccttacatcgtgaccccttgtgccgactacttctgctgcgagagcgatgcacaaagacgcgcatcagagtacatgcagcctaactgggataatatcctggggccactctgcatgcccctggtggatcgctttattagtctcctaaaggatatccatgtcacaagctgtgtgtactataaagaaacacttttgaacgatattcgcaaggccagagagaaataccaaggagaagaattggccaaagagttagctaggatcaaactgcggatggacaacacggaagtgttgaccagcgacataatcatcaacctacttctttcatatagggacatccaagactacgacgcaatggtgaaacttgtggaaactctcgaaatgcttcctacttgcgacctagcagatcagcacaatattaagtttcattacgcttttgcacttaatcgcagaaactctaccggcgacagagaaaaggctttgcaaatcatgctgcaagtgcttcagtcttgcgatcatcccggtccggacatgttttgcctctgtgggagaatttataaggatatctttctggactcggactgcaaggacgacactagccgcgatagcgcgattgagtggtatcggaaaggtttcgaattacagagcagcctgtattccggcattaacctagctgtgctgctgatagtggccgggcaacagttcgaaacatcactcgagcttcgcaagattggagtgcgtctgaactctctcctcggacggaaaggatcccttgaaaagatgaataactactgggacgtgggccaattcttcagtgtgtcaatgttggctcacgatgttgggaaggcagtgcaggcagccgaacggttgttcaaactcaagcctccagtctggtacctgcggtcactggtgcagaatctgcttctcattcggcgtttcaagaaaaccatcatagagcatagcccaaggcaggaaagactgaatttttggcttgacattatctttgaggctactaatgaggtgaccaacggactgcgtttccccgtgcttgtgatagaacctaccaaagtctatcagccatcatatgtttccattaataatgaggctgaggagaggacagtcagcctctggcacgtttcgccaacggaaatgaagcaaatgcacgagtggaactttactgcttctagcatcaagggcataagcttgtcaaaattcgatgagcgctgctgcttcctctatgtccatgacaacagtgatgacttccaaatttatttctctacagaggagcagtgcagccgattcttttcactggttaaagagatgatcactaacacagcgggatctactgtagagctggagggcgagactgatggcgacaccctggagtacgagtacgaccacgatgcaaatggtgaaagggtggtcctgggtaaaggcacatatgggatcgtgtacgccggacgcgacctctctaatcaggtacgaattgctatcaaggagattcccgaaagggactctcggtattcccagcctctacatgaggagatcgctctgcacaagtatctgaaacaccgaaatattgtgcagtaccttggtagtgtgtcagaaaatggatatattaaaatctttatggaacaagtgcccggtggttcactgtctgctttgcttagatctaaatggggccctatgaaggagccaacaattaaattctacaccaaacagatcctggaaggcctcaagtatctgcacgaaaaccagatagtgcaccgtgacatcaagggggataacgtgctggtgaatacttattcgggcgtagtgaaaatatcagactttggcacaagcaagcggctggcaggtgtaaatccctgtacggagacatttaccggaactttacaatacatggccccggaaataatcgaccagggaccccgcggctacggagcaccagcagatatctggtccctgggatgcactatcatcgaaatggccacgtccaagccacccttccatgagctcggagaaccacaggctgccatgttcaaggtgggcatgtttaagatccaccctgaaatccctgaggccttatcggcagaagcaagagctttcatcctctcgtgcttcgagcctgaccctcacaagcgtgctactaccgccgaactgctccgcgagggtttccttaggcaggttaacaagggtaagaaaaatcgaatcgcgtttaagcccagcgagggccctaggggggtcgtgctcgccctccccactcagggggaacccatggctacttccagttcagagcatggttccgtctccccagatagcgacgctcagccagacgcactgtttgaacgtacccgtgccccaaggcaccacctaggccatttactctcagtcccagatgagtcttcggcattggaagacaggggactggcctcaagtcccgaagatagggaccagggtttgtttctgcttcggaaggacagtgagagaagggcgattctgtataaaatcctctgggaagagcagaatcaggtcgcctctaacctccaggaatgtgtggcgcagtccagcgaagagctacaccttagtgttggccacatcaagcagattattggtatcttgcgggatttcattcgaagcccggaacatcgcgttatggcgactacaatttctaaactaaaggtggacttagacttcgacagcagtagcatctctcaaattcaccttgttctcttcggattccaggatgcagtcaacaaaatcctgcgcaatcacctcattcgcccccactggatgttcgccatggacaacataatccgacgggccgtccaggccgccgtaaccatactgatccccgagctgcgggcccactttgagcctacatgtgaaacagaaggagtggacaaagatatggacgaagccgaggagggttacccccccgccaccgggcctggccaagaagcgcagccccaccagcagcatctctctctgcagctcggcgaactccggcaggagacaaatcggctgttggagcacctggtggagaaggagagagagtaccagaacctgttacgtcagaccctcgagcaaaagacccaagaactctatcatctgcaattgaagttgaagtctaattgtatcacagagaacccggccggaccatatggccagcgcactgacaaagagctgatcgactggctgaggctccagggggctgacgccaaaacgattgaaaagattgtggaggaaggctacacactgtctgatatcttgaatgagatcaccaaagaggacttacggtaccttcgattgcgcggaggtctgttgtgccgcctgtggagcgctgtgtcacagtaccgtcgcgcacaggaagccagtgaaacaaaagataaggcctag

SEQ ID NO: 124772 - DNA, 4677 bp, synthetic construct
  misc_feature 1..4677: note = Description of Artificial Sequence: Synthetic coding sequence
  source 1..4677: mol_type = other DNA
atgagagaggcagctgccgccttggtgcccccacccgccttcgctgtcaccccagctgccgctatggaggagccccccccacctccccccccccccccccctcctcccgagccagaaaccgagtccgagccggaatgttgcctcgctgcgcgccaagagggcacgctgggggattctgcttgcaagtcacctgaaagcgatctggaggacttctccgacgaaactaatacagagaatctttacggaacttccccaccttcaacccccaggcagatgaagcggatgagcactaagcatcagcggaacaacgtcgggcggccagcttcaaggagtaatctgaaggagaagatgaatgctccaaatcagcctccgcacaaagacacagggaagaccgtagaaaacgtggaggagtacagctataagcaagagaaaaagatccgagctgccctgagaactaccgagcgtgatagaaagaaaaatgtgcagtgctctttcatgttggattccgtgggagggtctctcccaaagaaatcaatacctgatgtggatctgaacaagccgtatttatcgctgggctgctccaatgccaagctccccgtcagcgttcccatgccaatcgcacggcccgctaggcagacaagccggacagactgccccgcagaccgcctcaaattcttcgagactctgcggctacttctgaagctaacttctgtgagcaaaaagaaggacagagagcagagaggtcaggaaaacactagtggattttggcttaacaggtcaaatgagttgatatggctcgaactgcaagcttggcacgcaggccgaactatcaatgatcaggacttttttttatacacagccagacaagccatccctgacattatcaacgaaatcctcaccttcaaggtagactacggatcttttgcctttgtccgagatagggcaggctttaacggcactagcgtagagggccagtgtaaagccactcccgggactaaaatcgtgggttacagcacacaccacgagcacttgcagcgacagagggtgagctttgagcaggtgaaacggattatggagctgcttgagtacattgaggcgctgtacccttcactgcaggcccttcagaaggactatgagaagtacgcagctaaggactttcaggatcgcgtccaggccctgtgtctgtggctgaatattacaaaggatttgaatcagaaactccgcatcatggggacggtgctgggtattaagaacctgagtgacatcgggtggcccgtcttcgaaatcccttcacccagacccagcaaagggaatgagccagaatacgagggtgacgacacagagggggagctcaaggagctggaaagtagcacggatgaatccgaagaagagcagatcagcgatccccgcgtgcctgagatccgccagccgatcgataactccttcgacatccagagccgggactgtatctccaagaagttagaaagacttgagtccgaagacgacagcttgggatggggtgctcctgactggagtaccgaggcaggattttctcggcactgtttgacaagtatctaccggccattcgttgacaaagccctgaagcaaatggggcttaggaaactcattctgaggctgcacaaacttatggacggctcactgcagagagctcgcatcgctcttgtgaagaacgataggccagtggagttttctgagtttccggaccctatgtggggtagcgattacgttcagctgtctcgcacccctccatcctccgaggagaagtgcagcgcagtgtcctgggaagagctgaaagctatggacttgcctagctttgaaccggcttttctcgtgctgtgtcgggtgctcttaaacgtgatccacgagtgcctgaaactgcgtctggagcagcgccctgctggtgagccatctttgcttagtatcaagcaactggtgcgggagtgcaaagaagtcttgaaaggcggcctgcttatgaagcagtactatcaattcatgctacaagaagtgctggaggacctcgagaagccagattgtaatatcgatgccttcgaggaagatcttcacaagatgcttatggtatacttcgactacatgcgttcctggattcagatgcttcagcagttaccccaggcctcccacagcctgaaaaacctacttgaggaggaatggaatttcacgaaagagatcacacattatatccggggcggcgaggctcaggctgggaagctgttttgcgacattgcaggaatgctactgaaatccacagggtctttcctggaattcggtctccaggagtcatgtgccgagttctggactagcgctgatgattcatctgcctctgatgagattcggcgctcagtgattgagatttcacgtgctctgaaggagctttttcacgaggcaagagaaagagcatctaaagcactgggctttgctaaaatgttaagaaaggacctagagattgctgcggaattcaggctctctgctcctgtaagggatctgctagatgtgctcaagtcaaaacagtacgttaaggtccagatcccggggctcgagaatcttcagatgttcgtgcccgacacactggccgaggaaaaatcgatcatcctccagctattgaacgccgcagcaggaaaggattgttctaaagacagcgatgatgtgttgatagatgcctatctcctcctgacgaaacatggagaccgagcccgagatagcgaggatagctgggggacttgggaggcccagcctgtcaaggtcgtgcctcaggtggaaacagtagacactctcagatcaatgcaagtggataacctactgctggttgtgatgcagtctgcccacttgacaatccagcggaaagcgttccagcagtctattgaaggccttatgactttgtgccaggagcagacttcctcacaacccgtcattgccaaggccttgcaacagctgaagaacgatgcactagaactgtgcaacaggattagcaacgccattgatcgtgtcgatcatatgtttactagcgagttcgatgcagaggtggatgagtcagagtccgtcaccctacagcagtactacagggaagccatgatacaaggctataactttggcttcgaatatcataaagaagtcgtgaggctaatgagtggcgagttcagacagaaaattggagataagtacatctcattcgcccggaagtggatgaactacgttttgaccaagtgtgagagcgggcgggggaccaggccccgatgggcaacccaaggcttcgatttcctacaggccatcgagccggcgtttatctcagccctacctgaagacgactttctgtctctgcaggccttgatgaacgagtgcatcggccacgtaattggaaagccacactctcctgtgacaggactttacctcgcaattcacagaaattcccctagaccaatgaaagtccctagatgtcattctgatccccccaatcctcatctgatcatccccacccctgagggattcagaggatcatccgtgccagaaaatgaccgactggcctcaatcgccgccgagctccagtttaggtcactgtcaagacactcctcacctaccgaggagagagacgagccggcctacccccgcggcgactcctccgggtctacgagaagatcttgggagctcagaactctcattagtcagagcaaagacactgctagtaaactcggtcctatcgaagccattcagaagagtgtgaggctcttcgaggagaaacgctaccgcgagatgcgccgtaaaaatatcattgggcaggtttgcgataccccaaagagctatgacaacgtgatgcatgttggccttaggaaggtgaccttcaaatggcaacgcggcaacaaaatcggtgagggacagtatgggaaggtgtacacgtgtatctcggttgacaccggggaactgatggcaatgaaggagatcaggtttcagcctaatgaccacaagactatcaaggagaccgcagacgaactcaaaattttcgagggcatcaagcacccgaatttagtgaggtattttggtgtggagctccatcgggaggaaatgtacattttcatggagtattgcgatgaaggaacgctggaggaggtgtcccggctgggactgcaagaacacgtgatcaggctctacagtaagcagattacaattgccataaacgttttacacgaacatggcatcgttcaccgagacattaaaggggccaacatatttctcactagctccggcctgatcaaattgggagatttcggttgttcggttaagctgaaaaacaacgcccagactatgccaggcgaagtcaactctactcttggaaccgcagcatatatggctccggaagtaatcactagggccaagggcgagggacacggtagagctgcagacatctggtctctgggctgcgtggtaatcgagatggtgaccggtaagcggccctggcacgaatatgaacataatttccagatcatgtacaaagtgggcatgggacacaagccacctataccagagaggttgagcccagaaggaaaagattttctgagtcactgcctcgagagcgatccaaagatgaggtggactgcctctcagttactggatcacagttttgtcaaggtctgcacagacgaggaatag

SEQ ID NO: 124773 - DNA, 4827 bp, synthetic construct
  misc_feature 1..4827: note = Description of Artificial Sequence: Synthetic coding sequence
  source 1..4827: mol_type = other DNA
atgcgcgaggctgccgcggctctggtgcctcctcccgccttcgctgtgacccccgcggccgcaatggaggagcccccccctccgcccccaccccccccccctccaccggagcctgagacagagtccgaacctgagtgctgtctggctgcccgccaagaagggacactcggcgactctgcatgcaaatcccctgagtctgaccttgaagacttcagtgacgaaactaatacggagaacttgtatggcacttctccaccctcgacaccacgccagatgaagcgcatgagcacgaaacaccagagaaataacgttggccggccagcttccagatctaacctcaaggagaagatgaacgcgccgaatcaacccccacacaaagataccggcaaaacagtggaaaacgttgaagagtacagctacaagcaagaaaagaaaattagggctgctctgcggaccacagaacgtgatcggaaaaagaacgttcagtgcagttttatgctggattcagttgggggctccctgcccaaaaaatcaatccccgacgtcgatctgaataaaccttacttatcattaggctgctctaatgccaagctgcctgtgagcgtgcctatgccaatcgctcgccccgctagacagacttcccgcacagactgtcctgccgacagattaaagtttttcgaaacccttagacttctgttgaagctcacctctgttagcaagaaaaaagaccgcgagcagcgtgggcaggagaacacaagtggcttttggctgaatcgatctaatgagctcatctggctggagttacaggcttggcatgcaggacgcacaatcaatgaccaggacttcttcctctatactgcccgacaggcaattccggacattattaatgagatactcacttttaaagtcgattacgggtcatttgcctttgtgagagaccgggcaggcttcaacgggacttctgtggaaggtcagtgtaaggcaacgcctggaaccaagattgtaggctacagtacgcatcacgaacacttacagaggcagagggtaagttttgaacaagtgaagaggatcatggagctcctagagtacatcgaagccctatacccgtctttgcaagcccttcaaaaagactacgagaaatatgcggccaaggactttcaggaccgcgttcaggccctttgtttgtggttaaacattacaaaggacctcaaccaaaaactgaggattatggggacggtcctcggaataaaaaatttatctgacataggttggccagtgttcgagattccaagtccgaggcctagtaaaggcaatgagcctgaatacgagggcgacgatacggagggcgagctcaaggagcttgaatcatccactgatgaaagtgaggaggagcagatctcggaccctcgtgtgcccgaaattagacagccaatagataattctttcgatattcagtccagggattgtatctccaagaagctcgagaggctggaatctgaggacgactctctgggttggggcgcgcccgactggtctaccgaagctgggtttagcaggcattgtttaacgtcaatctacagaccttttgtggataaggccctgaaacagatgggcctgagaaagctgattctgcggctccacaaattgatggatggctccctgcaaagagctcggatcgctctcgtgaagaacgataggcccgtcgagttctcagaatttcctgatcctatgtgggggagcgattacgttcagctgagcaggactcccccctcttctgaagagaaatgttccgcagtatcttgggaagaactgaaggccatggaccttccctcattcgagccagccttcctggtactgtgcagagtgctcctgaacgtaatacacgagtgccttaaattgaggctggagcaaagacccgcgggagaacctagcctcctgagcattaaacagttggttcgagaatgtaaagaagtgctgaagggcggcctgctgatgaagcaatactatcagtttatgcttcaagaggtcctcgaagatttggaaaagccagattgcaatatagacgcattcgaagaagatttacataaaatgctgatggtgtattttgattacatgaggtcttggatccaaatgcttcagcagctccctcaggcctctcactcgttgaagaacctcctcgaggaggaatggaattttaccaaagagattacccactatattaggggtggcgaggcccaagctgggaagctgttctgtgacattgcaggtatgctgttgaaatccactggcagcttcctggagttcggattgcaggaaagttgcgcagagttctggacctcagccgacgactcatcagcctctgatgaaatccgaagatccgtgatagaaattagtcgggccctgaaggaactgttccatgaggcacgagaacgtgccagcaaagccctggggttcgcgaagatgctgcggaaagacctggagatcgcggctgaattcagactgtctgcaccggtacgggacctcctggacgtattgaagagcaagcagtacgttaaggtccaaattcccggattggagaacctgcagatgtttgttcccgacacgctggccgaggagaagtccattatactgcagttactgaacgcagccgctgggaaggattgctccaaggattccgatgacgtattgatagatgcatacctgctgctgaccaagcatggggatcgtgctagagactcagaggactcctggggcacttgggaagctcagcctgtcaaggtggtgccacaggtcgagacggtcgatacactgcgaagtatgcaggttgacaatttactgctggtcgtaatgcagtccgcccatctcaccatccagcgcaaagcctttcagcagtcaattgaagggctgatgacattgtgtcaggagcaaacctctagccagcctgtaatcgcaaaggcactgcaacagttgaagaatgacgccctggagctgtgcaatcgtattagcaatgctatcgatcgcgtcgaccatatgttcacttctgaattcgacgcagaagtagacgagagtgaaagtgtcactctgcaacaatattatcgagaagcaatgattcagggttataattttgggttcgagtaccacaaagaagtcgtgaggcttatgagcggggagttccgccagaagatcggcgacaagtatataagctttgcacgcaaatggatgaattacgtgcttactaaatgtgagtcaggacgggggacacgcccccggtgggccactcaaggattcgacttcttgcaggccatcgagcccgcctttattagtgccctccctgaggacgattttctttctctacaagccttgatgaatgaatgtatcggacatgtcatcggtaaaccccattcccccgtcactggtctgtatctcgccatccataggaatagtccgagacctatgaaagtcccgcgttgccactccgatcctccaaaccctcaccttattatccctacccccgagggtttttctacacgctccatgccaagtgatgccagaagccacggcagcccagccgccgctgcagctgccgctgcagcagccgtagctgccagcagaccatcaccctccggtggagatagtgtcttacccaagagcatctcatccgcgcacgacaccaggggctctagcgtcccggagaacgaccggttggcaagtatcgctgctgagctccagttccgctccctgtctcgtcactcctcaccgacagaagagcgcgacgaaccagcatacccacgcggggactcaagtggcagtacacggcgttcatgggagttgagaacccttattagtcaaagcaaggacactgcatctaagctaggccccatagaagccatacaaaagagcgtacggcttttcgaagagaagagataccgcgagatgaggcgaaaaaatatcatcgggcaggtttgtgataccccaaagtcctacgataacgtgatgcatgtgggcttgaggaaggtgaccttcaagtggcagcgcggaaacaagattggggagggccagtacggaaaagtttacacctgcatatcagtcgacactggggagttgatggctatgaaagagattaggttccagccaaatgaccataagaccataaaggagactgccgacgagctcaaaatatttgaaggcatcaaacaccctaacctggttcggtatttcggcgttgaactgcaccgggaggaaatgtacatcttcatggagtattgcgacgagggaacactggaggaggtgtccaggctaggcctgcaggagcacgtgattaggctgtacagcaaacagatcacaattgctatcaacgtgttgcatgaacacggcattgtgcaccgcgacatcaaaggagccaatatcttcctcacatcctcaggcctgatcaagctaggggacttcgggtgctcagttaaattaaagaataacgcacagaccatgcctggagaagttaattcaactctcgggacagctgcctacatggccccagaggtgataacccgcgcaaaaggggagggccacggccgggccgccgatatttggagcttaggatgcgtggtgatagaaatggtgaccgggaagcgtccctggcacgagtatgaacacaacttccaaataatgtacaaggtagggatgggccataagcccccgatccctgagaggttatcccctgaaggcaaagatttcctctcacattgtctcgagtccgacccgaagatgcgatggaccgcttctcagctgttagaccactcattcgtgaaggtctgcaccgatgaggaatag

SEQ ID NO: 124774 - DNA, 4497 bp, synthetic construct
  misc_feature 1..4497: note = Description of Artificial Sequence: Synthetic coding sequence
  source 1..4497: mol_type = other DNA
atgcgtgaggctgctgcagccctggtgccacctccagcttttgctgtgacccctgctgctgccatggaggaaccccctccccctcctcctccacccccacctccccctgagccagaaaccgaatccgagcccgagtgctgtctggcagcccgccaggagggaactttgggggattcagcttgcaaatcgccggaatcggacctggaggattttagtgatgagactaacaccgaaaatctttacgggacctcccctccctctacacctcgccagatgaagcgcatgtccactaaacatcagcggaacaatgtgggtcggcccgccagcaggagcaacttgaaggagaaaatgaatgcacccaaccagcctccacacaaggataccggaaaaactgttgaaaatgtggaagagtattcttacaaacaggagaagaaaatccgcgccgcccttagaacaacagaaagggataggaaaaaaaacgtccagtgctcgtttatgctggattccgtcggaggttcactgcccaagaagtctattcccgatgtcgacttaaacaagccatacctgtcattaggatgttcaaacgccaagttacctgtcagcgtcccaatgcctattgcgagacccgcacgtcagacttctagaacggactgtccagcagacaggttaaagttctttgagaccctacgtctcctactaaaactgaccagcgtctctaaaaaaaaggaccgagagcagcggggtcaggaaaacacctccggcttttggctgaataggtccaacgaattgatctggctcgagctgcaagcatggcacgctggacgcactatcaacgaccaggactttttcctgtacaccgcaagacaggctatcccagacatcataaatgagatactgacgtttaaggtggactacgggagttttgccttcgtgcgagatcgggctggatttaatggaacaagcgtagagggacagtgcaaggctacacccggcacaaaaattgtaggatactccacacatcacgagcatctgcagcggcagcgggtgagcttcgagcaggttaaaaggatcatggagctgctagagtacatagaagcgctctacccgtctctgcaggcactgcagaaagattatgagaagtacgccgccaaagatttccaggatagggtacaggcactgtgtttatggctaaacattacaaaggacctgaaccagaagctgcggataatgggaacggtgctgggcataaaaaacctgagtgatattgggtggccggtgttcgaaataccctctcctcggcccagcaaggggaatgagcctgagtacgagggggacgacaccgagggagagctgaaggaactggagtctagcactgacgaaagcgaagaagaacagatctccgatcctcgcgtgcccgaaataaggcagcccatcgacaacagcttcgatattcagagtcgcgattgtatttccaagaagcttgagaggctggagagtgaagatgactccctgggttggggggcacctgactggagcacagaggctggcttttctagacactgcctaacatccatctacaggcctttcgttgataaggccctgaagcagatgggactgcgcaaactgatcctccgtctgcacaagctgatggacggcagcctccaaagagcccgcattgctctcgtgaaaaatgatagacccgttgaattctccgagttcccggacccaatgtggggatctgactatgtccagctatctaggactccacccagcagtgaggaaaaatgttcagccgtttcctgggaggagctaaaggctatggaccttcctagcttcgagccggccttcctcgtgctctgccgcgtgctgctgaacgttattcacgagtgcctaaaattgcgcctggagcagagacctgctggcgaacccagcctactgagcatcaaacagctggtgcgggagtgcaaagaagtgctgaagggcggccttcttatgaaacagtactatcagtttatgctgcaggaggtgttggaggacctcgaaaagccagactgcaacatagacgcgttcgaagaagacctgcacaagatgctgatggtttacttcgattatatgcgctcctggatccagatgctacagcagctgccacaggcaagtcactcactaaaaaacttgcttgaagaagagtggaatttcaccaaagagattacacattacattagagggggcgaagcacaagccggaaagcttttttgtgacatcgccggcatgcttctaaagtccacaggaagtttcctcgaatttggccttcaggaaagctgtgcagaattttggacatccgcagacgactctagtgcatcggatgagattagacggtccgtgatagaaatttcccgtgccctgaaagagttatttcatgaggcaagggagcgggctagtaaagccctggggttcgctaagatgcttaggaaggacctcgagatcgccgcggagtttagactctcagctccagttcgagatctgctcgacgtgctgaaaagtaaacagtatgtgaaagtgcagatcccaggattggaaaatttacagatgttcgtgcctgatactctggcagaggaaaaaagcatcatactgcagctgttaaacgccgctgcggggaaggactgctccaaggactcagacgatgttctaattgacgcttatctgctgttaaccaagcacggcgaccgggccagggacagcgaggactcctggggcacatgggaggctcaacctgtgaaagtcgtacctcaggtggaaacagtggacacgctccgaagcatgcaggtcgacaatctattgcttgtggtgatgcagtccgcccacctgactattcagcggaaggcatttcagcagtctattgaggggctcatgacgctgtgtcaagagcaaacatcttcccagcctgtcattgctaaagccctgcaacagctgaagaatgatgcccttgagctgtgtaaccggattagcaacgccattgaccgcgtggatcatatgttcacctccgaattcgatgcagaagtcgatgagagtgaaagtgtcactctgcagcagtattaccgggaggctatgatccagggttacaatttcgggtttgaataccacaaggaggtcgttcggcttatgagtggcgagttccggcagaagataggcgataagtatatctcctttgcccgcaagtggatgaattacgtcctgaccaagtgtgagtctggacgcggcacgcgacctcgctgggctactcagggttttgattttctacaggctatagaacctgcctttatatcagccttgcctgaggacgacttcctgtctctgcaggcactcatgaatgagtgcatcggacacgttatcggcaagccacacagccccgttacaggcttatatctggcaatacatagaaactcaccacgaccaatgaaagtccctcgatgtcattccgatcctccaaacccgcacttaatcattcccactcctgagggtttccgcggaagctccgtccccgaaaatgacagacttgcctctatcgctgcggagctgcagtttcgcagcctaagccggcactcttctccgactgaagagcgggacgagcctgcttacccacgcggcgatagtagtggatccacacggaggagctgggagctgcgcactttgatcagccagtcaaaggataccgcttcaaagctgggccctatcgaagcgatccagaagagtgtccggttattcgaggaaaaaagatacagagaaatgagacgcaagaatattataggacaggtgtgcgataccccaaagtcttacgataacgtcatgcacgtaggattaagaaaggtgacctttaaatggcagaggggtaataaaatcggagaaggacagtacggaaaagtctacacttgcatttctgtggataccggggaactgatggccatgaaagagataagatttcaacccaatgatcataaaaccattaaagagacagccgatgagctgaagatctttgaggggataaaacaccccaacctggttcgatattttggtgtcgagcttcacagagaagagatgtacatcttcatggaatactgtgatgagggtactctggaggaagtgagtaggctgggtttacaggaacacgtgatccggctttacagtaagcagatcaccatcgctatcaatgtactccacgagcatgggatagtgcacagggacatcaagggtgccaacatttttcttaccagcagcggcctgatcaagctgggtgactttgggtgtagcgttaagttgaaaaacaacgcccagacaatgcccggcgaggttaactccaccctggggactgctgcctacatggcccctgaagtgataactcgcgcaaagggagagggacatggccgagccgccgacatctggtccctgggatgcgtcgtgattgagatggttacaggaaaaatctgcaaggacaccgaatag

SEQ ID NO: 124775 - DNA, 324 bp, synthetic construct
  misc_feature 1..324: note = Description of Artificial Sequence: Synthetic coding sequence
  source 1..324: mol_type = other DNA
atggaagagcctcccccgccaccacccccaccacctcccccaccggagccagagactgaaagtgaacctgagtgctgcctggctgccagacaggaagggacactgggggacagtgcctgtaagtcacctgagagcgacttagaggatttctccgacgagacgaacaccgagaacctttacggtacctcaccaccgtccactccaagacagatgaaaagaatgtcgacgaagcaccaaagaaataacgtgggtcgacccgccagtcgtagtaatttgaaaggtgtccggcagatttctcatgctgtttcttcttctctcaattag

SEQ ID NO: 124776 - DNA, 1866 bp, synthetic construct
  misc_feature 1..1866: note = Description of Artificial Sequence: Synthetic coding sequence
  source 1..1866: mol_type = other DNA
atggaacaggtacccggcgggtcactgtccgcgcttctgcgctccaaatgggggccattgaaagataatgagcagactatcggcttttacaccaaacagatcctggagggattgaaatatctgcacgataatcagatcgtgcaccgagacatcaagggcgataacgtgctcatcaatacctatagcggagtcctaaagatcagcgacttcgggacatcaaagagactcgcaggaataaatccatgtaccgagactttcaccggaaccctgcagtacatggctcccgagatcatcgataaggggcctcggggctatgggaaggccgccgatatctggtcattaggttgtaccatcatcgagatggccacaggaaagccccccttttacgagctgggggagccccaggctgctatgttcaaagtcgggatgtttaaggtgcaccccgaaattcccgagtccatgtccgctgaggcaaaagccttcatccttaagtgttttgaaccagaccccgataaacgggcatgcgcaaacgatctgctggtcgatgagtttctcaaggtaagttctaagaaaaagaagactcaacccaagctgtcagccctgtcagctggcagtaatgaatatctgagaagcatcagcttgccggtgcctgtgctcgttgaggatacctcttcatccagcgagtacggctccgtctcacctgacaccgagctgaaggtcgaccccttcagtttcaagacgagagccaagagctgcggcgaaagggacgtcaaaggtattaggactctgttcctggggatccctgacgagaatttcgaagatcattctgcacctccctcccccgaagagaaagattccggcttctttatgctcagaaaagattccgagaggcgggctacactgcacagaatcctgactgaagatcaggacaaaattgtgagaaatctgatggagtctctcgctcagggagctgaagagccaaagctcaaatgggagcacatcacgaccctgatcgcctccctgagagaattcgtcagatcaaccgaccgaaagattatcgccaccaccctgtctaaactgaagctggagctggatttcgactctcatggaatttcccaagtgcaggtcgtgttattcgggttccaggatgctgtcaacaaagttctgcggaatcataacatcaaaccacactggatgtttgccctggactcaattatccgtaaagcagtgcagacggcgatcacaattctggttccagagctccgcccgcatttctctttagcctccgagagcgacactgccgatcaggaagacctagacgtggaagatgatcatgaggagcagccgagcaatcagaccgtgagacgcccccaggctgtgatcgaggatgctgtcgccacttctggcgttagcactctatctagcactgtgtcccacgattcacagtccgcccaccggagcctcaacgttcagttgggccgaatgaaaattgagactaatagactgctcgaggagctggttcggaaagaaaaggaattgcaggcgcttctgcatagggcgattgaggaaaaggaccaagagattaagcatctaaaactcaaatctcagcccatcgagatacctgagctgcccgtatttcaccttaactccagcggtacaaatacggaggacagcgagcttactgattggctcagagttaacggcgcggatgaggacaccatctctcggtttttggcggaagattatacgctgctggatgtcctatactacgtcacccgggacgacctgaaatgcctgcgccttcggggtggcatgttgtgtacactctggaaggctataatcgacttcaggaacaagcagacctag

SEQ ID NO: 124777 - DNA, 4125 bp, synthetic construct
  misc_feature 1..4125: note = Description of Artificial Sequence: Synthetic coding sequence
  source 1..4125: mol_type = other DNA
atgagcaccgaagctgatgaggggattactttcagcgtgccacctttcgcaccgtccgggttctgcacgatacctgagggcggtatatgtaggcgaggtggagctgcagccgtaggcgagggggaagagcatcagctcccgccccctcctccagggtccttttggaacgtcgaaagcgctgctgcacccggcatcggatgtcccgctgccactagcagtagcagtgcaactcgggggcggggaagttctgtgggtggcgggagccgaagaaccaccgtcgcttacgtaatcaatgaggcctcgcaaggccagctggtagtggcagaatctgaggcattgcagagcctgcgcgaggcctgcgagacagtgggcgccacactggaaaccttgcattttggaaagctggattttggagaaacaaccgtgctggacaggttttacaatgccgacatcgccgtcgttgagatgagcgacgccttcagacagccctcattattctaccacctaggcgtcagagaatcattttcaatggctaacaacatcatattgtactgtgacaccaactctgactcactgcagagtcttaaggaaatcatatgccagaagaatacaatgtgcactgggaattacactttcgtgccttatatgattacaccacacaataaagtgtattgttgtgatagttcttttatgaaggggctgaccgagctcatgcaaccaaacttcgagctgctcctagggcctatatgtcttccactggtggacaggttcatccagttattaaaggtggcacaggcgtcatctagtcagtactttcgagagagcatcttaaatgacatccgcaaagcacgaaacttatatacaggcaaagaactggctgccgagctagcgaggatccggcagagggtagataacattgaggtgcttactgcggatatagtaattaatctccttttgtcttaccgtgacatccaagactacgattcgatcgtcaagctcgtggaaaccttagaaaagcttccaaccttcgatctggccagccaccatcacgtgaaatttcattatgcatttgcgctgaaccgacgtaatctccctggtgatcgggccaaagcattagatatcatgattcccatggttcaaagcgaggggcaagttgcttccgacatgtattgcctggtcggacgaatatacaaggatatgttcttggacagtaattttaccgacaccgagtcacgggaccatggggcttcatggtttaagaaggcgttcgagtcagagcccacactgcaatccggaattaactatgcagtactgttgcttgccgcgggacaccaattcgagtctagcttcgagcttcgaaaggtcggcgtgaagctttcctccctactgggtaaaaaaggcaacctagagaagctacagtcctactgggaggtcgggttctttcttggagcttcggtgttggccaatgaccatatgcgggttatacaagcctctgaaaagctgttcaagctgaaaacacctgcttggtacctgaagagtatcgtggagacgattttgatctacaagcactttgtaaagttgactactgaacagcccgttgccaaacaggaactcgttgacttttggatggattttttagtggaagccaccaaaaccgatgtgacggtagtcagattccctgtgctgatcctggagcctactaagatctaccagccatcttacctttctatcaacaatgaggtggaggagaagactatttcgatctggcatgttctccccgatgacaaaaaaggcattcacgaatggaacttcagtgccagtagcgtcagaggagtgtcaatttccaagtttgaagagcgctgttgcttcctctatgttctgcataactccgacgactttcagatctacttctgtaccgaattgcactgcaagaaattttttgaaatggttaatacaattacagaggaaaagggtaggagcacagaagaaggcgattgcgagtccgatcttttagagtacgattacgagtatgatgaaaatggagatcgggtagtcctgggtaagggcacctatggaatagtgtacgccggcagagacctgtctaaccaggtgagaatcgcaattaaggagatccccgagcgtgattcccgctactcccaacctctgcacgaggagattgctcttcacaagcacctgaagcataaaaatatagttcagtacctgggcagcttctccgaaaacgggtttataaaaatcttcatggagcaggtgcccgggggctccctttctgccctgttaagaagcaagtgggggcccctaaaggacaatgagcagaccattggattttataccaagcagatcttggagggcctgaagtaccttcacgacaatcagatcgttcacagggacattaagggagacaacgtcctgataaatacttactccggcgtgctcaagattagcgatttcggtacctcaaaacgcctcgctggcatcaatccctgcaccgagacctttaccggtacactccaatacatggcccccgaaattatcgataaggggccgagagggtacggaaaagcagcggatatatggtcactgggctgcactattatcgaaatggctaccggcaaacctcccttctacgagcttggtgagcctcaagccgctatgttcaaggttgggatgttcaaggtacacccggaaatccccgaaagcatgtctgctgaagccaaggcctttatccttaaatgttttgaaccagacccagataagcgggcgtgtgctaacgatctcctcgtggatgagtttctgaaagttagctctaaaaagaagaaaacacagcccaaactgtcggctctgtcagctgggtccaacgagtatctgcgatctatcagccttcctgtgcccgtcttagtcgaggatacatcatcttcttctgagtacggcagcgtatctcctgacactgagctaaaagtggacccctttagtttcaaaacaagagcgaagtcttgcggcgagagggacgttaaaggaatccggacactgttccttggcattcccgatgagaatttcgaggaccactccgctccaccctcgccagaagagaaggatagtggctttttcatgttgcgaaaggacagcgaacgccgcgcaaccctgcaccggattctgacagaggatcaggacaagatcgtcagaaacctgatggaatccttggctcagggggccgaagagccaaagctcaagtgggagcatattacaactcttatcgccagcctgcgcgagtttgttaggtccaccgaccggaagatcattgctacaaccttatctaagctgaagttggaactggattttgattcccatgggatcagccaggtgcaagtggtcctgtttgggttccaagatgccgtcaacaaggtgttgagaaatcataatattaagccacactggatgttcgccctggacagtattattagaaaagcagtgcagaccgcgattaccatcctggtgccagaactccgtcctcacttttccttagcttccgagagcgatactgcggaccaggaggacctcgacgtggaagacgatcacgaggagcagccaagtaaccaaaccgttcgcagaccccaagctgtgatcgaggacgccgtcgccacgtcaggagtttctaccctgtcctcaacggtttcccacgatagccagagtgcacacagatcactgaacgtccaactcgggcgaatgaagattgagactaatcggctgctagaggagctggtgaggaaagagaaagagctgcaggctctcctgcacagggctatagaagaaaaagatcaagaaatcaaacatttgaaactcaagtctcagcctatcgaaatacctgaactcccagtttttcatctgaactcctcaggcacaaatacggaagatagcgagttgacagactggctgagggtaaatggggcagatgaggacacaatcagtaggttcctagcggaagattacaccctgcttgacgtactgtactatgtcacccgagatgatctgaaatgcctaaggcttcggggagggatgctgtgcaccctgtggaaagccataattgattttagaaataagcagacctag

SEQ ID NO: 124778 - DNA, 3771 bp, synthetic construct
  misc_feature 1..3771: note = Description of Artificial Sequence: Synthetic coding sequence
  source 1..3771: mol_type = other DNA
acattgcagcgagcctcaggagctgctactgaggcccccagaagaagcgagccacccccagggtcaggcgtgccaagcggcgagagagcccccgaacgtcggcggagacgaggaggagagggcgcagcacgcgacggctcttgcctggcacggagggcccgatcatctcccgagctttggctggcaaggagatgtggatgggccggagatgccgccgccgttgccgcgaggccaggtgagatgtccactgaagcggacgagggaatcacgtttagcgttcccccctttgccccctccgggttctgcaccattccagagggaggcatatgtagacggggtggtgccgcagcagtcggagagggggaggaacaccaacttcccccccccccacctggatctttttggaatgtggaaagcgctgcagcccctggaatcgggtgtccagctgcaaccagtagtagttccgcaacacgagggagggggtcatccgtcgggggtggatcccggagaacaaccgttgcctacgttatcaacgaagcctctcagggccagctcgtggtggcggagtctgaggcattacagagcctgagagaggcttgtgaaactgtcggggccactctcgagactctgcacttcggtaagttagacttcggcgagacaaccgtgctggatcgcttctataacgccgatatagctgtagttgaaatgagcgatgcatttagacagcccagcttgttttaccacctgggtgtgagggaaagcttctcgatggcgaacaacatcatcctctactgcgatacgaatagtgactccctgcagtcgcttaaagagataatctgccagaaaaacactatgtgcaccggaaattatactttcgtaccttatatgatcaccccccacaacaaggtttactgctgtgactcgtcgttcatgaagggcctgaccgaactgatgcaacccaattttgaactgctactcggtcctatttgtctcccgctggtcgatcgtttcattcagctgcttaaggtcgcccaggctagtagtagccagtatttcagggagtctattctgaatgacattcgtaaggctcgcaacctctacaccggcaaagaattagcagcagaactggcaaggatcaggcagcgcgtcgacaatattgaggtgctaaccgccgatatcgtgatcaacttgctgttgtcataccgtgacatccaggattatgacagtatcgtgaagttggtggagaccctggaaaaactgccaacatttgaccttgcatcacatcaccacgtcaagttccactacgccttcgccctaaaccgccgcaacctcccgggggaccgcgccaaggctcttgacattatgattcctatggttcaatcggaaggacaggtggcatccgacatgtattgtctcgtgggacgcatatacaaggatatgttcctggactctaactttacagacaccgagtcacgggaccacggagcgtcatggttcaaaaaggccttcgagagcgaaccaaccctgcagtcaggaataaactacgccgtgctcctgctagcggccggccatcagttcgagtcaagttttgagctccgaaaggtgggggtgaaacttagctccctgctgggcaaaaagggcaacctggaaaagctccagtcgtactgggaggtagggttcttcctgggcgcctccgtccttgcgaatgaccacatgcgcgtgattcaagcatccgaaaagcttttcaagctaaagacgcccgcctggtatcttaagtccatagtagaaactatcctaatctataagcactttgttaaattgaccaccgagcagcccgtagccaagcaggagcttgtcgatttctggatggatttcttggtcgaggcaacaaagacggacgtcaccgtggttagattccccgtcctgattctcgaacctacaaagatctaccagcctagctacttatctatcaataacgaggtggaagagaaaaccatcagcatctggcacgtgctgcctgacgataaaaaaggcatccacgagtggaattttagcgctagctctgtcagaggtgtctcgatctctaaattcgaagaaaggtgttgttttctgtacgtactccataattccgatgattttcagatatacttttgcacagagctccactgtaagaagttcttcgaaatggtgaacactattaccgaggaaaagggaagaagtacagaggagggggactgtgagtccgatttgctggaatatgactatgaatacgatgagaacggcgaccgggtagtgcttgggaaggggacatatgggatagtgtacgcaggccgggacctctcaaatcaggttcgcattgcaattaaggaaattcccgagcgtgactcacggtactcccagcctcttcatgaggagattgcgctgcacaagcacctgaaacacaagaacatagttcagtacctcggctccttctcggagaatgggtttattaaaatctttatggagcaggtgccaggcggctctctgtcagccctactacggtccaagtgggggcccctcaaggacaatgagcagacaatcgggttctataccaaacaaatcctggaaggtctgaaatacctgcacgataaccagatcgtgcatagggatattaaaggggataatgtgttaattaatacttactcaggtgtgcttaagatatcagactttggtacttccaagagactcgccggcatcaacccctgtacagaaacattcaccggcacacttcagtatatggcccctgaaattattgacaagggtccacggggctatgggaaggccgccgatatttggtcactcggctgtacgataattgagatggcaacaggaaaaccccctttctacgaactgggtgagccccaggccgccatgttcaaagtgggaatgtttaaggtgcatcccgaaatccccgagagcatgtccgccgaggcaaaggctttcatcctgaaatgttttgagcctgacccagataagagggcctgtgccaacgatctgttagtagatgaatttctcaaagtttcctctaaaaaaaagaagactcagcccaaactgtccgatctgagcatcgcccaggccgagtacctgcggtcaatcagcctgccagtcccagtgctcgtcgaggacacttcatcaagcagcgagtatgggtccgtcagccccgacacagagcttaaggtggaccccttttctttcaagactcgcgctaagtcttgcggggagagagacgttaagggtatcaggacactctttcttggcattccagacgaaaacttcgaggaccatagcgcccccccaagccccgaagaaaaggattctggcttttttatgctgcggaaagacagtgaacgacgggcaaccctgcaccggatcctaacagaggatcaggataagatagtgagaaatctaatggagtccctggcccaaggcgctgaggagcccaaattgaagtgggagcatatcacaaccttaatcgcctcactgcgtgaattcgttcggtccactgaccgaaaaatcatcgcaaccactctttcaaaactgaagctggagctggatttcgacagtcatgggatttcacaggttcaggttgtgttgttcggctttcaggacgctgtcaataaggttctgcggaatcacaacatcaagcctcactggatgttcgccttggattccattattaggaaagctgtccagactgccatcaccattttggtgccaggaattaagccctag

SEQ ID NO: 124779 - DNA, 3867 bp, synthetic construct
  misc_feature 1..3867: note = Description of Artificial Sequence: Synthetic coding sequence
  source 1..3867: mol_type = other DNA
atggccgggccctgtccaagatcgggggccgagcgcgctggcagttgctggcaagaccctctagcagtggctctctccagaggtcggcaacttgccgcacctccaggccggggatgcgcacgctcccgcccgctctcggtagtgtacgttcttacacgcgagcctcagcccggtctggaacctagggaggggacggaggccgagccactgcccctgcgatgtttgagagaggcttgcgcccaggtgccaaggccccgcccacctccccaacttcggtccttaccattcggtacgctggaactaggcgacactgccgctctggacgcgttctataacgctgatgtcgtggtcctggaggtttccagctccttagttcagccctccctgttctaccaccttggagtacgcgaatcattttcaatgactaataacgtgctgctgtgctcccaggccgatttacctgatctgcaagccctgcgggaggacgtgtttcagaagaacagtgactgtgttgggagctacaccttaatcccttacgtggtaacagctaccggtcgggtcctgtgcggggacgctggcctgttgcggggcctggccgacggattggtgcaggccggagtcggcactgaggccttattaacccctttggtgggccgcctggccagactgctcgaagccaccccaacagatagttgtgggtacttccgggaaaccattcgtagggatatacgccaagctcgcgaacggttttccggaccccaactgaggcaggagcttgcaaggctccagaggcgcctcgacagtgtggagttgctgtcacctgatatcattatgaacttactcctgtcctacagagacgtccaggattatagtgcaatcattgaacttgtcgaaacactgcaggccctaccaacgtgtgacgtggcagagcagcacaacgtgtgcttccactacacattcgcattgaatagacgcaatcgcccaggagatcgggcaaaggccctgtccgtgctgttacccctggtccagctggaaggatcagtggcgcctgacctgtactgcatgtgcgggagaatatacaaggatatgttctttagtagtggcttccaggacgcaggccatcgggagcaggcgtatcattggtaccgcaaagcctttgatgtggagccctcactgcactcaggcatcaatgctgcagtgcttctcatagccgcaggccaacattttgaggacagtaaggaattaagactgattggtatgaaactgggctgcctgctggctcgcaaaggctgcgtagagaaaatgcagtactattgggatgtgggattttatctgggcgctcagattttagcaaatgacccaacccaggttgtgctggcagccgagcagttatacaaacttaatgcaccgatttggtatctggtatccgtgatggaaaccttcctgctgtatcagcattttcgcccaacccccgagcccccaggcggccctccaaggagggcccatttctggctgcactttttgctccagagttgccagcctttcaagaccgcctgtgcccagggcgatcagtgccttgtactggttttggagatgaacaaggttctgctgcccgcgaagctggaggtgagggggacagacccggtgtctacagtgacacttagccttttagagccggaaacccaggacattccgagctcttggacttttcccgtcgcctctatctgtggggtgtcagccagcaagcgagatgaacgctgctgttttttatacgcactgccccccgcccaggacgtgcagctttgcttcccctcagtgggccactgtcagtggttttgtggcctgatccaagcttgggtaactaacccagacagcaccgcgcccgcagaagaagctgaaggagctggcgaaatgctagagttcgactatgagtacactgaaacgggagaaaggctcgtcctgggaaaaggcacctacggagttgtttatgctggccgggacagacacacccgtgtgagaatcgccattaaggaaattccagaaagggattctcgcttttcacaacctttacacgaagagatagcgttgcataggagattgaggcataagaacatcgtgagatatctgggcagcgcgtctcaaggcggctatttgaaaatctttatggaggaggtgcccggcgggagcctttcctcactgctgcggtccgtgtggggccctctaaaggacaacgagtcaactattagcttttacacccgtcagattcttcaaggcctggggtatctgcatgataaccacatcgttcaccgcgatattaagggggataacgtccttattaatacgttcagtggcctcctgaaaattagtgacttcggtacctctaaaaggctggcgggcatcacgccttgcaccgaaacctttaccggtactctgcagtatatggctcccgagattattgatcaagggccaaggggatatggaaaggctgccgatatttggtcactaggatgcacggtgatcgaaatggcaacgggccggccacctttccatgagcttggatcccctcaagctgccatgttccaggtgggcatgtataaggtgcatccaccaatgcccagcagtcttagcgctgaagcgcaggcttttcttctgaggacctttgagccggatccccggctgagagctagcgcccagactctcttgggcgatccattccttcagcccggtaaaaggtctcggtctccgagctctccccgtcacgccccccgcccttctgacgccccctctgcgtcccccacgccctccgcaaactctaccacccagtcccaaactttcccctgtccacaggctcccagccagcacccaccctccccgccaaagcgttgcctgtcgtatggaggaacaagtcaacttcgtgtaccagaggagcccgccgctgaagagccagcatcccccgaggagtcatccggccttagtttactgcaccaggagagtaaacgccgggcaatgcttgccgccgtcctagagcaagaactgccagctctcgctgaaaacctccatcaggagcagaaacaggaacagggcgcgaggctgggcaggaaccacgtggaagagctcctccgctgcctgggcgcacacattcatacacccaatcgccgccagctggcccaggagttaagagcgctccaaggtcgccttcgggctcaggggctgggacccgccctgctgcaccgcccactgttcgcctttcccgacgccgtgaaacagattcttagaaagcgccagatacggccacactggatgtttgtccttgacagtttgctgtccagagcggtgagggccgccttgggcgtgctgggcccggaggtggagaaagaggcggtgtcccccagaagtgaggagcttagtaacgaaggagactcacagcaatcaccgggacagcagtcccctctgccggtcgagcccgaacagggccccgcaccactcatggtgcagctcagcttgctccgggcggagaccgatcgcctgcgagaaattcttgccggaaaagaacgtgagtaccaggctttggttcagagagccctccagaggttaaacgaagaggctagaacgtacgtgctggcaccagaacctccaacagccctgagtaccgaccaaggacttgtgcaatggctgcaagaactgaatgttgactcaggcactatccagatgcttctgaatcatagcttcaccttgcacactctgcttacctatgcgacccgagacgacctgatctacacaaggatacggggcgggatggtttgcagaatttggcgagcgatcctcgcccagcgtgcgggcagcacgcctgtcacaagcgggccttag

SEQ ID NO: 124780 - DNA, 315 bp, synthetic construct
  misc_feature 1..315: note = Description of Artificial Sequence: Synthetic coding sequence
  source 1..315: mol_type = other DNA
atggttcagctgtcactcctgagagctgagaccgataggttacgagagattctggcaggcaaagagcgcgaatatcaggccttggtacagcgagcactccaacgcctgaacgaggaagcacgcacctatgtgttggcccctgagccgcccaccgctctgtctaccgatcaggggctggtgcaatggctgcaagaacttaatgtggacagcgggaccatccagatgggtcgcgacggcatgccacatctcgagggccacttgggcacagcatccagaatacatactagtcacctgtggactttgcgggccgagtag

SEQ ID NO: 124781 - DNA, 3843 bp, synthetic construct
  misc_feature 1..3843: note = Description of Artificial Sequence: Synthetic coding sequence
  source 1..3843: mol_type = other DNA
atggctggcccgtgccctagaagcggcgcagagagggctggctcctgttggcaagatcccttggcagtagcactctcccgagggcgccagttggcagccccacccggccgagggtgcgcaaggtccaggcctcttagtgtagtgtacgtgttgaccagggagccccagccaggattggaaccaagggagggcaccgaggcagaaccgctccctttgagatgcctcagagaggcatgcgcccaggttcctcgcccaaggccacctccccagcttcgttcgcttcccttcgggacgctggagctgggcgataccgctgccctggacgctttctacaacgcggacgtcgtggtgttggaagtgtccagctccttagtacaacctagtctattctatcatctaggtgtgcgcgagtctttctcaatgacaaacaacgtactgttatgtagccaggctgacctcccagacctgcaagcactccgcgactgcgtcggctcttataccttgataccatatgttgtgaccgcgacgggccgagtgctatgcggcgacgccgggttactgcgcggtctagccgacggcctcgttcaagctggcgttggaacggaagccttgttgacacctctggtggggcgcctggcaagactgttagaggccacacccacggattcatgtggttatttccgggagactatcagacgggacatccggcaggcgcgcgaacgcttttccgggccacagctccggcaggagttggcccgcttgcagaggagactggatagcgtcgaacttctgtcgcccgacatcattatgaatttgcttctgagctacagggatgtgcaggattacagcgcgatcatcgaacttgtcgagaccctgcaggcactgcctacgtgtgatgtcgccgaacagcacaacgtgtgctttcattacaccttcgctttgaatcgaaggaatcggcccggagacagagccaaggccttaagtgtactcctaccattagtacagttggaaggttcagtggctccggatctgtattgtatgtgcggaaggatctacaaggacatgttcttttcgagtgggtttcaggatgccggtcatcgagagcaagcttatcattggtacagaaaggcctttgacgtcgaacctagtctccacagcggtattaatgctgctgtgttgttgatcgctgctggtcaacacttcgaggattctaaagaactcagactgatcggcatgaaactgggatgcctgctcgcgcggaaggggtgcgtcgaaaagatgcagtattactgggatgttggattctatctcggggcccagatcctggccaatgacccaacccaggttgtgctagcagctgagcaactttataagctgaacgcacctatatggtacttggtctccgttatggaaacgttcctgttgtatcagcacttccgaccaacgcctgaaccaccaggcggtccacctagacgggcccatttttggctgcattttctgctgcagagttgccagccattcaaaacggcctgcgcgcagggcgaccagtgtttggttctggttctggagatgaacaaagtccttctccccgccaagctcgaagtaagaggaacagatcccgtgtcaactgtgactctctcgctgttggagccagaaacgcaggatataccctcttcatggacttttccagtggcgtctatttgcggcgtctctgcctctaaacgggatgagcgttgttgtttcttgtacgccctgccacccgcccaagatgtccaactgtgctttccctcagtgggacattgtcagtggttctgcggcttgatacaagcttgggtcacgaatcccgattcgacagcccccgctgaggaagcagaaggggcgggtgaaatgttagaattcgattatgagtataccgaaaccggcgagcgcctcgtgctgggaaaaggtacatatggcgtggtgtatgcaggaagggaccgccacacacgtgtgagaattgcaatcaaagaaattcctgaaagagacagtaggttctctcagcctctccacgaagaaattgccctgcatcgacgattgagacacaaaaatatagtgcgatacctggggagtgcgtcacagggtggttacctcaaaattttcatggaggaggtccctggcgggtccctgagctctctgcttcggtctgtatggggccccctaaaggataacgaatcaactatcagcttttacacacgacagatcctgcagggactgggctacctacacgataaccatattgtgcacagggatatcaagggggataatgtcttgatcaataccttcagcggactcttaaagatctctgattttggaacatctaaacgcctcgcgggaattacaccctgtaccgagacattcaccggtaccctgcaatacatggctcctgagatcattgatcaaggcccaaggggatatggtaaagctgcggacatttggtcgctgggatgtacagttatagaaatggccacaggtcgcccgccctttcacgagctgggcagcccacaagcagcaatgttccaagtgggaatgtacaaggtgcacccaccaatgccttcatccctttctgccgaggcacaagcatttcttctcaggactttcgagccggatccgcgcctgagggcctccgcccaaacactgctgggggacccattcctccagccgggcaaaagatctcggtctcctagcagtccacgtcacgcaccccggccctcagatgctccatcagcctcgcctacaccatctgcgaactctaccacacagtcccagacatttccctgtccccaggcccccagtcagcaccctccaagtcctccaaagcgctgcctgagctatgggggtacatcgcagctccgtgtgccagaagaacccgctgccgaggaaccagcgtcacctgaagaaagttctggactaagcctactccaccaggaaagcaaacgcagggcaatgctggcggctgtgctagaacaggagctccctgccctcgccgagaacctgcatcaggagcagaagcaggagcagggcgctagactcggtcgaaaccatgtcgaggaactgctccgatgcctgggagctcatattcatactcccaaccggaggcagctcgcccaggaactccgagcacttcagggtcggcttcgagcgcagggactcggtccagctctactgcaccgacctcttttcgcattccccgatgcagtgaaacaaattctgagaaaacggcagatacggcctcattggatgtttgtgctcgattcgttgttatcgagagccgtacgggccgctctgggagtgttaggaccagaggtcgagaaggaagcggtgagtccccgcagcgaagagctctccaatgagggagattcacagcagagccctggacagcaatccccattgcctgttgagcctgagcaggggcctgctccactgatggtgcagctctctctgctcagagccgaaaccgacaggctccgcgaaatcttagccggaaaggagagagaatatcaggcgcttgtgcagcgggctctgcagaggcttaatgaagaggctagaacctatgtattagcacccgaaccccctaccgccctttctacagaccaggggctcgtgcagtggctacaggagctcaacgtggatagtggcacgatccagatgctgctgaatcattccttcactctgcacaccctactcacctacgctacccgggacgacctcatctacaccagaatccggggcggtatggtctgtagaatttggcgcgctatactggcccagcgggcaggaagtactcctgtgaccagtggcccttag

SEQ ID NO: 124782 - DNA, 2397 bp, synthetic construct
  misc_feature 1..2397: note = Description of Artificial Sequence: Synthetic coding sequence
  source 1..2397: mol_type = other DNA
tgaatgaatctgctcttatcttatagggatgtgcaagattattctgcaatcatcgaactggtggagactctgcaggctctgccaacatgcgacgtggccgaacagcacaatgtgtgttttcactacacattcgccttgaatcgccggaaccgccccggtgatcgagccaaagcgctgagcgtgttgctaccacttgtccagttagaaggttctgttgccccagacctgtactgtatgtgcggaagaatttacaaggacatgttcttttcttcaggattccaggacgccggtcatcgtgaacaagcatatcactggtatagaaaagcctttgacgtcgagcccagtttacactcaggaatcaacgctgcggtgttgttgatagccgccggtcagcacttcgaggactcgaaagaattacgtctgatcggcatgaagcttggatgcctcttggccagaaaaggatgcgtggagaagatgcagtactattgggacgttggcttctacctgggagcgcaaattctggccaacgatccgactcaggttgtcctggctgccgaacagctgtacaagctcaatgcgccaatctggtatctggtcagcgtgatggagacattcctgctgtaccaacactttaggccaaccccggaaccccccggaggccctcccaggcgagcgcacttttggctacactttcttctacagtcatgccagccatttaaaaccgcctgcgctcagggtgaccagtgtttagtgctggtcctcgagatgaataaggttctgttgcccgcaaaactcgaagtacgggggaccgatccagtctccactgtgaccctgagcctcctcgagcccgaaacacaagacattcctagttcttggacatttcccgttgcttccatctgcggagtatcagcgagcaaaagagacgagcgctgctgtttcctgtacgcgctgccaccggctcaagacgtacagttgtgctttccatctgtcggtcactgtcagtggttctgtgggcttattcaggcatgggtgaccaaccctgacagtacagcccctgccgaggaagctgagggcgccggagagatgttagagtttgactacgagtatacagagactggagagagactagtgttgggcaaaggaacctacggcgtggtctatgctggtcgcgatcgacacaccagagtgcggattgccatcaaggaaattcccgaaagggatagtaggttttctcaacctctccatgaagaaattgcactccacagacgactgagacacaagaacattgttaggtaccttggatctgctagccaggggggttatctgaagatattcatggaggaagttccaggtggatctctgtcttctctgcttagatcagtatggggacccctcaaagacaacgaaagcactatttccttctatacaaggcagatactgcagggactgggttatctgcatgataaccatattgttcacagggacataaagggggataacgtgctcattaacacattcagcgggttgctgaaaatctctgattttggaacatctaaacgactggcgggcattaccccttgcaccgagaccttcaccggcaccctccagtacatggctcccgagattatcgatcaaggaccacgaggatatgggaaagctgctgacatttggtctctgggatgtactgtaattgagatggcgacaggccgccctccgtttcatgagcttggtagcccccaggcagcgatgttccaagtaggtatgtacaaagtgcatccgcctatgccaagtagcttgtctgccgaggcacaggcgttccttctccgcacattcgaacccgatcccaggctgagagcaagcgctcagacactcttgggggatccattcctgcagccaggcaagcgctcacggagtcccagctcccccagacatgcacccagacccagcgacgccccctccgcctcgcctacacctagcgccaattccaccactcagtcccaaactttcccatgtcctcaggccccatctcagcatccaccaagtccccctaaaaggtgtttgtcctatggaggcactagccaactacgggttcctgaggagcccgcagcagaagaacctgcctcccccgaagaatcctccggcctgagcctcctccaccaagagtctaaacgacgagccatgctggccgctgtcctcgaacaggagctcccagcgctggccgagaatctgcatcaggaacagaagcaggaacagggcgctcgattgggccgaaatcatgtcgaggagctcctcaggtgtctgggcgcccatatccacactcccaacaggcggcagcttgcgcaggagcttagagccctacaaggctggatgaatggcgaagacaaagggagcttctag

SEQ ID NO: 124783 - DNA, 249 bp, synthetic construct
  misc_feature 1..249: note = Description of Artificial Sequence: Synthetic coding sequence
  source 1..249: mol_type = other DNA
taagaatatcaggccttggtacaacgagccctccagcggctgaatgaagaggcccggacctacgttctagcgcctgagccccccactgcgctgagcaccgatcagggtttagtccaatggctacaagagctcaatgtggactcgggtaccatacagatgggccgcgacggcatgcctcacctcgaagggcacctgggcaccgcctcccggatccacacgtcccacctgtggacactgcgtgcagaatag

SEQ ID NO: 124784 - DNA, 3867 bp, synthetic construct
  misc_feature 1..3867: note = Description of Artificial Sequence: Synthetic coding sequence
  source 1..3867: mol_type = other DNA
atggccggcccctgcccccggagtggagccgaaagagctgggtcctgttggcaggatcctttagccgttgccttgtcaaggggcaggcagcttgctgccccccctggcagaggttgcgcacgctcacgcccgctttcggtcgtctatgtactgaccagggaaccccagccaggcttagaacccagagaaggaactgaggccgaaccgctaccgttacggtgcctccgcgaggcctgtgcacaggtgcctaggcctcgacctccgccacagttgcgatccctgccgttcggaactttagaactgggagatactgcagctctggatgcgttctacaatgcagatgtggtcgtgctggaagtctcttcgtccctagtgcagccctctctcttttaccacttgggcgtgcgggagagctttagcatgactaacaacgtgctactctgcagccaagcggatttacccgacctccaagctcttcgggaagatgtgttccagaagaattcagactgcgtgggctcctacactttgatcccttatgtggtaacagctactgggcgggtgttgtgcggagacgctggccttctgcgcggcctggcagatggcctcgtccaggcgggcgtgggcacagaggctctgttaacaccgctcgttggaagacttgcgagattgcttgaggcaacccctaccgactcttgcgggtatttccgtgagactattaggagagatattcgtcaggcccgcgagcggttcagtggcccccaactgcggcaggaactcgccagactgcagcgacgcctggattccgtggaactgctgagcccagacattattatgaatttgctgctgtcttatagagacgtccaggattacagcgcaattatagaactggttgaaactctccaggctctccctacttgtgacgtggcagagcagcacaatgtctgcttccactacacattcgccctcaaccgcaggaacagacccggggatagagccaaagccttgagtgttctgctccctctggtccagttggagggaagtgttgctccggacctctactgcatgtgtggcagaatctataaggacatgtttttttccagcggctttcaggacgctggccaccgggagcaggcttatcattggtaccgtaaggcattcgatgtcgagccgtctcttcactcaggcatcaatgcagcggttctgcttatcgcagcaggacagcactttgaggactctaaggagcttcgcctgatcgggatgaaattgggttgtcttctggcacgaaaaggatgtgtagaaaaaatgcaatactactgggacgtggggttttatcttggcgcccagatcctggctaatgacccgacccaagtagttctggctgccgagcagctatataagctaaacgcacccatttggtacctggtgtccgtgatggagactttcctattgtatcagcattttcgtccaactccggaaccgccaggcggcccccctcggcgggctcacttctggttgcattttctgcttcagagctgtcagccttttaagactgcatgcgcccaaggtgaccagtgcctggttctcgtgcttgaaatgaataaggtcctgctccctgcaaagcttgaggtgaggggcaccgatcctgtttccaccgtcactctcagcctgctcgaaccggagacccaagacattccgtcctcgtggacgttcccagtggcaagcatctgtggcgtgtccgcgagcaaaagggatgagagatgttgttttctgtacgccctcccacctgctcaggacgtacagctatgctttccttctgttgggcattgccaatggttctgcggcctgattcaggcatgggtgaccaaccctgatagcacagctccagcagaggaggctgagggggctggcgaaatgctggaattcgactatgagtacacggaaacaggcgagcgcctcgttctggggaagggaacctacggtgtcgtgtatgcgggccgggaccgacacactcgagttagaatcgcaattaaagagattccagaaagagatagtagattcagccagcccttgcacgaagagattgctctgcacaggcggctacgccataagaacatcgtgaggtaccttgggtcagccagccaaggggggtatctgaagatcttcatggaggaggttccaggtgggtcactgtcctcactgctcaggtcagtttggggaccccttaaggacaacgagtcaaccatttctttctatacacgccagatcctgcaaggacttggttatttacacgataatcacatcgtgcatagagatatcaaaggtgacaatgtgctgataaacacattctcaggcctcttaaagatctcggactttggcacatccaagcgcctggctggaattactccttgtactgagacattcacagggacactgcagtatatggccccagagataatcgaccagggtcccagagggtacggaaaggcagcagatatttggtcattaggatgtacagtgatcgagatggctaccggtcggcctcccttccatgagctgggtagcccccaggcagccatgtttcaggtgggcatgtacaaggtgcaccctccaatgcctagcagcttaagcgccgaagcacaggcctttctattacggacttttgaacctgatcctcggcttcgcgcgagcgcccagacattgttgggggacccctttctgcagccgggcaaaaggagcagaagtcctagctccccaagacatgctccccggcccagcgatgcaccatcagcgagcccaacccccagcgcaaactcaaccacacaatcccagacattcccttgtcctcaggctccatcacagcaccctccgtcccctccaaagagatgcctgtcatacggcgggacaagccaattgagggtcccggaagagcccgcggctgaagagcctgctagtccggaggagtcgtccggactgtccttgctccatcaggaaagcaagagacgggctatgttggcagcagtcctggagcaggaacttcctgcactcgctgagaatctgcatcaagagcagaaacaggagcagggagcgcgcctgggcagaaatcatgtcgaggaacttctgcggtgcctcggagctcacatccacacgccaaacagaaggcagttggctcaggaactgcgagccctccaggggcggctgagagctcaaggcttaggacccgcactcctgcaccgacccctatttgccttccccgacgcggtaaagcaaatactgaggaaacgccagatccgtcctcactggatgttcgtgttggactcccttctgagtagggcggtgcgagccgctctcggcgtgctgggacctgaagtcgaaaaagaagccgtctccccacgcagtgaagagttaagcaacgagggcgactcccaacagtcacctgggcagcagagccctctcccggttgagcccgaacaaggccccgctccgcttatggtgcagttgtcgctgcttagagcagagaccgacaggttacgcgagatcctcgctggtaaagagcgggagtaccaggcgctcgttcagagagcactccagcggctaaatgaggaagcacgaacctatgtcctcgccccagaacctcccacagctttgtctacagatcaaggacttgtgcaatggctgcaggaactgaacgtggactctgggaccatccagatgcttttgaatcattccttcacactgcacaccctgcttacttacgccactagggatgatctcatatatactcgcatcagaggcggtatggtatgcaggatctggcgtgccatcctggcgcagagagctggatcaaccccagtcacatctggtccctag

SEQ ID NO: 124785 - DNA, 2394 bp, synthetic construct
  misc_feature 1..2394: note = Description of Artificial Sequence: Synthetic coding sequence
  source 1..2394: mol_type = other DNA
atgaatctgctccttagctacagagacgtccaggattattcagctattatcgaacttgtggagactctgcaggctctgcccacatgcgacgtcgctgagcagcataatgtctgctttcactataccttcgcactgaaccggcgcaaccgaccgggcgacagagcaaaggcgttatccgtgcttttgcccttagtccagctggaaggcagtgtcgctcccgacttatattgtatgtgcgggcgtatctacaaggacatgttcttttcttctggcttccaggacgccgggcaccgcgagcaggcgtaccactggtacaggaaggcttttgacgtggagcctagccttcatagcggcatcaacgccgccgtcctgcttatcgctgccggccaacacttcgaggatagcaaagagctgagactgattgggatgaaacttggatgcctgctggctcggaagggctgcgtcgagaagatgcagtactactgggacgtggggttctatcttggcgcccaaatactggccaacgaccccacacaagtggtcctggccgcagaacagctctacaagctgaatgcaccaatttggtacctggttagtgttatggagacctttcttctgtatcagcactttaggcctacacccgaaccccctggcggcccgcctcgcagggcccatttttggctccatttcttactgcagtcatgccaaccatttaagactgcgtgcgctcaaggggatcagtgcctcgtcctcgtgctggagatgaacaaggtattgttacctgcaaaactggaagttaggggaacggatccggtctcaacagtcactctgtcccttctggagccagagacccaggacattccctcttcatggaccttcccagtggccagcatctgtggtgtctcagcttcaaaaagagacgagcgctgttgcttcctatacgcattaccccctgcacaagacgtccagctttgctttccttcagtggggcactgccagtggttctgtgggttaattcaagcgtgggtaactaatcccgattccacagctcccgccgaggaggctgagggggcaggggagatgctggaattcgattacgaatatacagagacgggcgaacgactcgttctcggaaagggcacgtatggagttgtttatgccggtcgcgacagacataccagagttcggatcgctatcaaagagatcccggagcgggactccagattcagccagcctcttcacgaagaaatcgcgctgcatcgacggctcagacacaagaacattgtccggtatctaggatcagcctcccagggcggatacttaaaaatctttatggaagaagtccccggcggcagcctgtcatctctgctcagaagcgtttggggccctctaaaagataacgagagcactatctctttctacactcgacagatcctgcagggcctcggttacctgcatgataaccatatagtacacagggatatcaagggagacaacgtcctgatcaacacgttttcaggcttgctgaaaatctccgactttgggacttcaaagcgcctggctggaataaccccctgcacggagacatttaccggcactctgcagtatatggcacctgagattatagatcaaggtcctaggggttacggtaaagccgcggacatctggagtctggggtgtaccgtcatagagatggccaccggaagaccaccctttcatgagctcggatctcctcaggccgccatgtttcaggtgggaatgtataaagttcaccccccaatgccctcaagtctgtctgccgaggctcaggccttcctgcttcgcaccttcgagccagacccacggcttcgcgcgagcgcacagactctgctgggagacccgtttctgcaacccggcaaaagatcacgcagcccatcatctccgcgacatgccccgcggcctagcgacgccccctccgcctccccaactcccagcgccaattcaaccacacaatcccagacttttccttgtccccaggcaccctctcaacatcctccctctcccccgaaacggtgccttagttatgggggcacatctcagctccgggttccagaggagccggcagccgaggagccagcgagtcccgaggagagttcaggactttccttactgcaccaagagtctaaaagacgggccatgctggccgctgtcctggagcaagaattacccgccctcgccgagaatctccatcaggaacagaaacaggagcaaggggcaagactaggacgaaaccacgtggaggaactgctgaggtgcctcggggcccatatccacactccgaaccggcgccagctcgcccaagagctccgggccctgcagggatggatgaacggggaggacaagggatccttctag

SEQ ID NO: 124786 - DNA, 783 bp, synthetic construct
  misc_feature 1..783: note = Description of Artificial Sequence: Synthetic coding sequence
  source 1..783: mol_type = other DNA
atggatatcgcttccacaaatacaagcaataagagcgataccaatatggaacaggtgccagcgaccaatgacacgattaaacgactggaatcgaagctgttgaagaaccaggccaagcaacaaagtgagagtggccgattgtctctaggagcatctagaggatcttccgtcgaatccttgccgcctactagcgaggggaaacgtatgtctgcagacatgtctgaaatcgaggcccgcattgctgcgaccacaggaaacggccagccacggcgccgcagtatccaagatcttaccgttaccggtaccgaaccaggtcaggtgtcttctcgtagtagcagcccttcggtaagaatgatcactacttctggtcccacctctgagaaaccgaccaggtctcacccatggacacccgacgatagcaccgacaccaatggtagtgataactctatccctatggcctatctcacccttgaccaccaactacagccgcttgcaccctgtcctaattccaaggagagtatggcggtgtttgagcagcactgcaagatggctcaggaatacatgaaagtgcagacagaaattgcgctgctgctccagaggaagcaagaattggttgcggagctagaccaggacgagaaggatcagcaaaacactagtcggctcgtgcaggagcacaagaaactgcttgacgagaataaatctttgtctacctactaccagcagtgtaagaagcagctcgaggtgatacgtagtcagcagcagaaacggcagggcacatcttag

SEQ ID NO: 124787 - DNA, 1557 bp, synthetic construct
  misc_feature 1..1557: note = Description of Artificial Sequence: Synthetic coding sequence
  source 1..1557: mol_type = other DNA
atgagcacagctagtgccgcaagctccagtagttcctcttctgcaggagagatgatcgaagccccgtcacaggtgctgaacttcgaagaaatcgattacaaggaaatcgaggtcgaggaggtcgtggggcgcggggccttcggggtcgtctgcaaagcgaaatggcgagccaaagacgtggccattaagcagatagagtcagaatcagagagaaaggccttcattgtcgaacttcggcagctgtcccgggttaatcatcctaacattgtgaagctctatggggcttgcctgaacccagtctgtttggttatggagtacgccgagggtggatccctctacaatgtgttgcacggggcagagcctctcccttactacacagcggctcatgccatgagctggtgcttgcaatgttctcagggcgttgcatatttgcatagcatgcagcccaaggctctgatccaccgtgatctcaagccacccaacctgctcctggttgcaggaggcaccgtactaaagatctgcgattttggcactgcatgtgatatccagacccatatgacgaataataagggctcagccgcttggatggcccccgaggtttttgagggaagcaattatagcgaaaagtgcgatgtgttctcatgggggatcatcctgtgggaggtaatcacaaggaggaaaccatttgacgaaattggaggacctgctttccgtatcatgtgggctgtgcacaacggcacccgaccaccactgatcaagaacctgcccaaacctatcgaatcactcatgacaaggtgctggtctaaagacccaagccagaggccttcaatggaagagattgtaaagattatgacacacctcatgaggtacttccctggcgcagatgaaccactgcagtatccctgtcagtattctgatgagggccagagtaactctgccacctctactgggtcttttatggatatcgcaagcactaatacaagcaacaagtccgacacaaacatggagcaggtccccgctaccaacgacacaatcaagcggcttgagagcaaattacttaaaaatcaggcgaagcagcaaagcgagtcaggccgcttgtcgctgggggctagtaggggctcgagtgttgagtctcttcctcccacttcagaaggaaagcgcatgagtgctgacatgtcagagattgaagcgcgcatcgctgccaccaccgcctactccaagcccaaaagagggcaccgcaagaccgcctctttcgggaatatcctcgatgtcccagaaatagttatttcagggaacgggcaaccgcggagacgctctattcaggatctaactgtcaccgggacggagcccggccaggtgagctctagatcgagttctccatccgtgaggatgataactacctccgggcctaccagtgagaagccaaccaggtcccacccctggacgcccgatgacagtacagataccaacgggagcgacaactctatacccatggcatacctcactttagatcaccagctgcaggccagaacttcttgcagaacaggacctgggtag

SEQ ID NO: 124788 - DNA, 1476 bp, synthetic construct
  misc_feature 1..1476: note = Description of Artificial Sequence: Synthetic coding sequence
  source 1..1476: mol_type = other DNA
atgtctactgcaagcgccgcctcctctagctcatcatcctctgctggcgaaatgattgaggcgccaagccaagttctgaactttgaagagattgactacaaggaaattgaggtcgaagaggtggtcgggcggggcgcattcggcgtagtttgcaaggccaagtggcgggccaaagatgtggcaattaagcagattgaaagcgagagtgagcgaaaggccttcatcgtggaactgagacaattatcccgcgtcaaccacccaaatattgtcaagctgtatggggcctgcctaaatcccgtgtgcttggtgatggaatatgctgaaggaggcagcttatacaacgtgctgcatggagctgagccactcccatattacactgctgcccacgccatgtcttggtgcctccagtgctcccaaggcgtggcctatctgcatagcatgcagccaaaggctttaattcatcgggacttgaaacccccaaaccttctgctggtggcaggggggacagtgttgaagatttgcgattttggaacagcctgtgatattcaaactcacatgaccaataacaagggttccgcagcttggatggcccccgaagttttcgaaggttctaactactccgaaaaatgcgacgttttcagttggggaatcattctctgggaagttattacccgaaggaaaccctttgacgagataggggggcccgcctttcgtattatgtgggcagttcataacggaacccgcccccccctcatcaagaatctcccgaaacccatcgagtccctgatgaccaggtgctggtctaaagatccttcccagaggccttctatggaggagattgtcaagattatgacacacctgatgcggtactttccgggcgctgacgaacctctgcaatatccatgccagtacagtgacgaaggccagtctaacagcgccacttcaacaggctctttcatggatattgctagcacaaacacatcaaacaaatctgacaccaatatggaacaagttcctgcaacaaacgacactatcaaacgcctagagtctaagctcctgaaaaaccaggctaaacagcaatccgagtcgggccggctatccctgggagccagcagggggagttccgtggaatcactccctccgacatcagagggaaagaggatgtctgctgacatgtcagaaatcgaagcccgtatcgcagccaccaccggcaatggtcagcccagacgtcgatcaatacaagacctaacagtgacagggaccgagcctgggcaggtgagttcccgcagctcctccccttcagttaggatgatcaccacatcaggtccgacctcagagaaacccacccggtctcacccgtggacgcctgacgacagtaccgacacaaatggctccgacaactccattccaatggcctatctgactctcgatcatcaattgcaggcccgcacctcctgtcgaacggggcctgggtag

SEQ ID NO: 124789 - DNA, 1821 bp, synthetic construct
  misc_feature 1..1821: note = Description of Artificial Sequence: Synthetic coding sequence
  source 1..1821: mol_type = other DNA
atgtcgactgcatccgctgcttcgtccagctcctcctcttctgcaggcgagatgatcgaggcgccctcacaagtcctaaacttcgaggagatcgattacaaagagattgaggtggaggaggtggttggccgaggagcctttggggtggtatgtaaagccaagtggagggcaaaggatgtagcgataaaacagatcgaaagtgagtcggaacgaaaggcgtttatcgtcgaattacgtcagctaagcagagtgaatcatcctaacatcgtgaagctgtacggcgcatgcttaaatcctgtgtgtctggtaatggagtacgcagaaggcggcagtctgtataacgtcctgcacggagccgagcctctgccctactatacagctgctcacgcaatgagttggtgtttgcagtgcagtcagggtgttgcttacctgcatagcatgcaaccgaaagcactgatacaccgtgatctgaagccacccaatctgctcctggttgccggaggaaccgttctgaagatatgtgatttcgggaccgcatgtgatatccagacgcatatgactaacaataagggatccgccgcttggatggcaccagaagtgttcgaagggagtaattattccgagaagtgtgatgtgtttagctggggcattatcctttgggaagttattactcggagaaaacctttcgatgagatcggcggcccagcatttaggatcatgtgggctgtacacaacggcacacggcctcctcttatcaaaaatctccctaaaccaattgaatctctcatgactcggtgttggagtaaggaccccagtcaaagacccagcatggaggaaatagtgaaaattatgacacacctgatgcgatattttcctggggcagacgagcctcttcagtatccctgccaatactcagacgaaggtcagtctaattcagccacaagtacgggcagcttcatggatatagcctcaaccaacacaagcaacaaaagtgatacgaacatggaacaggttccagctaccaatgacacaattaaaaggctcgaaagtaagctcttgaaaaatcaggctaaacagcagagtgaatctgggcgcctgagtctgggcgcctctcggggatcctccgtcgagagtcttccccctaccagtgagggaaagcggatgtctgccgatatgtccgaaatagaggcaagaatcgctgcaactaccgcttattccaagccaaagagaggccaccgtaaaacagcatccttcggcaacattttggacgttcctgaaatcgtcatctccggcaatggacaaccccgcaggaggtccatccaggatctaaccgttacaggcacagagccagggcaggtgagttcacgatcatcctctccatctgtccgcatgatcactactagcggccctacatccgagaagcccactcggtctcacccttggactcccgacgattccactgacactaacggatccgacaacagtattcccatggcttatctaactctagatcaccagctccagccactggctccctgccctaattcaaaggagtccatggcagtcttcgagcagcactgcaaaatggcccaagagtatatgaaggtgcagacagagatcgccctcctgctccagcggaaacaggaactggtggccgagctagatcaagacgagaaggaccagcagaacacaagtagactggtgcaggagcataaaaagctacttgatgaaaacaagagcctgtcaacatactatcagcagtgtaaaaagcaattggaggttatcaggtcgcagcagcagaagcggcagggaacaagttag

SEQ ID NO: 124790 - DNA, 1740 bp, synthetic construct
  misc_feature 1..1740: note = Description of Artificial Sequence: Synthetic coding sequence
  source 1..1740: mol_type = other DNA
atgtctacggccagcgctgcgagctcttcctcatcatcctctgccggcgagatgattgaggcaccgtcccaggtcctcaattttgaagaaatcgattacaaggagattgaagtggaagaagttgtgggtagaggcgcattcggtgtggtgtgtaaagcaaagtggagagccaaagatgtggccatcaagcagatcgaatctgagtctgaacgcaaagcttttatcgtcgagctgaggcagctttctcgggtaaaccatccaaatatcgtcaaactctacggcgcctgtctcaaccctgtgtgtttggtgatggagtacgctgaagggggctctctctataacgtcctccacggggcagaacctctgccatactacaccgcagcgcacgcaatgtcctggtgtttgcagtgttctcagggggtggcctacctgcacagcatgcaacccaaagcacttatacatcgggacctgaagcctccaaacctcctcctggtcgcaggcggaaccgtcctgaaaatctgcgattttggaaccgcgtgtgatatacagactcacatgaccaacaacaaggggtccgctgcttggatggcgcctgaggtgttcgaaggtagtaactatagtgaaaaatgcgatgtgttctcttggggcattatcctctgggaggtcatcacccgccgcaaacccttcgacgaaatcgggggccccgccttcaggatcatgtgggcagtgcataatgggactcgtcctcctttgattaagaatctgcctaagccgatcgaatcacttatgacaagatgttggtccaaggatccgtcccagagaccgtcaatggaagaaattgtgaaaatcatgacacatctcatgagatacttccctggggccgacgagccactgcagtacccatgccagtactccgacgaagggcagtcaaatagcgcaacttccaccgggtccttcatggatatcgccagcaccaatacatctaataagagcgatacaaatatggaacaggtgcctgccacaaatgacaccattaaacgtttagagagcaagcttcttaagaaccaggccaagcaacagagtgagtccggacgcttgtcactgggggctagcaggggctcctccgtggaaagtctgccaccaaccagtgaaggaaagcggatgagtgcggatatgtccgagatcgaggcgaggatcgcagcaaccactgggaacggacaacctaggcgccggtcaatccaagacctgactgtgacggggacagaaccgggtcaggtctcgtctcgctcatcgtcaccatccgtgagaatgatcacaacaagcgggcctacttcagagaagcccacccgatctcacccctggacgcccgacgacagcacagacactaatggaagcgacaactcaataccaatggcctaccttacgttggatcatcaattacaaccgctggccccctgccccaacagtaaagagtcaatggctgttttcgagcagcattgtaaaatggcacaggaatatatgaaagtgcagactgagatcgcactgcttctccaaaggaagcaggagctcgtggccgagcttgaccaggacgaaaaggaccagcagaacacgtcgagactggtgcaagagcacaagaagttgctcgacgagaacaaaagtctgtcgacgtattatcagcagtgcaagaaacaattggaggtcattaggtcccagcagcagaagcgccaggggacatcttag

SEQ ID NO: 124791 - DNA, 1257 bp, synthetic construct
  misc_feature 1..1257: note = Description of Artificial Sequence: Synthetic coding sequence
  source 1..1257: mol_type = other DNA
atgtccaccgcatctgctgcctcatcatccagctccagctctgctggagagatgatcgaggccccatcccaagtactgaactttgaggagattgattataaggagatcgaggttgaggaagtcgtgggccgaggagcttttggggtggtatgcaaggctaagtggagggctaaggatgttgcaatcaagcaaatagaatcggagtcagaacggaaagccttcatcgtcgagctcaggcagctcagtagagtgaatcatcccaacctgcttctggttgcaggcggcactgttttgaaaatctgcgacttcggtacagcgtgtgatatacagacgcacatgacaaataataagggcagtgcagcatggatggccccagaggtgttcgaaggatccaattacagcgaaaaatgtgacgttttttcatggggtattatactctgggaggtgattactagacgaaaaccattcgatgaaataggtggtcctgcatttcggatcatgtgggccgttcataatggcactaggcctcctctgatcaagaacctcccgaaaccgattgagtccctaatgacccggtgttggagcaaagacccgtcacagcgcccttccatggaggaaatagttaagataatgacccacctcatgcgttacttcccgggggctgatgaacctctacagtacccctgtcagtactcggacgaggggcagagcaactcagccactagtaccggatcgtttatggacattgcatccacaaatacttcaaacaaaagcgatacaaacatggagcaggtccctgctaccaatgataccattaaacgattggagagcaaactgcttaagaatcaagctaaacagcaaagtgaatccggcagactgtccctcggcgcctcaagggggagttccgtggaatcacttccccccacttctgagggaaaaaggatgagcgcggatatgtcagagatcgaggcccggatcgctgccaccaccgggaatggacagccccgccgacgctccattcaagaccttaccgttactggcacggaaccaggccaagtctcatcgaggtccagctcaccgtccgtgcgtatgatcaccactagcggtcccacctctgagaagcccacgaggtcccacccttggacgcctgatgacagtactgatacaaatggcagcgacaactcaattccaatggcctacctgaccctggaccaccagctgcaagccaggacttcgtgtcgaactggaccaggatag

SEQ ID NO: 124792 - DNA, 1404 bp, synthetic construct
  misc_feature 1..1404: note = Description of Artificial Sequence: Synthetic coding sequence
  source 1..1404: mol_type = other DNA
atggagtacatgtccactgggagcgacaacaaggaggagatcgatttgttaatcaagcatctgaatgtttccgacgtcatagatattatggagaacctgtacgcttccgaggagccagccgtttacgaaccgtcattgatgacaatgtgccaggattctaaccagaatgacgagaggtccaagagcctgcttctgagcggacaggaggtcccatggcttagctccgtgagatacggaacagtcgaagatcttctcgcgttcgccaaccacatctcgaacactgcgaaacatttttatgggcagcgcccacaggaatccggaatactcctcaatatggtcattacaccacagaatgggcgctaccagattgactccgacgtgctccttattccttggaagcttacctatcggaacatcggctctgattttattccgcgaggcgctttcgggaaagtgtatctcgctcaggacattaagaccaaaaagcggatggcctgtaagctcatacccgttgaccagtttaagccatctgacgtcgaaatccaggcatgttttcgccacgagaacattgccgaactctacggagcggtcctgtggggcgagaccgtgcacctgttcatggaggcaggagaaggtggaagcgtcctggaaaagctggagtcgtgtgggccaatgagggagtttgaaattatctgggtgaccaaacacgttcttaaagggctcgacttcctccactctaaaaaggtgattcaccacgacataaaaccaagcaacatagtttttatgtctacgaaggctgtgctggtcgatttcggtctcagcgtgcagatgacagaggatgtgtacttccctaaagatctgaggggaaccgaaatttatatgtcaccagaggttatcctgtgtaggggccacagcaccaaggccgacatctatagccttggggcaacattgatccacatgcagactgggacccccccgtgggtgaagagatatcctaggtccgcatacccctcttacctgtacatcatccacaaacaggcgccaccattggaagacatcgctgatgactgctcccctggcatgcgcgagcttatcgaggcctccctcgagcggaaccccaaccacagacctagagcggccgatctactaaaacacgaggcactgaaccccccacgggaagatcagccacgctgccagtcactagactccgcactcctagagcgtaagcgtctgctgtcgcgtaaggagttagaactgcccgaaaacatcgctgactccagttgcactggttccacagaagagagtgagatgctgaaacgccaacgttctctttacatagatttgggagccctggccgggtattttaacctcgtgcgggggccaccaacactggaatatggctag

SEQ ID NO: 124793 - DNA, 1404 bp, synthetic construct
  misc_feature 1..1404: note = Description of Artificial Sequence: Synthetic coding sequence
  source 1..1404: mol_type = other DNA
atggagtacatgagtactggttcagataacaaagaggagattgatttgctgatcaaacacttgaatgtttcagatgttatcgacatcatggagaacttgtacgcctccgaagagccagcagtgtatgaaccttctctaatgacaatgtgccaggattccaatcagaacgatgaacgatccaaatcgctcttgctgtccggacaagaagtcccctggctgtctagcgtgcgttacggcacggtcgaggacctcctggccttcgccaatcatataagcaatacagccaagcacttttatggccagaggccccaggagagcggcattctccttaatatggtgattacaccccaaaacggtcgataccagattgacagcgacgtgctgctcatcccgtggaagctaacatacagaaatataggaagtgactttatcccccgcggggctttcggcaaagtgtacctggcacaagacatcaaaactaagaaacggatggcgtgcaagctgattccagtcgaccagttcaaaccttcagatgtcgagatccaggcctgctttaggcacgagaacattgcagagttatacggcgccgtcctttggggcgagaccgtgcatctgttcatggaggcaggcgaaggcggaagcgtgttagagaagttggagagctgcggtcctatgcgtgaattcgaaatcatatgggtcaccaagcacgtgcttaaaggcctggactttttgcattccaagaaagtcattcaccacgacattaagccttcaaacattgtctttatgtctacgaaagctgtgctggtagattttggcttatctgtgcagatgacggaggatgtgtactttccgaaggacctgcgcggaaccgagatctatatgtcacctgaagtcatcctgtgccgcggtcattctaccaaagccgatatttactctctgggcgccaccctgatccacatgcaaaccggaacaccaccgtgggtgaagagataccctcgctcggcgtacccatcatacctatacattattcacaaacaggccccccccctcgaagatattgctgacgactgcagtcctggaatgcgagaactgatcgaagcttccctagagcgaaatcccaaccacaggccccgcgcagctgacttattgaaacatgaagccctgaatcccccgagggaggaccagcctagatgccagagcctcgattccgccctgctggagcgtaagaggctcctgtcccgtaaggagctcgagctcccggagaatatcgctgactcctcttgtacgggatccactgaagaaagcgagatgctgaagaggcagcgtagtttatacattgacctgggagctctagctggctacttcaatttagtcagggggccccccaccctcgagtacgggtag

SEQ ID NO: 124794 - DNA, 399 bp, synthetic construct
  misc_feature 1..399: note = Description of Artificial Sequence: Synthetic coding sequence
  source 1..399: mol_type = other DNA
atggagtacatgagcactggctcagataacaaggaagagattgatcttctgattaaacatctgaacgtgtccgatgtgatcgatatcatggaaaacctttatgcctctgaggagccagccgtgtatgagccctctctaatgacaatgtgccaagacagcaatcagaatgacgagcgctccaagtctctgttactgagcggacaagaggttccatggctgtctagcgtgcgctacggaaccgttgaggacctgctggcattcgctaatcacatctccaatactgctaagcatttttacgggcagcgcccacaagagtctggcattttactgaacatggtgcgcttctttccaatcagctgggtgctttgcgcgcaactctcctactgtagtttcatctag

SEQ ID NO: 124795 - DNA, 1404 bp, synthetic construct
  misc_feature 1..1404: note = Description of Artificial Sequence: Synthetic coding sequence
  source 1..1404: mol_type = other DNA
atggaatacatgagtacaggctcagacaataaggaggagatcgacttactgataaagcatctaaacgtatccgacgtcatcgacattatggagaatttgtatgcatcagaagagcccgccgtgtatgaacccagtctgatgaccatgtgccaagattccaaccagaacgatgaacgttcaaagagtttactgctgagcggtcaggaagtgccatggctgagtagtgtcaggtatggcacagtggaagacctcctagctttcgcaaaccatatcagcaatactgctaagcacttctatggtcagaggccacaggaaagtggcatcctgcttaacatggtaatcactccacagaacggcagatatcagattgattcagacgtcctgctaattccttggaaactgacgtatagaaatatcggcagtgactttattccaaggggagcattcggcaaggtataccttgcccaggacatcaaaaccaagaaacgaatggcctgcaagcttataccggtcgatcagttcaagccttccgacgttgaaattcaggcttgcttccgacacgagaacatcgctgagctgtatggcgcagtgctctggggcgagaccgttcacctgtttatggaagcaggtgaaggtggcagcgttttggaaaagctggaatcatgcggcccaatgcgggagttcgaaataatttgggttacgaagcatgtcctaaaggggctggacttcctccactcaaagaaggtcatccaccacgatattaagccatctaacattgttttcatgagcactaaagccgtcctggtggacttcgggctaagcgtgcagatgaccgaggatgtatattttccgaaagacctgagaggaaccgaaatctatatgtcccccgaggtgatcttatgccgcggccatagtactaaggctgacatttattctctgggcgcaaccctgatccatatgcagaccggcacaccgccttgggtgaaaagatatcccagatccgcatatccatcctacttgtacataattcataagcaggcccccccactagaagatatcgccgacgattgctcaccgggcatgcgcgagcttatcgaggcctctctggaaaggaaccctaatcataggcccagggctgcggaccttcttaagcatgaggctctcaacccaccacgggaagatcagccccggtgtcaatctttggattcggcattgttagaacggaaacggcttctgagccgaaaagagctggaactgcctgagaacattgcggactcatcatgcacgggctccactgaagagtccgagatgcttaagcgccagcggtctttgtacattgatctaggcgccctcgccgggtattttaatctcgtccgcggccctccaactctggagtatggttag

SEQ ID NO: 124796 - DNA, 672 bp, synthetic construct
  misc_feature 1..672: note = Description of Artificial Sequence: Synthetic coding sequence
  source 1..672: mol_type = other DNA
atggagtatatgtccaccggttcagataacaaagaggaaatcgatctactcatcaagcacctgaatgtcagcgacgtgatcgatatcatggaaaacctgtacgcaagcgaagagcccgcggtgtatgaaccctcgctgatgacaatgtgtcaggatagtaaccaaaatgacgagcggtcaaaaagcctcctgctgtcggggcaggaagtcccatggctctcatcggtcaggtatgggaccgtggaagatctcctcgcctttgccaatcatatctctaacacagccaaacacttctatggccagcgtccgcaagaaagcgggattttactgaacatggtaatcaccccccagaatggcagatatcagatcgactcagatgttctgctgatcccctggaaattgacctataggaacatcggtagtgacttcatacctcgcggagccttcgggaaggtatacttggcccaagatataaagaccaaaaagagaatggcctgcaaactgatccctgtcgaccagttcaagccttctgatgtggagatccaagcctgtttccgacatgaaaacattgctgaattgtacggggcagttctgtggggagagacagtccatcttttcatggaagcgggcgagggcgggtctgtccttgaaaagctggaatcgtgcggctag

SEQ ID NO: 124797 - DNA, 768 bp, synthetic construct
  misc_feature 1..768: note = Description of Artificial Sequence: Synthetic coding sequence
  source 1..768: mol_type = other DNA
atggagtacatgagtacaggcagcgacaataaggaggaaatcgatctccttattaaacacctgaacgtgtcagacgtcattgacatcatggagaatctatatgcttccgaagaacctgccgtgtacgagcccagcctgatgaccatgtgccaggactccaatcaaaacgatgaaaggtcaaagagtctcctgctgtcaggccaggaagtgccctggctgagttctgtgcgttatggaacagtcgaagatctgttggccttcgctaaccacattagtaacacagccaaacatttttacggccagagacctcaggaatctggcatccttctgaatatggttatcaccccgcagaatggtaggtaccaaattgactctgatgtcttgttaattccatggaagctgacttatcgaaatataggctccgatttcataccccgtggagcatttggcaaagtttacttggcccaagacattaagacaaagaaacgcatggcctgcaagctgatccccgtcgatcagtttaagccttcggatgttgaaattcaagcctgctttcgccacgagaatattgctgagttgtacggtgcggttctgtggggagagaccgtccatctgtttatggaagcaggcgagggaggcagcgtgctcgaaaaactggagagttgcggtcctatgagggaatttgagatcatatgggtgacaaagcacgtattgaaaggactggatttcctgcactctaagaaggtgatacaccacgacatcaagtag

SEQ ID NO: 124798 - DNA, 573 bp, synthetic construct
  misc_feature 1..573: note = Description of Artificial Sequence: Synthetic coding sequence
  source 1..573: mol_type = other DNA
taagtggaggacctgctagctttcgcaaaccatatatctaacactgccaaacatttctacggccagagacctcaggaatccggaatcctgctgaatatggtcatcacccctcagaatggaaggtatcagatcgactctgacgtgctgttaataccatggaaattgacctatcgcaatattggatctgattttatcccgaggggtgcattcggcaaggtgtacctggctcaggacattaagaccaagaagcgcatggcgtgtaagttaattcctgtggaccagttcaagccctccgatgtggaaattcaggcttgtttccgccatgagaacattgcggaactttatggagctgtattgtggggcgaaaccgtgcatctcttcatggaggctggcgaggggggaagtgtgctcgaaaagctggaaagctgcggcccaatgcgggaatttgagataatctgggtaactaagcacgttctgaaaggccttgactttctacacagcaaaaaggtcatacaccacgatattaagcggaaatacttgtggacctacacattccttgctcagcgcgattag

SEQ ID NO: 124799 - DNA, 1404 bp, synthetic construct
  misc_feature 1..1404: note = Description of Artificial Sequence: Synthetic coding sequence
  source 1..1404: mol_type = other DNA
atggagtatatgtcaactgggtcagataataaggaagagatcgatctgttaatcaaacacttgaacgtgtcagatgtaatcgacattatggaaaacctatatgccagcgaggaacctgctgtatatgaaccttcgctcatgaccatgtgtcaggatagtaatcaaaacgacgagcggtctaaaagcctcttgttgtccggccaggaggtgccctggctgtcttccgtgcggtacggcactgtagaggacttactggcttttgcgaaccacattagtaataccgcaaagcacttttacggccagagaccacaggagtctggaattcttctgaatatggtgattacgccccagaacggaagataccaaatcgacagtgatgtccttcttatcccatggaagcttacttaccgaaatatcggctccgactttatcccgcgaggagcgtttggaaaggtatacctggcccaagatataaaaacgaaaaaaaggatggcgtgtaaactgatcccagtggatcagttcaagcccagcgatgtggaaatccaggcttgcttcaggcatgagaacatagcagaattgtatggcgccgtgctatggggggaaacagtgcacctttttatggaggccggagagggaggttcggtattggagaagctggagtcctgtgggccaatgagagagtttgaaatcatttgggtgaccaagcatgtactcaaaggactggacttccttcatagcaaaaaagtgattcatcatgatataaagccatctaatatcgtcttcatgtccactaaggccgttttagtggacttcggcctgagtgtgcagatgaccgaagatgtgtacttccctaaggatctacgcggcactgaaatttatatgtcccctgaagtcatcttatgtcggggacacagtactaaagcagacatctactcactgggcgctaccctaatccatatgcaaaccggcaccccgccatgggttaagagatatccacgatccgcatacccatcttatctgtacattattcacaaacaagcacctccactggaagacatcgccgatgattgttcaccaggcatgagggagttaatcgaagccagtctggagagaaaccctaatcaccgaccacgggcagctgacctgctgaaacacgaggccctcaatccccctcgtgaggaccaaccaaggtgtcagtcattggactcggccctgcttgagagaaagcggctcctctccagaaaagagctggagctgcctgaaaacattgctgactcctcttgtactggatcgactgaagagagcgaaatgcttaagaggcagcggtcattgtatatcgatttgggggcgctagccgggtactttaacctggttcgcggcccaccaaccctggaatatggctag

SEQ ID NO: 124800 - DNA, 3357 bp, synthetic construct
  misc_feature 1..3357: note = Description of Artificial Sequence: Synthetic coding sequence
  source 1..3357: mol_type = other DNA
atggaaccttctcgtgccctgctgggctgtctagcctctgccgctgcggctgctccccccggtgaagacggcgccggtgcaggcgcggaggaggaggaagaagaggaagaggaggccgccgctgccgtgggcccaggagaacttggttgcgacgcaccactgccgtactggactgccgtgtttgaatatgaggcagccggtgaagatgagttgacgctcagattgggagacgtggtggaagtcctgagtaaggacagccaggtctcaggcgatgagggctggtggactggccagctcaatcagcgggtcggcatcttcccctccaactatgtcaccccaaggtcagctttcagcagtagatgtcagcccgggggagaggatccttcctgctatccccccatccagctgctggagatcgatttcgccgagctgactcttgaggagattattggtatcggtgggttcgggaaagtgtatcgagcgttctggatcggcgatgaggttgccgtgaaggccgccagacacgaccccgacgaagatattagccagaccatagagaacgtcaggcaggaagccaagctttttgctatgctcaagcaccctaatataattgccctgcgtggtgtgtgcctgaaagaaccgaacctgtgcctggtcatggagttcgcgagaggggggcccctcaacagggtgctgtccggcaaacgcatccccccagacatcctggtaaactgggcagtgcagatcgcgcgaggaatgaactacctgcacgatgaggccattgtcccaatcatccatagggatctgaaatcatcgaacatccttatcttacagaaggtcgagaatggtgacctgagtaataagatcttgaagatcactgacttcggacttgcgcgagagtggcacagaaccactaagatgtctgccgctggcacatatgcatggatggctcccgaggtcatcagggcctcgatgttttctaagggaagtgacgtctggagctacggagtacttctttgggaactcctgacaggtgaagtgccttttcgcggcatcgatggtctggcagtagcctacggggtggccatgaataaacttgccctgccaatcccaagtacctgcccagagccatttgcgaagctgatggaggactgctggaatccagatccccatagccgcccctcattcactaacatcctggaccagctaaccacaatcgaggaaagtggattttttgagatgccaaaggacagcttccactgccttcaggacaattggaaacacgagatccaggaaatgttcgaccagctaagagcaaaggaaaaggagctgcgtacctgggaggaggaactgaccagagcagcccttcagcagaaaaaccaggaggaattattgaggagacgcgaacaggagctagccgagcgcgagattgacattctcgaaagagagttgaatataataattcatcagctgtgccaggaaaagcctcgcgtgaagaagcggaagggcaagtttcgcaaatctagattaaaattaaaggacggcaacaggatctccctccccagtgatttccagcacaagtttacggtccaggcatctcccaccatggataagcgcaagagcctgataaattcacggtccagtcctccagcatctcccactatcattccgagactgagagctattcagctgacgcccggcgaatcgtccaaaacatggggccgctcctcagttgtacccaaagaagagggggaagaagaagagaagcgagctccaaaaaaaaaagggcgcacatggggccccggtacgttaggtcagaaagagctggcatctggagacgaaggcagcccacagaggcgcgagaaggccaatgggctgtccactcctagcgaatctcctcactttcatctaggtttgaaaagtttagtcgatggctacaaacagtggtcctctagcgcacccaatctggtgaaaggcccgcggtctagtcctgcccttccgggctttactagcctgatggagatggcacttctcgctgcgagttgggtggtccctattgatatcgaagaagacgaggattcagaaggccccggaagcggggagtccagattacagcacagcccgtcacagtcctacctctgtataccttttccacggggggaagatggagatggacccagtagtgatggaatccatgaagaacccactccagtgaactcagcgacttccacgccacagctgactccgaccaactcccttaagagggggggcgcacaccacagaagatgcgaggtcgcactcctgggctgcggagctgtgctcgccgccacgggtctgggttttgatctgctggaggccggcaaatgccagctcctgccccttgaagaacctgaaccaccggcaagggaagaaaaaaagcgcagagaaggcttgttccagagaagttccagaccgagacgatccacatcccccccgagtaggaagctctttaagaaggaggaaccaatgctactcctcggggatccatcagcctccctgacattgctcagcctttcaagtatttcagagtgcaactcaacccgaagcctgctgaggtctgatagcgacgagattgtcgtttatgaaatgcctgtctcaccagtggaagctccacctctctccccttgcacacacaatcccctggtgaatgttcgagttgaacgcttcaagagagaccctaaccagtcgctgacacccacacatgtgactctcacgacaccctctcaaccttcctcacataggagaacgccttcggacggggccttgaagcccgagacactcctggctagtaggagccctagctctaacggcctgagcccatcacccggcgccggtatgctgaaaaccccgtcaccaagtcgtgaccctggagagttcccgcggctgcccgatccaaacgtcgtcttccccccaacgccaagacgctggaacacccagcaagacagcacccttgagcgaccaaagactctcgaattccttccaagaccacggccctcggcaaacaggcagcggctcgatccgtggtggttcgtgagcccttcccacgctcgctccacctctcccgctaactcatcctctaccgagacgccatccaacctggattcctgctttgccagcagcagctctactgtggaggaaaggcctggactgcctgcccttctcccgtttcaggctggcccattgccacccacagagcgaaccttgctcgatctcgacgcagaagggcaatctcaagattcaaccgtacccctctgtagggcggagctgaacacccatcgtcccgcgccttatgagattcaacaagagttttggtcgtag

SEQ ID NO: 124801 - DNA, 2463 bp, synthetic construct
  misc_feature 1..2463: note = Description of Artificial Sequence: Synthetic coding sequence
  source 1..2463: mol_type = other DNA
cttgtgcttatactgcagaaggtggaaaatggggatctgagcaacaagatcctcaagattaccgattttggccttgcacgagagtggcaccggaccactaaaatgtcagcagctggcacttacgcttggatggccccagaggttatcagagcttccatgttcagcaaaggtagtgacgtatggtcctacggggtgctactatgggagcttctgacgggggaggttccgttccgtgggattgatggcctggctgtcgcctacggagtggccatgaataaattagcactgcccatcccttccacatgtccagaaccgttcgccaagctgatggaggactgttggaaccctgatcctcacagcaggcccagctttactaatatcttggatcaactgaccacaattgaagagtccggctttttcgaaatgccaaaggacagttttcattgtctccaagacaactggaagcacgaaatccaggaaatgttcgaccagctgagagccaaggaaaaagagctgcgtacttgggaagaagagctgaccagggccgctctccagcagaaaaatcaggaagaactcctgaggcggcgtgagcaggagttagccgaaagggaaatcgacattcttgaaagagaactgaacatcatcatacaccagctgtgtcaggagaagccaagggtaaagaagcgaaagggcaaattccgtaagagcaggcttaagttgaaggacggcaatcgcatcagtttgcccagtgactttcaacacaagttcactgtacaggcctctcctacaatggacaaaaggaaaagtctgatcaatagccgctcctctccacctgcgtcaccaactataatacctcggttgcgtgctatacagctcactcccggcgagtctagtaagacatggggtagaagcagcgtcgttcctaaggaggagggcgaagaagaggagaagagggcccccaagaaaaaaggaagaacttgggggccaggcaccttagggcagaaggagctggcgagtggggatgaagggctcaaatccctcgttgatggatataagcagtggagttcaagcgcgcctaatctggtcaaaggaccacgttcatcaccggctctgcccggtttcacaagtcttatggaaatggcctgcttttcctccaccctggttatctttactgaagatgaagattcagaaggccctggttctggagagagtagattacagcactcccccagccagtcttatctgtgcattccttttccccggggtgaagatggcgatggccccagttccgatgggatacatgaggaacctacacccgtcaattcagcgacatccacgcctcagctcaccccaactaattccctgaaacgcggaggcgctcatcatcggagatgcgaggtggcactacttggttgcggcgcagtgctggcggctaccggactgggatttgatctgctggaagccgggaaatgccagctcctgcctctcgaggagcccgaaccccctgctagagaagagaaaaagaggcgcgagggcctgtttcagagatccagccgccccaggaggtccacaagtcctccttcaaggaaactctttaagaaggaagagccaatgctactcttaggggacccgtctgcaagcctgacactgctgagcctgtcctccatttctgagtgtaatagcaccagatccctgcttcggtcagattcagacgagattgtagtctatgagatgccagtgagtcctgtcgaagccccccctctgtcaccttgtacacataaccccctggtcaacgtgcgtgtagagcgcttcaaaagggatcccaaccagagcctgacccccacacacgtgacactgacaacaccatctcagccctcttctcatcgaagaactccaagtgacggcgcactcaagcctgaaactcttttagcatcccgatccccctccagtaatggtctgtcaccatcgcccggggctggcatgctcaaaacaccatcaccttcccgtgaccccggagagttcccccgcctgcccgatcccaatgtcgtgttccccccaactcctaggcgttggaacacgcaacaagattcgacgctggaacggcccaagacactggagtttcttcctcgtccacgtcccagcgcaaaccgacagcggttggacccttggtggttcgtgagcccctcgcacgctagaagcacaagcccagcaaatagctccagcactgaaacccccagtaatttagactcatgcttcgcaagttctagcagcaccgtcgaggaacggccaggacttccagcattgctgccgtttcaggccggcccactgccacccacggaacgaacgctgcttgatctggacgctgagggccagagtcaggacagcactgtccctctatgtcgagctgagctcaacacacatcggcctgccccatatgagatacagcaggaattttggagctag

SEQ ID NO: 124802 - DNA, 3315 bp, synthetic construct
  misc_feature 1..3315: note = Description of Artificial Sequence: Synthetic coding sequence
  source 1..3315: mol_type = other DNA
atggagccgtccagagcacttctgggatgcctggcctctgcagccgccgctgctccaccaggggaagacggtgcgggggctggcgccgaggaagaagaagaggaagaagaagaagcggcggctgctgtaggacccggggagctgggatgcgatgccccacttccatactggacagctgtattcgagtatgaggctgccggggaagatgaattgaccttgaggttgggggatgtcgttgaagtgctgagcaaggacagccaagtgtcgggcgacgaggggtggtggacaggtcaactgaatcagagagtggggattttccccagtaactatgttaccccccgctcagctttcagcagcagatgccagccaggcggggaagatccaagctgttatccaccgattcaactcttggagatcgactttgctgaactcacactcgaggaaatcatcgggataggcgggtttggcaaagtgtatagggcgttttggatcggagacgaagtcgccgtcaaagctgcacgccacgaccctgatgaagacatctcccagacgattgagaatgtccggcaagaggcgaagttgtttgctatgctaaaacaccccaacattattgccctccggggagtctgtcttaaagaacccaacctgtgtctcgttatggagtttgctcggggtggccctctcaaccgagttctatctggaaagcgaatccccccagacatcctggtaaattgggcagtacaaatagccaggggcatgaattatcttcatgacgaggctatcgtacccatcatccatcgggaccttaagtctagtaatattctgatcctgcagaaagtcgaaaacggagacctgtcaaataagattctgaaaatcacagatttcggactggccagggaatggcatcgtaccacaaaaatgagcgccgccggaacatatgcctggatggcccctgaagtaatcagagcaagcatgttttctaagggctccgacgtctggtcttacggcgtgctcctatgggagcttctgaccggggaggttcccttcaggggcatagatggcttggcggtggcctatggcgtcgccatgaataagcttgcgctgcccatcccgagcacctgccccgagcctttcgccaagttgatggaagactgctggaaccccgatcctcactctagaccatcatttaccaacatcctggaccaacttacaacaatcgaggaatccggcttctttgaaatgcctaaggattctttccattgccttcaggacaactggaaacacgaaattcaagagatgttcgatcagctgcgcgcaaaggagaaggagctaaggacttgggaagaggaactgactcgcgccgccctacagcagaagaatcaggaagaattgctgagaaggcgggagcaggaactggctgaaagagaaatagacattctcgaaagggagctgaatatcattatccatcaattgtgccaggagaaaccgcgggtaaaaaagcgcaagggcaagtttagaaaatctagactgaagttgaaggacggcaacagaatcagtctgccgtctgactttcaacataaattcactgtccaggcctcaccgaccatggacaagcggaagtctctcatcaattcacgcagctccccacccgctagcccaacgatcattcctcgtttgagagcgatccaactgaccccaggcgagagtagcaagacatggggtagaagttcggtagtccccaaagaggaaggagaggaggaggagaagagggcccctaagaaaaaggggcgcacttgggggccaggaacgctgggtcagaaggagctggcctcaggagacgagggcagcccgcagagacgagagaaagccaacggactgtccacgccaagtgaatccccacactttcatttggggctcaaatccctggttgatggatacaaacaatggtctagtagcgcaccaaacctggtgaaagggccaaggtcaagcccagccctccccggttttacatcactgatggaaatggaggatgaggacagtgagggcccaggttcaggcgaatccaggctccagcattcacccagccagtcctatttatgtattcccttcccccggggggaagacggcgatggacccagctcagacgggatccatgaagaaccgacgccagtgaactctgccacttcaactccgcagctgacccccacgaactccctcaaacgcggcggggcgcaccaccgccggtgcgaggtggcactgcttggctgtggcgccgtgcttgcggcaactggtttgggcttcgacctgctagaggcagggaagtgccagcttctccctttggaggaacccgagcctccagctcgcgaggaaaagaaacggagagagggcctatttcagcgtagtagccgaccccgcagaagcacaagccccccaagtcgtaagctttttaagaaggaagagcccatgctcctgctaggcgatcccagtgcatctttaactctgctctctctgtctagcatctcggagtgcaactcaacacggtcccttctccgttccgactctgatgaaatcgtggtctatgagatgcctgtgagtccagttgaagctccacctctttctccatgcacacacaatccactggtgaatgtgcgcgtggaacgcttcaagcgagatccgaaccagagtttaactccgactcacgtgacgctgaccaccccgagccagccaagctctcaccggcgaactccaagtgacggtgctcttaagccagagacactcctggcttctcgttctcccagtagtaacgggctgagtcctagtcctggcgcaggcatgctgaaaacaccgtcccctagccgagatccaggagaattcccccgactacccgaccctaacgttgtgttccctcccaccccccgccgctggaatactcagcaagattccaccctggagaggccaaagacattggaattcctgcccagaccgcggcctagtgcaaacagacagcgattggacccttggtggttcgtgagcccgtctcatgcaaggtccacgagcccagctaattctagtagcacagaaacccccagcaacttggactcctgttttgcgtcctcttcctccacagtcgaggaaaggcctggcttaccggccctccttccctttcaagctggcccccttccccctaccgagcgtacccttttggacctcgatgctgaaggtcagtctcaagactcaacagttccactgtgcagggctgagcttaatacccatcggccagctccctacgaaattcagcaagaattctggtcctag

SEQ ID NO: 124803 - DNA, 1005 bp, synthetic construct
  misc_feature 1..1005: note = Description of Artificial Sequence: Synthetic coding sequence
  source 1..1005: mol_type = other DNA
atggccctgaggtggggaatcgtatctgtcggactgatttcctctgactttactgccgtcctccaaacgttacctcgatccgaacatcaagtggtggcggttgcggcacgggacttgagtcgtgccaaggagtttgctcagaagcacgacattccaaaagcatatgggtcttacgaagagctggcgaaggatccttccgtcgaagttgcatacatcggaacacagcatccccagcacaaggctgccgtgatgctctgtctcgctgctggaaaggccgtcctgtgcgagaaacccactggtgtaaacgccgcagaggtgcgagagatggtggctgaggcccggagccgcgctctgttcctgatggaggccatttggaccagattcttccccgcgagcgaggccctgagatccgtgctcgctcagggcaccctgggggacctgcgggtggccagagccgagttcggaaagaacctgattcatgtgccccgtgctgttgatcgtgcccaggcaggcggcgcgcttctggacatcggaatctactgtgtgcagttcactagcatggtgtttgggggccagaagcctgaaaagatctcagtggtcggacggaggcacgagacaggcgtggatgatactgtgaccgtgcttcttcagtacccaggcgaagtacacgggtcatttacatgctctattactgtccagctgtccaacacagcctcagtatcgggtacaaagggaatggtccagctgctgaatccatgttggtgtcctactgaactggtggtcaaaggtgagcacaaagagtttccgctgccccccgtgcctaaggactgtaacttcgataacggcgcaggcatgagttacgaagccaaacatgtgtgggaatgcctgcgcaaaggcatgaaggaaagcccggtaattcccttgagcgaatcagagctattggccgacatcttggaggaagtcaggaaagctattggagtaactttcccccaagataagcgctag

SEQ ID NO: 124804 - DNA, 2466 bp, synthetic construct
  misc_feature 1..2466: note = Description of Artificial Sequence: Synthetic coding sequence
  source 1..2466: mol_type = other DNA
atggacgtcgtcgatcccgacatttttaatcgagacccaagagatcactatgatttgctgcaacggcttggtggtggcacttatggcgaggtgttcaaagcaagggacaaagtatctggcgacttagtcgctttaaagatggtcaagatggaaccggacgacgacgtgtcaaccctgcaaaaggagatcctgatcctgaagacttgcaggcacgccaatattgttgcatatcatgggagctatctgtggctccaaaagctttggatctgtatggagttttgcggagccggctccctgcaggacatctatcaggttacaggtagtttaagcgaactgcagatttcctacgtttgtcgagaggtgttacagggactagcgtatctgcactcccaaaagaaaattcatcgggacattaagggggccaacatcctgatcaatgacgccggcgaggtacgtctggcagactttgggatttcggcccagatcggcgccaccctggcaaggcggctgtccttcatcggcacaccctattggatggctcctgaggtggcagccgtcgccctgaaaggaggctacaacgaactttgtgacatttggtcgctcggtattacggcaatcgagctggccgagcttcaacctcccctattcgatgtacatcctttacgggtactattcctgatgaccaaaagcgggtaccagccaccacggctgaaagagaaggggaagtggtcagcagcctttcacaattttatcaaagttacccttaccaagtcccctaagaaaagaccttcagctaccaagatgctgagccaccagctggtaagtcagcctggcttaaacagagggctgattctcgacctgctggacaaacttaagaaccccggcaaggggccctctatcggagacattgaggacgaagagcctgagctgcccccggcaattccccgtagaattagaagtacccacagatcatcatccttgggcatcccagacgcagactgttgtaggcgtcatatggagttccggaaactgaggggaatggagacgcgcccacccgccaatactgcaaggctccaaccacctagagatctacgttcctcatcccccagaaaacagctgtccgaatcctccgacgacgactacgacgatgtggatatccctacccctgccgaggatactccaccgcctctgccccctaaacccaaattcagaagcccttcggacgaaggccccggttcaatgggggacgacggtcagctctcccccggtgtcctcgtccgctgcgcatcaggtccaccgccaaattcgccccgtcctggacccccaccttccacctcctcaccacatctcacagctcactctgaaccctctctgtggaacccgccaagcagggagttggataaaccgcctctgctgcctcctaagaaagagaaaatgaagcggaaaggctgtgctttgctggtgaaattgtttaacggctgccccctgcgaatacacagtactgctgcttggactcatccgagcacgaaggatcagcacctgttactgggggcagaggaggggatttttattctgaaccgtaacgaccaggaagctacattggagatgctcttccctagccggactacttgggtatacagcataaacaatgtcctaatgtccctatctggcaagacgccccatttatactctcactctatcctgggactactcgagaggaaggaaactagagcgggtaaccccatcgcccatatctctccacacaggctcctggcacgaaaaaatatggtctccaccaagattcaggacacgaaaggctgtcgggcctgttgtgtggccgaaggcgctagcagcggcggcccctttctttgtggggcacttgaaacaagcgttgttttgctgcagtggtaccaaccgatgaataagtttcttttggtgcgacaggtgctgttcccactaccaacacccctatctgtgttcgccctgttgacaggccccggctcggagttgcccgcagtttgtatcggagtgagccccgggaggccaggtaaaagcgttctcttccatacggtccgctttggtgcactttcctgttggcttggggaaatgtctacggaacatcggggccccgttcaagtgacccaagtcgaagaagacatggttatggtgctgatggacgggtcagtcaagctggtgaccccggaggggagcccggtaagggggttgcgcacccccgagatacctatgactgaagccgtggaagccgtggccatggtcggcggccagctgcaggccttttggaaacacggagtccaggtttgggccttggggagcgaccagcttctgcaggaacttcgcgatcctacccttactttcaggctgctgggctcacccagacccgttgtggtagagacacggcctgtggacgatcctacagcaccatccaacctctacatccaggagtag

SEQ ID NO: 124805 - DNA, 720 bp, synthetic construct
  misc_feature 1..720: note = Description of Artificial Sequence: Synthetic coding sequence
  source 1..720: mol_type = other DNA
atggaattcagaaaactccgcgggatggaaacccgccctccagccaacaccgccagattacagccccccagggacttgaggtcatcatccccacgcaagcagttgtctgagtcaagcgacgacgactatgatgatgtggatatacctacacctgcagaggacaccccgcccccactcccaccaaagccaaagttcagatcccccagtgacgaagggcccggctcaatgggagacgatggtcagttgtctcctggtgtgctggtgaggtgcgccagcggcccacccccaaactctcccaggcccggcccgccacctagcacaagttctccgcacctgactgcacatagcgagccctccctgtggaaccccccttcccgggagctcgataaaccccctctgctgccacccaaaaaggagaaaatgaagaggaaaggctgcgcccttctggttaaactcttcaacgggtgtccattgcgtattcacagcactgccgcgtggacccacccaagcaccaaagatcagcatctgcttctcggcgcagaggagggcatctttatcttaaatagaaacgatcaggaagctaccttggagatggagaggcctcccacctgtattcttatcgccagtcttgcctgttggaatgggaaacgccctgagcaggagacgccttcactgacactcgcccccacagcctattggcaaggaacatcatcacagtag

SEQ ID NO: 124806 - DNA, 2502 bp, synthetic construct
  misc_feature 1..2502: note = Description of Artificial Sequence: Synthetic coding sequence
  source 1..2502: mol_type = other DNA
atggatgtagtcgatccagatattttcaaccgggatccccgggaccattatgacctactgcaaagactggggggagggacgtatggcgaagtgtttaaggcaagggacaaggtctctggcgacctcgtcgccctgaagatggtgaagatggagcctgacgacgacgtgtctacactgcagaaggagatcctgattcttaagacctgccgccatgccaatatagtcgcctatcacggcagttatctgtggcttcagaaactgtggatttgcatggagttttgtggagcaggctcccttcaagacatttatcaggttaccgggagcctgtcggagctgcagatctcttatgtttgccgggaggtccttcagggcttggcatacctgcactcccagaaaaaaatacatagggatattaaaggggcaaacatcttgatcaatgatgcaggagaggtacgcctggcagacttcggaatctccgcccaaatcggtgccactttagcccggagactgtcttttattggcacgccatattggatggcgcctgaggtggccgccgtggcactgaaaggcggctacaatgaactttgcgacatatggtccctgggaattactgctatcgagttggctgagctccagcctccccttttcgacgtccacccccttagagtgctctttctgatgacaaaatccgggtatcagccacctcggctaaaagaaaaaggcaaatggtctgccgcatttcataatttcatcaaggtgaccttaacaaagagccccaaaaaaagaccttcggctactaaaatgctgtcacaccaactggtctcccagcccggcctgaatcggggcctgatcttggacctgctggacaagctgaagaatcctgggaagggaccatccatcggtgacattgaggacgaggagccagaattacctccagctatcccccgtcggataaggagcactcatcgctcgagctctctgggtataccagatgctgactgctgccgtaggcacatggagtttagaaagttaaggggcatggaaactagaccccctgctaatacagcccggcttcaacctccgcgagacctgagatctagctcaccacgcaaacaactcagtgaaagtagtgatgatgactacgatgatgtagacatccccacacctgccgaggatactccaccgccacttccaccaaaacctaagttccggagcccttctgacgagggaccaggatccatgggcgacgacggccaactatcccctggagtcttggtgcgttgcgcttctggacctccgccaaattctccacgccccggaccgccgccctccacgtcttccccacacctcaccgcgcactctgaaccttctctgtggaatcccccatctcgtgagttggataagcctcccctgttgcctcctaaaaaggaaaaaatgaaaagaaagggctgcgccctgctggtaaagctcttcaatggctgccccctcaggatccattccaccgccgcctggacacacccatcaacgaaagaccaacacctgctgctgggagccgaggagggtatctttattctgaaccggaacgatcaggaggccaccctcgaaatgctgttccctagtaggacaacatgggtgtactctatcaataatgttcttatgtctctcagcggaaagacaccccatctctatagtcactccattctcggactcctcgagaggaaggagacccgagctgggaacccaatcgcacatatctctccgcacaggctgctggcccggaagaacatggtttccactaaaatccaggatacaaaaggctgtcgggcctgttgtgtggcagagggagcatcttcaggtggacctttcctctgcggagcactcgaaaccagtgttgttctgctacagtggtaccagccaatgaacaaattcctgttggttcggcaggtgctatttcccctgcctacacccctgagcgttttcgcattgctgaccggccctgggtcagagttgccggcggtatgtatcggcgtgtcaccaggacggccaggtaagagcgttctttttcacacagtgaggtttggtgccttgtcatgctggctaggagagatgtctacagagcatagaggccctgttcaagtcacgcaagtggaggaagacatggttatggtgctgatggacggcagcgtgaagctggtcacccctgagggatctcctgtgcggggcctgcggacaccagaaatcccaatgaccgaggctgttgaagccgttgcgatggtggggggacagctccaggccttttggaagcatggcgttcaagtgtgggcgttagggagtgatcagttgctgcaggaactcagagacccaacgctcacgtttagactgctggggtccccccggcttgagtgctccggtactatctccccacactgtaatctgttgcttcccgggagttctaacagtcctgcctcagcaagccgcgtcgccggaattacgggattgtag

SEQ ID NO: 124807 - DNA, 2463 bp, synthetic construct
  misc_feature 1..2463: note = Description of Artificial Sequence: Synthetic coding sequence
  source 1..2463: mol_type = other DNA
atggccctgctgcgcgatgtatctctccaagacccgcgcgataggtttgagcttttacaacgtgtcggtgccgggacttatggggacgtttacaaggctcgcgatacagtgacaagtgagttagccgcggttaagattgtgaagctagacccaggtgacgacatctcttccctgcaacaggaaataactatactgcgcgagtgtcggcacccaaacgtggtggcttacatcggctcatatctacgcaatgacaggctgtggatttgtatggagttttgcgggggaggctcattgcaggagatttaccatgcgacaggacccctggaggagcgccagatagcatatgtatgtcgagaggcactgaaaggactgcatcatctgcactctcaaggcaaaattcatcgggatatcaagggtgcaaatctcctcttaaccttgcagggagatgtgaagctggctgattttggtgtgagtggagagttaacggcaagtgtggcgaagcggcggagttttattggtactccttattggatggccccagaagtcgctgcagtggagcggaaaggtggttacaatgaattgtgtgacgtctgggctcttgggatcactgcaatcgagctgggagagctccagcccccccttttccacctccacccgatgagggctcttatgctcatgagcaagtccagtttccagcctcccaagctgagagacaagacgcggtggactcagaattttcaccatttcctgaagcttgccctgacgaaaaatcccaagaagcggccaacagccgagaagttacttcagcacccttttacgacacagcagctgccaagagccttattgactcagctgctagacaaggccagcgatcctcacctcggaactccttctcctgaggattgcgagctggagacatacgacatgttcccagacactattcactctcgggggcagcacggccctgctgagaggacaccaagcgagattcagtttcatcaggtgaagttcggggcacctcgaagaaaggagaccgatcctctaaatgaaccttgggaggaggagtggacccttcttgggaaggaggaactgtctggctcactgttacagtccgttcaagaggccctcgaggagagatcactgaccattaggtccgcgagcgagttccaggaattggacagtccagatgatacaatggggaccataaaaagagccccttttctaggaccgctgcccacggaccctcctgcagaagaacccctcagtagccctcccggcactttgcccccaccgccttcaggaccaaatagcagccccttattgcctacagcctgggcaaccatgaagcaaagagaggacccagaacgctcgtcttgccacggtctccccccgacccccaaggtccacatgggagcttgcttttctaaagtgttcaatggctgtccactaagaattcatgctgcggtgacctggatacatcccgtcacacgcgaccaatttctcgtcgtgggcgctgaagagggaatttacactctcaacctccatgagctccatgaagacacattagagaaactcatcagccaccgatgcagctggctctattgcgtgaataatgtgctcctgagcctttccggaaaatcaacccatatatgggcacatgatctgccaggattgttcgaacaacgcaggctacagcaacaggtgccactatctattcctacgaaccggctgacccagcgtataatccctagaagattcgcgctcagcacgaaaattcccgacaccaaagggtgtctacagtgcagggtcgtgcgaaacccatacaccggggccactttcctgcttgccgccctgccaacctctcttctactcctgcagtggtatgagcctcttcagaagtttcttctcctaaaaaacttcagctcccccctgccttccccagcagggatgttggagccgttggtactcgatggaaaagagctgccacaggtctgtgtaggagcagaaggacccgagggtccgggatgtcgggtgctgttccacgtgctgcccctagaagccggtcttacaccagatattttgattcctccggaaggcatccccggatctgcccagcaggtgattcaggtagatcgggataccattctggtctctttcgagcgatgtgttcgaattgtgaacatgcagggcgaaccaaccgcgaccctagcccccgagctgaccttcgattttcccatcgaaacggtcgtttgcttacaggactccgttctcgccttttggtcccacggaatgcaggggagatccctggacactaacgaggttacacaggaaataacagatgaaaccagaatctttcgggtcctcggggcacacagggatattattctggaatccattccaaccgataacccagaagctcatagcaatctctatatcctgacgggccaccaatctacatactag

SEQ ID NO: 124808 - DNA, 2541 bp, synthetic construct
  misc_feature 1..2541: note = Description of Artificial Sequence: Synthetic coding sequence
  source 1..2541: mol_type = other DNA
atggaagctcctttacggccagccgccgacattctcagaaggaatccgcagcaggattacgagctggtccagcgcgttggctcagggacctatggtgacgtctacaaggctaggaatgtccacacaggtgagctggccgcagtaaaaatcataaagctggaacccggagatgatttctcccttatacagcaggaaatctttatggttaaagagtgtaagcactgtaatatcgtggcttattttggctcctacctgtctcgcgagaaactctggatctgtatggaatactgcggtggtggcagcctccaggacatctaccacgtgaccgggccgctctcggaactgcaaattgcctatgtctgccgcgaaactcttcagggtttggcatatctccataccaagggcaagatgcacagggacatcaagggcgccaacatcctgttgaccgaccatggagacgtgaaactggccgacttcggagtcgccgcaaagataactgctacaatcgccaagcggaagtctttcattggcaccccctattggatggcgcctgaggtcgcagcagtggagaaaaatggggggtataaccaactgtgtgacatctgggctgtcggaattaccgccattgagcttggcgaacttcagcccccgatgtttgatctgcatcctatgcgggcattgttcctgatgtccaaatctaactttcagccaccaaagctaaaggataagaccaaatggtcatccacctttcataacttcgtaaagattgcccttaccaagaaccctaagaagagaccaactgctgagcgtttactcactcacacgttcgtggctcagccgggcttgagcagggcgttggcggtggagctgctggataaggtaaacaatccagacaatcatgctcattacacagaggcagatgacgatgacttcgaaccacacgcgattatccgacacacaatacgctcgactaaccggaacgcacgtgccgagagaactgcttccgagatcaattttgacaaattgcagttcgaaccccccttgagaaaggagacggaggcaagggacgaaatgggactgagctctgacccaaactttatgcttcagtggaacccttttgtggacggtgcaaatactgggaagagcacaagcaagcgggctatcccacccccactgccaccaaagccacgtattagctcttaccccgaggacaattttccagatgaggagaaagcctccacgatcaagcattgtccggattccgagagcagggcccctcaaattctgagaaggcagtcttctccttcctgtggccccgtggcagaaacatcatccattggaaacggtgacggcatctctaaacttatgtctgaaaatactgagggaagtgcccaggcaccgcagctgcccagaaagaaggataaacgggattttcccaagcctgccattaatggtctacctccaacacctaaggttctcatgggggcctgtttttcaaaagtgttcgatggatgccccttaaaaattaattgcgccacctcatggattcaccctgataccaaagatcaatatatcatcttcgggacagaggatggtatttataccctaaatctgaacgaacttcacgaggccaccatggagcagctctttccaagaaagtgcacatggttgtacgttataaataatactctgatgagtttatcagtgggaaagacattccaactctattcccataatctcattgccctgtttgaacacgccaaaaagcccgggctggcagcacatatacagacccaccgcttccctgatcgcatcctgcccaggaaatttgccctgaccactaagatccctgatactaagggctgccataagtgttgtattgttcgaaatccatataccggtcacaaatacttatgcggggccttgcagagtgggatcgtgcttttgcagtggtacgaacccatgcaaaagtttatgttgataaagcactttgatttcccccttcccagtcccctgaatgtgtttgaaatgctggttatacctgaacaagaatatcccatggtctgcgttgcaatttctaaaggtaccgagtctaaccaggtcgttcagttcgaaactatcaacctgaactctgcgagtagttggttcaccgagatcggagcagggtcccagcagctcgacagcatacacgtgacacagcttgaacgcgacactgtcctcgtgtgtcttgacaagttcgtgaaaatcgtcaacctgcaagggaaattgaaatcaagcaagaagttggccagtgagctcagcttcgatttcagaatcgagagtgtggtttgtcttcaggactctgtactcgccttctggaaacacggaatgcaaggaaaatcattcaagagtgacgaggtcacacaggaaatcagcgacgagaccagggtctttcgactgcttggcagcgaccgcgtggtggttctggagagccgaccgaccgaaaaccccacagcccactcaaatctgtacattctggcaggccacgagaatagttattag

SEQ ID NO: 124809 - DNA, 699 bp, synthetic construct
  misc_feature 1..699: note = Description of Artificial Sequence: Synthetic coding sequence
  source 1..699: mol_type = other DNA
atggctacggcggagtcacgggctttgcagtttgctgaaggggcggccttccctgcttatagagctccccatgctggtggcgccctgctgccacccccttcccccgcagccgccctgctgcctgctccacccgccgggcctggaccagcaacttttgcagggtttctgggtcgcgacccgggaccagcaccacctccccccgcctccctggggagccctgcgccaccaaagggggccgcagcaccctcagcctcacagagacgcaaacggaccagtttttccgctgaacaactgcagttgttagaactggtcttccgcaggactcgttacccagatatccacctccgggagaggttggccgctctgacactgttacccgagtctcgcatccaggtctggtttcaaaatagaagagctaagtcaaggaggcagtcaggcaagagctttcaacctctagcccgccctgaaatcatcctaaatcactgcgcaccgggaactgagacgaagtgcctgaagccccagctccccctggaggtggatgtaaactgcctgcctgagccgaacggggttggaggtggcatcagcgatagctcttcacaggggcagaattttgagacatgttctcccctaagtgaggatatcgggagcaagcttgacagttgggaggagcatatcttctccgcctttggcaacttctag

SEQ ID NO: 124810 - DNA, 723 bp, synthetic construct
  misc_feature 1..723: note = Description of Artificial Sequence: Synthetic coding sequence
  source 1..723: mol_type = other DNA
atggccactgcggagtcaagagcactgcagttcgccgagggggccgcctttcccgcctatagagccccacacgctggcggcgccttgctcccgcccccatcacccgccgccgctctgttacctgcccctccagcgggcccgggacctgccacctttgcgggattcctcggtagggatccgggtccagcacccccacctcccgccagtttgggcagccctgctcctcccaaaggtgctgccgccccctctgccagccagcgccgtaagcgcacctcgttcagtgctgaacagctgcagttgctagagctagtgtttcgtcgaactaggtaccccgatattcacttgcgtgaacgattggccgccctcactttgcttcctgagagtcgcatacaactgctctttagtcccctgttccaggtgtggttccaaaaccggcgggcgaagagccgccgacagagcggtaagtcctttcagcctttagcccggccggaaatcatactaaaccactgtgctccaggtactgagactaagtgcttgaaacctcagttgcccctggaagttgacgtgaactgcctccccgaaccgaatggggttgggggcgggatctccgatagctcatcacagggccaaaactttgaaacgtgttcacctctcagcgaggatattggtagcaagctagattcttgggaagaacatatattttctgcttttggcaacttttag

SEQ ID NO: 124811 - DNA, 882 bp, synthetic construct
  misc_feature 1..882: note = Description of Artificial Sequence: Synthetic coding sequence
  source 1..882: mol_type = other DNA
atggccacattcagcgggcccgcaggtcccattttgtccctcaacccgcaagaagacgtcgagtttcaaaaagaagttgcccaggtccgaaagcgcatcactcagcggaaaaagcaggagcaattgacgcccggcgtcgtgtatgtgaggcaccttcctaacctgttagacgaaacccagatctttagctacttttcacagtttggaactgtcacccgcttcaggctcagcagatcaaaacggacaggtaattcgaaaggctacgcatttgtggagtttgagtccgaggacgttgcaaagatagtcgctgaaaccatgaacaactacctgttcggagaaagattgctggaatgtcactttatgccccctgaaaaggtgcacaaagaattgttcaaggactggaatattcctttcaagcagccatcctacccatcggtgaagcgctataacagaaacaggactctcacacaaaagctgcggatggaagaaaggttcaaaaaaaaagaaaggctcctacggaagaagcttgccaagaaagggattgactatgacttcccgtcactgattcttcagaaaaccgagagcattagtaagacgaacagacagacaagcactaagggccaggtcctccggaagaagaaaaagaaagtaagcgggaccctggatacaccagagaaaacggtcgattcacagggccccacgcccgtgtgtaccccaacgttcctggagcgcaggaaatcacaagttgccgagcttaacgatgacgacaaggacgacgaaattgtatttaaacaacctatttcttgtgtcaaggaagagatccaagagacacagacgcctacccacagtagaaagaagaggcggcgaagctctaatcagtag

SEQ ID NO: 124812 - DNA, 1257 bp, synthetic construct
  misc_feature 1..1257: note = Description of Artificial Sequence: Synthetic coding sequence
  source 1..1257: mol_type = other DNA
atggcccctagaggacggcgccgccccagaccacacagatctgaaggagcccggaggtctaaaaacactttagaacggactcatagcatgaaagacaaagccggacagaaatgcaagccaattgatgtgtttgacttcccagacaactcagatgtgagctccatcggacggctcggggaaaatgaaaaggatgaagagacttatgaaaccttcgacccaccgctacactctaccgccatctatgctgacgaagaggagtttagtaagcactgcggtctgagcctgtcttcaacacccccagggaaagaagccaagcggagttcagataccagcggtaacgaggcctctgaaatcgagagcgtgaagatctcagcaaaaaaacccgggagaaaactcagaccaatcagcgatgactcagaaagcattgaggaatctgatacgcgaaggaaagtcaagtccgcagagaaaattagtacacaaaggcacgaagtgattagaacaactgcaagttctgagctgtctgagaagcctgcagaatccgtcacatccaagaagaccggccccctgtctgcacagcccagcgttgaaaaagaaaacctagccattgaaagtcagagtaagacccaaaaaaaaggcaaaattagtcatgacaaacgaaaaaagagccgctcaaaggcaatcggatccgacacttcagatatcgtgcatatatggtgtccagagggaatgaagacgtcagatatcaaggaacttaatatcgtgctgcccgagtttgaaaagacccatttggagcatcaacagagaatagaaagcaaagtctgtaaagctgcgatagccaccttctatgttaatgtgaaggaacaatttatcaaaatgctgaaggagagccagatgcttaccaatctgaaaagaaaaaatgctaaaatgattagtgatatcgaaaaaaaacggcaaaggatgatagaagtgcaggacgagctgctacgtcttgagccccagctcaaacagctgcagacaaagtacgacgagctcaaagaacggaagtcatcgctcagaaacgctgcctacttcttgtccaatcttaaacagctctaccaggactattcagatgtccaagcacaggagccaaacgtgaaggagacctatgattctagttcattacccgcactccttttcaaggccaggacacttctcggagccgaatctcatttgcggaatattaatcatcagctggaaaagttactggatcagggatag

SEQ ID NO: 124813 - DNA, 963 bp, synthetic construct
  misc_feature 1..963: note = Description of Artificial Sequence: Synthetic coding sequence
  source 1..963: mol_type = other DNA
atggcacctagaggcagaaggaggccacggccccacaggtccgagggcgccaggagatcaaaaaataccttagaacgcactcactcaatgaaagacaaagccggccagaagtgcaagcctatcgacgtttttgattttcctgataattcggacgttagcagtattgggcggctgggggagaatgaaaaagatgaagaaacatatgaaacttttgatcctccactccatagtaccgctatatacgccgacgaggaggaattttcaaaacactgtggactcagcctttcatcaacacctccgggaaaagaggccaaaaggagctcagataccagtggcaacgaagccagcgaaattgagtctgtgaagatttccgctaagaagccgggcaggaaactccgccccattagcgatgactccgagtcaatagaggaatcagatactcgccgcaaggtgaagagcgcagagaaaatcagcacccagcgtcatgaggtaattcgcaccacggcttcctccgaattgtccgaaaagcccgcagagagcgtgacatcaaagaagactggacccttgagtgcacaaccgtccgtggaaaaggagaacctagcaattgagagtcaatctaaaacccagaagaaaggtaagatttcccacgataagagaaagaaatcacggtccaaggccattgggagtgatacgtccgatatcgtccatatctggtgcccagaagggatgaaaacctcagatatcaaggaactgaatatcgtgttaccagagtttgagaagacacatctcgagcaccagcagcgcatcgaatcgaaggtatgtaaggccgccatcgcaaccttctatgtcaacgtgaaagaacagttcataaagatgctgaaggaaagccaaatgctcaccaatcttaagcgcaagaatgctaaggtaagagctactgctgaaacaacaaccaataaaatctag

SEQ ID NO: 124814 - DNA, 963 bp, synthetic construct
  misc_feature 1..963: note = Description of Artificial Sequence: Synthetic coding sequence
  source 1..963: mol_type = other DNA
atggccccgaggggccgtcgccggcccaggcctcaccgatccgagagtgctcgcaggtccaagaacaccttggagcgcacacactctatgaaggataaagctggccagaaatgtaaacctatagatgtcttcgacttccccgacaactctgacgtctcctctattggcaggttgggagaaaacgaaaaggacgaagagacttacgagacattcgatccaccactgcacagtacagctatttatgcagatgaagaggagttctcgaagcattgtggactttctctttcctcaactccccccggcaaggaggctaaaaggagtagcgataccagcggtaacgaggcctcggagatagagtccgtcaagatctcggctaaaaagccgggccggaaattgagacccatcagcgatgattctgaatcgatcgaagagtcagataccaggagaaaggtcaaatccgctgagaagatatccacgcaaaggcacgaagttattcggaccacagcctccagcgaactgtccgagaaacctgccgagagtgtgacctccaaaaaaaccgggcctttgtcagcacaaccctcagttgagaaagaaaacctggctattgaatcccaatccaaaactcagaagaaggggaaaatcagccacgacaagcgcaaaaaaagcagatccaaagctatcggcagcgacacatccgatatcgtccatatctggtgtcctgagggtatgaaaacttcagatatcaaggagctgaacatcgtcctgcctgaattcgagaagacccatttagagcaccagcagcgcattgagtccaaagtttgcaaggctgcaattgccactttttatgtgaatgtgaaggagcagtttattaagatgcttaaggagtcccaaatgctcaccaacctgaaaagaaaaaatgctaaagtcagagcgacagccgagaccacaacaaataagatttag

SEQ ID NO: 124815 - DNA, 1014 bp, synthetic construct
  misc_feature 1..1014: note = Description of Artificial Sequence: Synthetic coding sequence
  source 1..1014: mol_type = other DNA
atggctccccgcggacgacgacggccccgcccccacagatcagagggagcccgccgaagtaaaaacacactggaacgcacacactctatgaaggacaaggctggccagaagtgtaaacccattgatgtgttcgacttccccgataacagcgatgtcagcagcatagggcggcttggtgaaaatgaaaaagatgaggagacatacgaaactttcgatcccccactgcatagcacggcgatctatgcggacgaggaagaattctcaaagcattgtgggttgtcactcagtagtacccccccaggaaaggaggccaaacggagttctgacacgtccggcaatgaagccagcgagatagagtcagttaaaattagcgcaaagaaacctggacggaaacttcggcctatttcagacgactccgagtcgatcgaggagtcggacacccggaggaaggtgaaaagcgccgaaaaaatctctacccagagacacgaagtgatccggacaactgcatctagcgaactgtctgagaagcccgccgagtctgttacgtctaagaagaccggcccattgtcagcccaaccatcagtggaaaaagaaaatctagctatcgaatcacagagtaaaactcaaaaaaagggaaagatctctcacgacaagaggaaaaagtcaagatccaaagctatcggctcagacacttccgacatcgttcacatttggtgccccgagggaatgaagactagtgacatcaaggaactgaacattgtcctgcccgagtttgagaaaacccatctggagcatcaacaacgcatcgaatccaaagtctgtaaagcggcaatagctaccttttatgttaacgtgaaggaacagtttattaagatgctgaaggaatcgcagatgctgaccaacttgaaaaggaaaaacgcgaaaatgatttctgacatcgaaaagaagcgacaacgtatgatagaggtgcaagacgagctgctacgcctttggactggggctggcctctggtag

SEQ ID NO: 124816 - DNA, 2760 bp, synthetic construct
  misc_feature 1..2760: note = Description of Artificial Sequence: Synthetic coding sequence
  source 1..2760: mol_type = other DNA
atggcggccgatgtctttatgtgctctcccaggaggcccagaagcagaggtcgtcaggtgctgctcaaaccccaagtctccgaggatgatgacgattcagataccgacgagcccagtcctccacccgcaagcggggccgccacgcctgctcgggcccatgcatctgccgctccacctcccccccgcgctggccctggacgcgaggagccaccccggcgccaacaaataatccattctggtcattttatggtgtccagcccccatagggaacaccctcctaagaagggttatgattttgacaccgtcaacaaacagacctgtcagacctattccttcggaaagacctcttcttgccacctgtctatcgacgcttccctcacaaagctctttgagtgtatgacactggcgtactcaggaaagctcgtctcccctaaatggaagaatttcaagggtctgaagttgcagtggagggataagatccgacttaacaacgccatctggcgagcttggtatatgcagtacttggagaagcggaagaaccccgtgtgtcatttcgtgacccctctggacgggagcgttgatgtggatgaacaccggagacctgaagcgataactacagagggcaaatactggaagagtcgaattgagatagtgatccgggaataccataagtggcgcacctactttaagaaacgattgcagcagcacaaggatgaggacctgtcaagcttggttcaggatgatgacatgctttactggcataagcacggcgacggatggaagactccagtccctatggaagaagatccactgttagatactgacatgttaatgtccgaattttccgacacactgttctccactctgtccagccaccagcccgttgcctggcccaacccgagagaaatcgcacacctggggaacgccgacatgattcaaccaggtctgatcccactccaaccaaatctggatttcatggacacattcgagccatttcaggaccttttctcaagctccaggagtatttttgggagcatgttacccgctagcgcaagtgcccccgtgccagacccaaataatccacccgcccaggagagtattcttcccactactgctctgcctacagtttcacttcctgatagcctgatcgctccgcctacagcaccctccctggcccatatggacgaacaaggctgtgaacatacatctcgcacggaggatcccttcatacaaccaacagactttggacctagcgagccacctctgtccgtgccacagcccttcctcccggtgttcaccatgccactgctgagcccgagtccggcccctccacctatttcacctgtgctccccctggtgccaccacctgctacagctcttaacccaccagcgcctccaacgttccaccagccccagaagttcgccggagtaaataaagctccctccgtcatcacacacactgcctctgctacactcacccatgatgcgcctgctactacattttcgcagagccagggcttggtcatcacgacccaccaccctgcccccagcgccgccccttgcggacttgccctgtcgcctgtgactcgccctccgcagccacggctgacctttgtgcacccaaagcctgtttcacttaccggcggccgcccaaagcaacctcataagatcgtgcctgctcccaagcctgagcctgtgagcctggtcctaaaaaatgcccggattgccccagcggccttcagcggacagccccaagccgtgattatgacgtccgggcctctgaagcgagaaggaatgctagccagtacggtctcacagagcaacgtcgtcattgcccccgccgcaatcgcccgcgctcctggagtgcctgaattccattcgagtatcctcgtaaccgatctgggacatgggacttcatcacccccagctccagtatcccgtctgtttccttccaccgcccaggacccactggggaagggagagcaagtccctcttcatggtgggtcaccacaggttacagtcacaggccctagccgcgactgccctaactctggccaggctagtccgtgcgcgagcgagcagtcgccttctccccagtccccccagaacaattgtagcggaaagtctgacccgaaaaacgtggccgctctgaagaaccggcagatgaagcacatttcggctgagcaaaagcgccgcttcaatatcaaaatgtgcttcgacatgttgaactccctcataagcaataattctaagttgacgtctcatgcgataactctccagaagactgtggagtacattacaaagctgcagcaggaacggggccagatgcaggaggaggcccggcgcctgagggaagagatcgaagagttaaacgcaacaattatctcctgccaacagctgctgcctgcgacaggtgtccctgtgacccggcgtcaattcgaccacatgaaagacatgtttgacgaatacgtgaaaactcggaccttgcagaattggaaattttggattttttccataatcataaagcccttgttcgagagctttaaaggaatggtctctacttcttctctggaggaactgcaccgcaccgctctgtcctggctggatcagcattgcagcttgccaatcctgcgaccaatggtcctgagcacacttcgccagctgtctacttccacttctatcctcaccgaccccgcccagctgccagaacaggcatcaaaggctgtcacgagaatagggaagcgtctcggcgaaagctag

SEQ ID NO: 124817 - DNA, 657 bp, synthetic construct
  misc_feature 1..657: note = Description of Artificial Sequence: Synthetic coding sequence
  source 1..657: mol_type = other DNA
atggatgagcaaggatgcgagcacactagccgaacagaagacccattcatccagccaacggactttgggccctctgagccaccgctttcagtacctcccccccctatttcccctgtgttaccactcgtgcctccccccgctacagcgctgaacccccccgcgccccctacgtttcaccagcctcagaagttcgcaggcgtgaacaaggctcccagtgtcatcacccataccgcctctgcgacccttactcacgacgcccctgcgaccacctttagtcaatcacagggtctggttattaccacccaccaccccgcaccctcagccgcaccatgtggtcttgctcttagccctgtcactagaccccctcagccaagacttactttcgtgcacccaaaacctgtctcactgacgggaggacggcctaagcagccccacaagattgtccccgcaccaaaaccggagcctgtgtcactggtgctgaagaacgcaagaatcgcccccggtgagcccggcggtgaaacgcagtgcggagccccgcctgatccagagggatgctttcctatcccaaaagccttcaagcttgtgaccactaccactaccctcgtgtgtacgtgcatgaggactcacatccatctgaacgagacgaaagtgtcatag

SEQ ID NO: 124818 - DNA, 1581 bp, synthetic construct
  misc_feature 1..1581: note = Description of Artificial Sequence: Synthetic coding sequence
  source 1..1581: mol_type = other DNA
atggacgaacaaggctgtgaacacacatccaggactgaggatcccttcatccagccaacagattttggcccctcagagccccccctttcggtaccccaacctttcctacccgtgttcaccatgccccttctttcccccagccctgcacctccacccatatctccagtgttgcccctcgtgccaccacctgcaaccgctttgaaccccccagcccctcccactttccaccagcctcaaaagttcgctggagtgaataaagcaccatccgtgatcactcatacagcctcggccacacttactcacgatgctcctgcgaccactttttcacagtctcaaggacttgtgatcacaacacaccaccctgccccatctgcagctccatgtgggttggcactgtctccagtgaccaggccccctcagccgcgattaacttttgtgcaccctaagcccgtttctttaactggtggccgtcccaagcagccgcacaaaatcgttccagcacctaagcctgaacccgtctcgctggttctgaagaatgctcgaatcgctcctgctgccttctctggtcagccccaggcagtcataatgacttctggcccccttaaaagggaggggatgttagcatcgacagtcagccagtccaacgttgtgatcgctcctgctgcaatcgctcgagcaccaggagtgccagaatttcactcaagtattctggttacagatctgggccatggcactagttcaccgccagccccagtgagtaggctgttcccatcaaccgcacaagaccctctaggtaagggcgaacaggtacccctgcacgggggtagtccccaggtgaccgtcaccggccctagccgtgactgtccaaattccggccaggcctccccttgcgcttcggagcagtccccgagcccccagtctccccagaacaactgcagtggtaaatcggacccgaagaacgtggccgccttgaaaaaccgacagatgaagcatatcagcgcagagcaaaagcggcggtttaacatcaagatgtgcttcgacatgctgaactccctgatatcaaataattccaagctgacttctcacgctattaccctgcaaaaaaccgtcgagtacatcacaaaattgcagcaagagcgcggacagatgcaagaagaggcccgacgactccgcgaggagatcgaagaactgaatgcaactattatctcctgtcaacaactcctccctgcaactggcgtccccgtgactaggaggcagttcgaccacatgaaggacatgttcgatgagtacgtgaagacgaggaccctccagaattggaaattctggatcttctccatcattatcaagcccctgttcgagtctttcaagggaatggtgtctacgtcatcactcgaggagctgcataggactgccttgtcctggctcgaccaacactgctcacttccaatcctgcggccgatggtgctctcgactcttcgccagttgagcaccagcaccagtatcctgactgatccggcccagctccctgaacaagcatccaaagccgtgacccgaatcggaaagcggctgggagaatcttag

SEQ ID NO: 124819 - DNA, 2559 bp, synthetic construct
  misc_feature 1..2559: note = Description of Artificial Sequence: Synthetic coding sequence
  source 1..2559: mol_type = other DNA
atggcaggtgccctggctggtctggctgccggcctccaggttccacgggtggccccctcccccgattcagattcagatacagattcagaggatccttctctccggcggagcgcgggggggctgcttagatcgcaagtaatccattccggccactttatggtgagcagcccgcatagtgactcattgcctcggagacgggaccaggaggggtctgtgggcccgtcagacttcggacctaggagcattgatccaaccctgacgaggctgtttgagtgtttgagtcttgcttatagcggcaagcttgtgtccccaaaatggaagaattttaaaggcttgaagttattatgcagagataaaatcaggctgaataatgctatctggcgggcctggtacatccaatacgtgaagagaaggaaaagcccagtgtgcggatttgtgaccccactccagggaccagaggcagacgcccaccggaagcccgaggcagtcgtacttgagggtaactattggaagcgtcgaattgaggtggtcatgcgcgaataccataagtggcgaatctactacaagaaaagattaaggaaaccatccagggaagacgatctgttggcccccaagcaggccgagggtagatggcctccccctgaacagtggtgtaagcaacttttttcttccgtggtgccggtgctgctgggagacccagaggaggaacctggaggtaggcaactgttagatctgaattgttttctgtctgatatcagcgacaccctctttaccatgactcagtcaggcccatcccctctgcagctcccacccgaggacgcatatgtgggcaatgccgatatgattcagcctgatttgacacccctgcagcctagtctggacgacttcatggacatctccgacttcttcactaattctcggctgcctcagcctcccatgccttccaattttcctgagcccccctccttttccccggtagtggactcgttgttttcctctgggactcttggtcccgaagttccccctgccagctccgcaatgactcacctctccggccacagcagactccaagccaggaatagctgtcccgggcctttggactcaagcgcattcctcagctcagactttctcctgccggaggaccccaaacctcgcctgccacctccccccgttccccctcctctgctgcattatcctcctcctgcaaaggtccccggtttagagccctgcccacccccccccttcccccctatggctcctccaactgctctgctacaggaagaacccctgttctccccacggttcccatttcctaccgttccacctgcccccggcgtctcccccctgccggcgccggccgccttcccgcccacgcctcagagcgtccccagccctgctcccactccattccccatcgaactgctccccctcgggtattctgaaccggcttttgggccatgttttagtatgccccggggaaagccccccgccccttcacctagaggccagaaggcgtctcctcctaccctggccccagccaccgcttcacctcctaccactgctggaagcaataatccatgtctgactcagctcctgactgcagccaagcctgagcaagcactcgaaccacccctggtcagctcaacccttttacgttctcctggatcaccccaggaaaccgtcccggagtttccatgcacctttctgcctccaacccctgctcctacaccacctcgccccccacctggacctgctaccctggctccctctcggccactgctggtaccgaaggccgagcgactgagtccacccgcacctagcggcagcgagcgcagattgtccggggatctctccagcatgccaggccccggtactctcagcgttcgcgtgtctcctccccaacccattctgtcaagaggccggccggatagtaacaagaccgaaaataggagaattacgcacatttccgccgaacagaagagacggttcaacatcaaacttggctttgataccctgcacggcctagtgagcacactttccgcacaacctagtctaaaagtttcaaaggccacaaccctccagaaaacagctgaatatatcttgatgctgcagcaagaaagggccggcctgcaagaggaggcacagcagctgagggacgaaatcgaggagctaaacgcagctatcaatttgtgccaacaacaactgccagctacaggcgtacctatcacacaccaacgcttcgatcagatgagagacatgttcgatgactacgtgagaacacgcacactgcacaattggaaattctgggtgttttcaatcctgattcggcccctgtttgagtccttcaacgggatggtgtccacagcgagtgtccataccctcagacaaacctccctggcctggcttgatcagtactgtagcctgcccgctctcaggcccaccgtgctcaattctctgcgtcagcttggcacaagtacctccattctgaccgaccctggccgcattcccgaacaagcaacgcgcgccgtcaccgaggggacacttgggaagccactgtag

SEQ ID NO: 124820 - DNA, 2496 bp, synthetic construct
  misc_feature 1..2496: note = Description of Artificial Sequence: Synthetic coding sequence
  source 1..2496: mol_type = other DNA
atggccggagctctggccggcttggctgccggcctgcaggtgcccagagttgcgccatctcctgacagtgattctgacacagattctgaagacccttcattaagacggagtgctgggggcctactgcgttcccaggtgatacattctggccatttcatggtgtctagtcctcactcagattccctccccaggcgacgagatcaagaggggtccgtaggaccctctgatttcggtccacggagcatagaccctacattaacacggctctttgagtgtttatcattggcttactctggtaagttagtgtccccaaagtggaagaattttaagggactcaaattgctttgccgggataagattaggctcaataacgctatctggcgcgcttggtacatacaatacgtgaaacggagaaaaagcccagtgtgcgggttcgtgacgcctttgcaggggcctgaagccgacgcccacagaaaacctgaggctgtggtgttagagggcaattattggaaacggcgaatagaggtggtgatgagggagtaccacaaatggcgcatctactacaaaaagcgtctccgaaagccctcccgggaagacgacctgctggcgccgaagcaggcagaagggaggtggccccctccagaacagtggtgtaagcagctcttcagctccgtcgtcccggtgctgctgggagatcctgaagaagagccaggaggcaggcagcttctcgatttgaattgtttcctgtcggatatatctgacaccctgttcaccatgacccaatcgggaccttcccctctgcagttacctcctgaggacgcctacgtgggcaacgctgatatgatccagccagacctgactcctctgcagcccagcctggatgacttcatggatatctccgacttttttaccaattctagactacctcagcctcccatgccctccaatttccccgagccccctagtttttcccctgttgttgactccctcttctccagcggcaccttgggtcccgaggtgccgcctgcctcttctgccatgactcatctctcaggacatagtaggctccaagcaaggaactcttgccctggtcctctcgatagtagcgcttttctgtcctccgattttttgttacctgaggacccgaaaccgcggctaccacctccgcccgtcccgccccccttgctacattaccccccgccagcgaaggtgcccggtcttgagccttgccctccccccccctttcctcctatggcccctcccacagcattacttcaagaagaacccctgttttcaccccgcttccctttccccactgtcccaccagcccctggagtttctccattgcctgccccagcagccttccctccaacaccccagagtgtgcccagtcctgcacccacgcctttccctatcgagctccttccgctgggctattctgagcccgccttcgggccttgtttctcaatgcccagagggaaacccccagcgccaagcccacgaggccagaaggcaagccccccgacacttgccccggccaccgccagtcccccaactaccgccggttccaacaacccatgtctgactcagctactcacagctgccaagccagagcaggccctcgaacctccgctggtgtcatcgactctgctacggtctcccgggtcccctcaggagacagtaccggaatttccttgtactttcctcccacccacccccgcacctacccccccccggcctcctcctgggcctgcaacacttgcaccttcacgtcctctgctggtcccaaaggctgaacggttaagtccacctgccccatcgggctccgagaggagactgtccggtgatttgtctagtatgccaggccccgggaccttgtctgtgagggtgtcgcccccgcagccaatcctgtcacgcggtcgccccgactcaaacaaaaatcgacggatcactcatattagcgccgaacagaagaggaggtttaacattaagctgggttttgataccctgcatggactggtgagtacccttagcgcccaacccagcctcaaagagcgcgctggacttcaggaagaggcacagcagctccgtgacgaaatcgaagagttgaacgctgccattaacctgtgccaacaacaactccccgcaacaggcgttcccattacccatcagcgctttgatcaaatgcgtgacatgtttgatgattacgtccgaaccaggaccctgcataattggaaattttgggtgttcagcattctaatccgccctctgttcgagtccttcaacggcatggtaagcacagcttccgttcacaccctgcgccagaccagtctggcctggcttgaccagtactgctctttgcctgcccttcgtccaaccgtattaaacagtctgcgccaattaggtacctctacgtccatactgaccgatcccggcaggataccagagcaggcaacaagggccgttactgaagggacgttgggaaagcctctttag

SEQ ID NO: 124821 - DNA, 2280 bp, synthetic construct
  misc_feature 1..2280: note = Description of Artificial Sequence: Synthetic coding sequence
  source 1..2280: mol_type = other DNA
atggcaggcgccctggctggcctggctgcagggcttcaggtgccgagggtcgccccttcgcctgacagcgactcagacacggacagcgaggacccgagcctgcgcaggagcgctggaggcctgctgcgctctcaggtgatccacagcggccactttatggtgagctccccacattccgatagcttgcccagaaggagggatcaagagggatcggtcggacctagtgactttggccccaggtccattgatcccactcttacgcggctgtttgagtgcttgtctctggcctatagcggaaagcttgtaagccccaaatggaaaaacttcaagggtctgaagctgttgtgccgcgataagatacgcctcaacaacgcgatttggcgagcttggtacatccaatatgtaaaaagacgcaagtccccagtgtgcggattcgtgaccccccttcagggccccgaggcagacgcccaccgcaaacctgaggccgtagtgctcgaggggaactattggaaaagacggatcgagttaccccccgaagacgcttacgtggggaacgcagacatgattcaacctgacttgacgccattacagccctcccttgatgattttatggatatttccgatttttttacaaattcaaggctacctcagcccccaatgccctctaatttcccagagcccccaagttttagccccgtggtcgacagcttgttcagcagcggaacattggggcccgaggtgccacccgcctccagcgccatgactcatctaagcgggcacagccgactacaggcccggaacagctgccccggccccctggacagttcggcgtttctcagttcagactttcttttgccagaggatccgaaacccagactacctccgcctccagtcccaccaccattgttgcattaccctcccccagcaaaagtccctggtctggaaccctgcccaccgcccccatttcccccaatggctcctcctactgcccttttacaggaagaaccacttttctccccccggttcccgtttccaactgttccaccagcaccgggggtttcccctctgccagctcctgctgcgttccccccaacccctcaatctgtcccctcccctgcaccaaccccttttcccatcgaactactgcccctaggttacagcgagcctgcattcggcccttgcttttctatgcccaggggtaagcctcccgcaccctctccccgagggcaaaaggccagtcccccgacactggcccctgcgactgcgtcacccccaaccactgccggcagcaataatccctgtcttacccagctactgacagctgctaagcctgagcaggcgctggaaccgccactggtgagttccaccctgctgcgaagccccggatccccccaggaaaccgtgccagagtttccctgcacctttctgcccccaactcccgcccccacccctcctagaccccccccaggccccgcgacactggctccctcaaggcccctcttggtgcctaaggcagaacgactgtctccacccgcaccatccggcagcgaacgtcgcttatcaggggacctatcttccatgccagggccaggtaccttatccgtccgggtgtctccccctcagcctatcctcagcagaggtcgccctgactcaaataagactgaaaatcgacggatcacccatatctcggcggaacagaaaaggaggttcaatataaaattgggatttgatacgctgcacggcctggtcagtacgctcagtgcacaaccttccctcaaggtctctaaagctactacccttcagaaaacggccgaatatattctgatgctccagcaggagagggcggggcttcaggaggaagctcagcaacttcgggatgagattgaggaactgaacgccgcaatcaatctctgtcagcagcaacttcctgcaactggggtgcccattacgcaccagagatttgatcagatgcgcgacatgttcgatgactatgtacgcacaaggactcttcataattggaaattttgggtgttttccattttaatcaggcctctgtttgaaagcttcaatgggatggtgagtacagctagtgtgcacacactacgacaaactagtctggcctggttagaccaatattgtagcctgcccgccttgcggccaaccgtgttgaattctctgcgccagctcggcacgtccacgagcattcttaccgaccccggacgtattccagagcaggctactagagcagtcactgaaggcacccttggcaagcccctttag

SEQ ID NO: 124822 - DNA, 2553 bp, synthetic construct
  misc_feature 1..2553: note = Description of Artificial Sequence: Synthetic coding sequence
  source 1..2553: mol_type = other DNA
atggctggcgccctggccggcctagccgctggcctgcaagtacctcgggtcgcacctagtcccgacagtgattcagacacggattctgaagacccttctttgcgccgttcggccggtggtctgctacgctctcaagtcatccactctggtcatttcatggtttcgtctccccattcagactccctcccgcgacggcgagaccaagagggctccgtcggacctagtgacttcgggccccggtccatcgatcctacgctgacgagactgttcgagtgcctcagcctcgcttattccgggaaacttgtctcaccgaagtggaaaaatttcaaaggcctcaagctgctttgtcgggataaaattcgactgaacaacgcaatttggagagcgtggtacattcaatatgtcaaacgacgcaaaagccccgtctgcgggtttgtgacacctctgcagggccccgaggcggacgcccaccggaagcctgaagccgtggtgctcgagggcaattattggaaacgtcggattgaagtggtgatgcgcgaatatcataaatggcgtatatactataaaaaaagactaaggaagcctagcagggaggacgatttgttggcccccaagcaggctgagggaaggtggccaccaccagaacagtggtgcaagcagctgttctctagtgtggtgcccgttctcctcggcgatcctgaagaagagcccggcgggcgccaactactggatctgaactgcttcctttccgatatcagtgacacactgttcacgatgactcagtctggaccttcccccctccagctgccacccgaagacgcctacgttggaaacgcagatatgatccaaccagacctgaccccgcttcagccaagtctggacgacttcatggacattagcgacttcttcaccaacagtaggctaccccagccaccaatgccatctaattttccagagccgcccagcttcagccccgtcgttgattccttatttagcagtggtactctgggtccggaagtccccccagcatcttccgctatgacacatttgtccggccactctcgattgcaagctcgaaacagctgtccaggtcccctggacagtagcgcgttcctcagtagcgattttctgttaccagaagatcctaagccccgcctgcctcctcccccagtgcccccgccactcctccattacccgccacccgcgaaggtcccgggactcgagccttgtccgcctcccccattcccaccaatggcccctccgactgcccttcttcaggaggagccactgttctcaccgcgattccctttccccacagtgcctcctgccccaggagtgagtcctctgcccgcgcctgcagccttcccccccactccgcaatcagttcccagcccagccccaacgccgttccctatagagcttctgccgctgggatactccgagcccgcttttggcccatgcttctccatgcctagggggaaaccccccgcaccaagtcccagggggcaaaaggctagtccaccaacattggcccctgcaacagcctccccccccactactgcgggatcgaataacccctgcctaacccagctgctgactgctgccaagcccgagcaggctctggagcctcccctcgtctcatctacgctccttcgttccccgggctcacctcaggaaactgtgcctgaatttccttgcacctttctgccgcctacccccgcacctacacccccccgtcccccaccgggcccagcaacgctggcgccatctcggcctctactcgtgccaaaagcagaacgcttatcaccccctgccccaagcggctcagagagacggctgagtggagatttgagctccatgcccgggcctggaacattatcggttcgggtcagccctccacagcctatcttgtctcggggcaggccggatagcaacaaaaaccggcgcataacccatatctctgcagaacagaaacgcaggttcaatatcaagctaggttttgataccctgcatggcctggtgagcacactctccgcacagccgtctctcaaagtgtcgaaagctacaactcttcagaaaactgctgagtatatcctaatgctacagcaggagcgggccggactccaggaggaggcacagcagctgcgggatgaaattgaagagctgaacgccgccatcaacctgtgtcagcagcaattaccagccaccggggtccctatcacccatcagcgctttgaccagatgagggacatgtttgacgattatgtgaggactcggacactgcataactggaaattctgggtattctccatcttaatccggcccttgtttgagtcctttaacggcatggtgtcaactgcctccgtgcataccctccggcaaactagcttggcttggcttgatcaatattgttcactgcccgccttgcggcctactgtactcaacagccttagacagctggggacatcaaccagcatcctcacggaccccggccggattccagaacaggccacaagagcagtgactgagggcacgctggggaagccgttgtag

SEQ ID NO: 124823 - DNA, 2502 bp, synthetic construct
  misc_feature 1..2502: note = Description of Artificial Sequence: Synthetic coding sequence
  source 1..2502: mol_type = other DNA
atggccggcgctcttgctggcctggccgctggtttacaggtccctagagtggccccaagccctgacagcgacagcgacacagacagcgaagatccaagcttacggaggtcagctggaggcctgctgaggtctcaggttattcattctggacacttcatggtgtcttccccccacagcgacagcctgccccgccgacgcgaccaagaggggtctgtgggaccctcagacttcggacctaggtccatcgatcctacattgaccaggctgttcgaatgtctgagcttggcgtactcaggcaaattggtgagccctaaatggaaaaattttaagggcctgaagctcctctgtcgggataaaatccgacttaacaatgcgatttggagggcgtggtacattcagtacgtgaagcgtcggaagtcacccgtttgtgggtttgttacccctttgcagggccccgaggcagacgcgcaccgcaagccggaggccgtggtcttagaggggaactactggaagcgcagaatcgaagtcgtgatgagagaatatcacaaatggagaatttattacaagaagagactgaggaagccgtcacgggaagacgacttacttgctcctaagcaggccgaggggaggtggccaccgcccgaacaatggtgtaagcagctcttttcctctgtggtccctgttctcttgggcgatcccgaagaggagcccgggggacggcaactgctggacctgaattgcttcctgtccgacattagcgacacactgtttaccatgacccaatccgggccttcacctttacagctaccaccagaagacgcgtacgtcggtaatgctgatatgattcagccggacctcacccctctgcagcctagcctggatgattttatggatatatccgacttcttcactaattcccgactgccacagcccccaatgccctccaactttccagagcctccatcgtttagtcccgtcgtcgactccttgttctcttccggcactttaggacctgaagtaccgcccgcatcctccgccatgacacacttaagtggccacagtaggctgcaggcgagaaattcctgcccgggaccgctggatagttctgcattcttatcgtccgacttcctactgcccgaagatcccaaaccacggctgcctcctcctcctgttcctcctcctctgttgcattacccccccccggctaaagtgccgggcctggaaccttgccccccacccccctttcctcccatggcaccccccacagcactgctgcaggaagagcctctgtttagtccgcgatttcccttccccactgtacctccagcacccggagtcagccctcttcccgcgcccgccgctttccccccgacacctcagagcgttccaagtccagcccctactcccttccccatcgagctattacctcttggatactcagaacccgcctttggtccctgcttctcaatgccgcgaggaaagccgccagccccttcccccagaggacagaaagcgtctcctcccactttagcccccgctacggccagtccccctaccactgccgggtctaataatccctgtctgacccagctgctcactgctgctaaaccagagcaggccctcgaacctcccctggtgtccagtactctgctgcggagccccgggagccctcaggaaaccgtgcccgagtttccatgcacattcctaccaccaactccagcaccaacacccccacggcctcctccaggacccgctacattggcaccgtctcgcccactcttggttcccaaagccgaacgactcagccccccagccccgagcgggtctgagaggcggctgtcaggggatctgtcaagcatgccgggacccgggaccctctcggtgagagtctctccccctcaacccattctgagtcggggccggcctgactccaacaagacagaaaatcgaagaatcacacacataagcgctgaacagaaacggagatttaatattaagctgggattcgataccttacacggcctggtttctactctttctgcccagccaagcctgaaggagcgggccgggcttcaggaggaggcccagcagcttagggacgagattgaggaattaaatgccgccattaatttgtgtcaacaacagctccctgcaaccggggtgcctatcacacatcagcgattcgatcaaatgcgtgatatgtttgatgattacgtcagaaccagaaccctgcacaactggaagttttgggtgtttagcatccttatcagacctctgttcgaaagcttcaatggtatggtgtccacagcctccgttcataccctgcggcagacaagtctggcgtggctggaccagtactgtagtttgcctgctctgcgacctactgttctcaacagtctgcgccagctaggaactagcacgagcattttgaccgatcccggccgcattccggagcaggcaaccagagctgttaccgagggcacattggggaagccgctctag

SEQ ID NO: 124824 - DNA, 1059 bp, synthetic construct
  misc_feature 1..1059: note = Description of Artificial Sequence: Synthetic coding sequence
  source 1..1059: mol_type = other DNA
atgaacacgattgtgttcaacaaactctcaggcgcagtactgttcgaggacggaggggccagcgaacgggagaggggagggcggccttatagcggcgtactcgacagtcctcatgcgaggccggaggtggggattccggatggcccacccctgaaagacaacttgggacttaggcacagacggactggagcccgacagaacgggggaaaggtcaggcacaaaagacaggcacttcaagacatggcacgcccactcaagcaatggctttacaaacatcgggataacccgtatccaaccaagacagagaaaattctactggccctggggagtcaaatgactcttgtgcaggtttctaactggtttgcaaatgcgcgccgcaggctgaagaacaccgtccggcagcccgacctttcttgggcactccggattaaactttacaacaagtacgtacaggggaatgccgaacggctttcagtatcatcagatgacagctgtagcgaagacggggaaaaccccccacgaactcacatgaacgaaggcggatataacactcctgtccaccatccagtgatcaagagcgaaaactccgtgattaaagccggggtgagaccagagtcccgggcttccgaggattacgtcgcccctccaaaatacaaaagctcactgctgaataggtatcttaatgatagcctgagacatgttatggccacgaataccacaatgatgggcaaaactcggcaaagaaaccactccggatctttcagctcaaacgagttcgaagaggaactggtcagtccctcttccagcgagactgaaggaaacttcgtctaccgaacagacacccttgaaaacggatctaacaaaggagagagtgccgccaaccggaagggaccatcaaaagacgatacctattggaaggagattaacgccgcaatggccctcactaacctcgctcaggggaaggacaagttgcagggcaccacatcttgcataatccagaagtcctctcatattgcagaagttaaaaccgtgaaggtgccactcgtccagcagttctag

SEQ ID NO: 124825 - DNA, 1059 bp, synthetic construct
  misc_feature 1..1059: note = Description of Artificial Sequence: Synthetic coding sequence
  source 1..1059: mol_type = other DNA
atgaacactattgtttttaacaagctatccggggctgtattgttcgaggacggcggagctagcgaacgtgagcgcggcggcagaccatatagcggcgtgctggactctccccacgcccgccctgaggtcggcatccctgatgggccccctctcaaagacaatctgggattgagacaccgacggaccggggcccggcagaacgggggaaaagtgagacataagcggcaagctctgcaggacatggctcgtcccttgaagcagtggctgtacaaacatcgggacaacccgtatcccactaagaccgagaagattttgttggcactaggctctcaaatgacactagtacaggtatcaaactggtttgccaatgcccgtcgcagactcaagaacacagtcagacagcctgacctgagctgggcactccggataaaattatataataaatacgtccaggggaacgctgagagactatccgtaagttcggacgactcttgttctgaagatggcgaaaatcccccccggacacatatgaatgaagggggatataatacgccagtacaccatcccgttatcaagtcagaaaattcagtgatcaaggccggagtgagaccggaaagtagagcttcagaggattatgtggcccccccaaagtataagtcctccctgctcaatagatacctgaacgactcacttaggcatgtaatggcaaccaatacaaccatgatggggaagacacggcaacggaaccattccggcagcttctcaagtaatgagttcgaagaggagctggtttcccccagcagtagcgagacagagggcaactttgtttaccgcactgacaccctcgagaatggaagcaataagggtgaatccgccgcgaatagaaagggacctagtaaagatgacacctattggaaagagattaacgctgccatggccctgactaacttggcccaggggaaggataaactgcaagggaccacctcctgcatcattcagaaatcctcgcatatcgcagaggtgaagacagtgaaagtcccactggtccagcagttctag

SEQ ID NO: 124826 - DNA, 177 bp, synthetic construct
  misc_feature 1..177: note = Description of Artificial Sequence: Synthetic coding sequence
  source 1..177: mol_type = other DNA
atgaataccatcgtgttcaacaaactttcaggcgccgtgctctttgaagacgggggcgccagtgagcgggaacgaggcgggcgtccatattccggcgttttagattcaccccatgcacgacctgaggtcgggatccctgatggtccacccctgaaggacaaccttggacttaggtag

SEQ ID NO: 124827 - DNA, 288 bp, synthetic construct
  misc_feature 1..288: note = Description of Artificial Sequence: Synthetic coding sequence
  source 1..288: mol_type = other DNA
atgaactttgacttcccttttaagaagggctccggcattccactcctcaccaccaatctttcgccccagtgtctatctttgctgcacgccatggtggcttacgatcctgacgagaggatcgccgcccatcaggctctgcagcatccctattttcaggaacagcgaactcaaaatggatctgaggatgaggcttccgccgtacttctgcctatccagaccagatcaagtttgaatcctttgctaagcacatgcatgctgcccggtaggagcgtgaccctgctggtctag

SEQ ID NO: 124828 - DNA, 1260 bp, synthetic construct
  misc_feature 1..1260: note = Description of Artificial Sequence: Synthetic coding sequence
  source 1..1260: mol_type = other DNA
atgaagaattacaaagcaatcggtaaaattggagaaggcacgtttagcgaggtgatgaagatgcaaagcctcagagatggaaattactacgcatgcaagcagatgaagcagcgattcgagtctattgaacaagtcaataacctcagggagattcaggccttgaggagactaaatccacacccgaatatcctcatgctccatgaggttgtcttcgatagaaagtctggatccttggcactcatttgcgagcttatggatatgaatatatacgaactgattcggggacgcaggtatcccttgtcggaaaagaagataatgcattatatgtatcagctctgtaagagcctggatcatatccaccggaatggaatcttccatcgcgacgtcaaacccgagaacatcttgataaaacaggacgtcttgaaactaggtgatttcggatcttgcaggtctgtctactctaaacagccctacacagagtatatcagtaccagatggtaccgagcccccgagtgtttacttaccgacgggttctacacctacaagatggatttgtggtctgccggatgcgtgttttatgagattgccagcctccagcccctctttcctggggtcaacgagcttgatcagattagcaaaattcacgacgtgatcggaaccccagcacagaaaatcctgactaagtttaagcagtctcgggccatgaatttcgattttccttttaaaaagggctctggcattcctctccttaccacaaacctatccccccagtgtctctctcttctgcacgcaatggtcgcatacgatccagacgagcgcatagcagctcaccaagctctccaacacccctactttcaggagcagagaaagacagaaaagcgcgccttaggatcacatagaaaagccggcttccctgaacaccccgtggccccagaaccgctgagtaattcctgtcagatttcaaaggaggggagaaagcagaagcagagcctgaagcaggaggaggatagacctaaacggcgcggacccgcctacgtcatggaactgcccaagttgaaactgtctggcgtggtgagacttagctcctactcctccccaacgttgcagagtgtcttgggatctggcactaatggtcgagtgccggttctgagacctctgaagtgtatccctgcttcaaagaagactgacccgcaaaaagatctgaagcctgcgcctcagcagtgtaggctgcctaccatcgtaagaaaagggggccgctag

SEQ ID NO: 124829 - DNA, 2667 bp, synthetic construct
  misc_feature 1..2667: note = Description of Artificial Sequence: Synthetic coding sequence
  source 1..2667: mol_type = other DNA
atggccggcgccgctgccgagtctgggcgggagctgtggacattcgctggatcccgcgacccatctgcacccagattggcctatgggtatgggcctgggtctctgcgggagttgcgagcccgtgagttctccagattggctgggacagtgtacctggaccacgcaggagctaccctattcagtcagagccagctggaaagctttacctccgatctgatggaaaatacatatgggaacccccattcacaaaatattagcagtaagctgacccacgatactgtggaacaggttcgttataggattctcgcccactttcacacgacggctgaagactacaccgtgatttttactgctggctccacagctgctctgaagctggtcgccgaggcttttccatgggtgagccaagggcctgaatcctcaggcagtcggttttgttatttgacagattctcacacgagcgtggtgggcatgagaaatgtgactatggctattaatgtgatttcgactccagtgaggcctgaagacctgtggtccgcagaagaacgctcagcctccgcatccaatcctgattgccagctgcctcatctgttctgttatcctgcccagagcaactttagcggcgtgaggtatcctctgtcttggatcgaagaagtaaagagcggccgactacaccctgtctcaacccccggaaaatggtttgttttgctcgatgccgctagctacgtctcaacatccccactagatttgtccgcccatcaggccgacttcgttccaatttctttctacaaaatcttcggatttccaacaggcttaggagccctactcgtgcataaccgcgccgctccgctcttaaggaagacctattttggaggcgggactgcctcagcctacctcgccggggaagatttttatataccgcgccagagtgtggctcagaggttcgaggacgggacaatttcttttctggacgtgatcgccctgaagcacggattcgatactcttgaacgcctcacaggggggatggagaatattaagcagcacaccttcactttagcgcaatacacatacgtcgccttgtctagccttcagtatcccaatggggctccagtagtccgcatatactctgactcggagttttcatctcccgaagttcaaggaccaatcatcaattttaatgttctcgacgacaaaggcaacattatcggatatagccaagtagacaagatggcctctctctacaacatccacctcagaaccgggtgcttttgcaatacgggggcatgccaaaggcacctgggtatctcaaatgagatggtgcggaagcactttcaggccggccacgtctgtggggacaacatggatttgatcgatgggcagcccactggaagtgtgcggatttcattcgggtatatgagtaccctggacgatgtgcaagcgttcctccgctttatcatcgacactaggctccatagtagcggagattggcccgtgccccaagcgcacgctgacactggagagactggagcaccttctgccgattctcaggccgacgtgatccccgctgtgatgggtaggagaagtttgtcccctcaagaggatgctctcacggggtcgagagtctggaataacagcagcacggtgaacgctgtgcctgtggcgcctcccgtgtgcgatgtggctaggacacagcctacaccatctgaaaaggccgcgggcgtactggagggggccctgggacctcacgtcgttaccaatctctacctgtaccccatcaagtcatgtgccgctttcgaagttaccagatggcccgtcgggaatcagggtttgttgtacgaccgcagctggatggttgtgaaccacaatggagtgtgcctgtctcagaaacaggagcctcgtctatgtttgattcagccttttattgatctaaggcagagaattatggtcataaaggccaagggaatggagccaatcgaggtccctctggaggagaattccgagagaacacaaattcgtcaatcaagggtgtgcgccgaccgcgtttccacttacgattgcggagaaaagatcagctcttggctgagtacattcttcggtcgcccctgtcatttgatcaaacagtctagtaacagccaaaggaacgccaaaaagaagcacgggaaagaccagctcccaggcacaatggccacattatccttagttaacgaggcccaatacctgttgattaacacatcatccatcctggagttacataggcagctgaacacatctgacgaaaatgggaaagaagaactgtttagtttaaaagatctcagcctgagattcagagctaatatcattatcaacggaaagcgggcgtttgaggaggagaagtgggatgagatctcaataggcagcctgaggtttcaggtcctgggcccgtgccatcggtgccagatgatatgcattgaccagcagacgggtcagagaaaccagcatgtcttccaaaaattgagcgagtcaagggaaacaaaggtcaactttggaatgtaccttatgcacgcaagtctggatctgagctcaccctgctttcttagcgtgggcagccaagtactgcccgtgctgaaggagaatgtggaggggcacgacttgcccgccagtgagaagcaccaggacgtgacctcatag

SEQ ID NO: 124830 - DNA, 1863 bp, synthetic construct
  misc_feature 1..1863: note = Description of Artificial Sequence: Synthetic coding sequence
  source 1..1863: mol_type = other DNA
atggcagctcgcccgctctcccggatgcttcgacgactgctgcgcagctctgccaggtcctgtagctcaggagccccagttacacagccttgccctggagagtccgcaagagccgcgagcgaagaagtctcacgaaggagacagtttttgagggagcatgcagcgccatttagtgctttcctcacggacagcttcggaaggcagcacagctacctgagaatatccctgacggagaaatgtaacctgaggtgccagtattgcatgcccgaggagggggtccctctcacacccaaagcgaatctcctaacaacggaagagatactcacgcttgctcgcttatttgttaaggagggtatcgacaagatccgcctgacagggggagagcctttaatccgacctgatgtcgtcgacatagtagcccagctgcaacgcttggagggcctcagaacaataggcgtgactaccaacggcataaatctggcacggctcctgcctcagctgcagaaagccgggttatcagctatcaacatctcgctggacactctcgtgcccgccaaatttgagttcatagtaaggcggaagggctttcataaagtcatggagggtatacataaagccatcgagctcggctacaatccggtgaaagtcaattgtgtggttatgcgcggactgaacgaagatgaacttctggacttcgccgcactgaccgaagggttgccactcgatgtgcggtttatcgaatacatgcccttcgacgggaacaaatggaacttcaaaaaaatggtgagttacaaagagatgctggacacggtacgtcaacagtggcctgagctagaaaaagtccctgaagaggaatcgtctaccgccaaggcatttaaaattcctggctttcagggccagatatcattcataacctctatgtcagaacatttttgcggtacatgtaatcgcctgcgcattacagcagacggcaaccttaaggtctgcctctttggcaatagcgaagttagcctgagggaccacctccgggcaggagcatcagaacaggaacttctaagaatcatcggagcagccgtcgggcggaagaagaggcagcatgccgagctttttctgatgttcccaaatagtccaccggccaacccctcaatcttctcctgggatcctcttcacgttcagggcctgcgccctcgcatgtctttcagcagccaggtcgcaaccctgtggaaaggatgcagagtccctcaaacacctcctcttgcgcagcaaagactcgggtcgggaagctttcagaggcactacaccagcagagctgattctgatgccaattcaaagtgcttgtcaccaggctcatgggcatccgccgctcccagcggcccccaattgacatctgaacaactcacacacgtagattctgagggacgagcggctatggtggacgtgggccggaagccggacacagagagagtggcagtcgcatcagccgtcgtgctgctcggtccggtagcatttaaacttgtccagcagaatcagctgaaaaaaggcgacgcactggtcgtcgcccaactggcaggggtgcaagctgctaaggttacctcacagctcattcctttgtgtcatcacgtcgccctgtcgcatattcaggtgcagctcgagctggatagcacccgtcacgcggtgaagatccaggcatcatgcagagctcggggtcctaccggggtggagatggaggcactcacttcagccgccgttgccgccctgacactgtatgatatgtgcaaggccgtttctagagacatcgtgctagaggaaatcaagctgatctcaaaaaccggaggacagagaggagactttcacagggcctag

SEQ ID NO: 124831 - DNA, 1911 bp, synthetic construct
  misc_feature 1..1911: note = Description of Artificial Sequence: Synthetic coding sequence
  source 1..1911: mol_type = other DNA
atggctgcgagacctcttagcagaatgctgcgtcggctgcttagatcttctgcacgcagctgcagcagcggggcccctgttacacagccatgcccgggagaatcagctagggcagcttccgaggaggtgtcacggcgccgacaattcttgcgcgaacatgcggccccattctctgcctttttgacagattccttcggtaggcagcacagctatttgagaatctctctcacggaaaaatgcaatttgcggtgtcagtattgcatgccagaggagggtgtccccctaacccccaaggccaacctcctgactactgaggaaattctcactctggcgagactctttgtgaaagagggtatcgacaagatacgtctgaccggcggcgagccccttatacgccccgatgtcgtggacatagtcgctcaactacagcggctggaagggctccgtacgataggggtgaccactaacggaatcaacctggctcggcttctgccacagctccagaaagccggattgagcgcaatcaatatctccctcgatacacttgtgcctgctaagtttgagttcattgtgcgccgaaaaggattccacaaagttatggaaggcatacataaggcaattgagctcggctataatccagttaaggttaattgcgtggtcatgaggggattgaatgaggatgaattgcttgatttcgcagctctaactgaagggctgccattagacgtgagatttatcgagtatatgccattcgacggtaacaaatggaacttcaagaaaatggtgagttataaggagatgttagacactgtgaggcaacagtggccagaattggaaaaagtccccgaagaggaatccagcaccgccaaagctttcaagatccccggcttccaggggcagatctccttcatcacctcaatgtccgaacatttttgcggaacttgcaatcgcctaagaatcacagccgacggcaacctcaaagtgtgcctgttcggcaattcagaagtcagcctgagagaccacctgcgcgcaggcgcatccgagcaggaactgctgcggattatcggggccgccgtggggcgcaagaagcggcaacacgctggcatgttttctatctcccagatgaaaaatcggccaatgatcttgattgaacttttcttgatgttcccaaattctccacccgcgaatccatctatcttctcgtgggatccattacacgtgcagggcctgcgaccccgcatgtccttcagcagtcaggtggctaccctgtggaagggctgccgggttccccaaacccccccactcgcacagcagcggttgggaagtggtagttttcaaaggcattacacttctcgggccgatagcgacgccaactccaaatgtctgtctccaggctcctgggccagcgccgctccctctggacctcaattaacctcagagcaattaactcatgtggactctgaaggaagggccgcaatggtagacgttggacgcaagccagatacagaacgggtggccgttgccagtgccgttgtgttgcttggccctgtggcctttaagctcgtgcagcagaatcaactgaaaaagggcgacgctctggtggtcgctcagctggccggggtgcaggctgccaaagttacaagtcagttgatccctttgtgccatcacgtggcactgtcccacatccaggttcaactcgaacttgactccacacggcatgcagtgaagatccaggcatcctgtcgggcccgcggacctacaggggtggagatggaagccttgacctccgccgccgtagccgccttgaccctgtatgatatgtgtaaagctgtgagccgggatatcgttctggaggagattaaactcattagcaagacaggaggccagaggggagatttccaccgggcatag

SEQ ID NO: 124832 - DNA, 456 bp, synthetic construct
  misc_feature 1..456: note = Description of Artificial Sequence: Synthetic coding sequence
  source 1..456: mol_type = other DNA
atgccctttgatgggaacaagtggaactttaagaaaatggtcagctacaaagagatgctcgatacagtgagacagcagtggcccgagctcgaaaaagtcccggaagaagagagcagtactgccaaggctttcaagattcccgggtttcagggacagatttcatttattacctctattttgacagttgcgagatcctgctggccacttttcctctggcctccgtctagcgagacaggctgcgctcacatgggtcactcacccaaggattcctgccaaaccactcagccaactccaggcccagtgcacggctgttccactcatccttctcttttctggagcatcagcgggaaagagaaacttatgattgactgcctgcacccacatagtgcccagattaagctgagatgccagctgtgtaggtgtaaaaacgaggacacagtctgggtgggtcattag

SEQ ID NO: 124833 - DNA, 1071 bp, synthetic construct
  misc_feature 1..1071: note = Description of Artificial Sequence: Synthetic coding sequence
  source 1..1071: mol_type = other DNA
atgtggaaatcttggaagcttcgaacagatgtgcgcgaggtttcccgacgcagacaattcttacgcgagcacgcggctccattctccgcctttctgaccgactcatttggccgccagcacagctacctacggatttccctaacagaaaaatgtaacctgcggtgccaatactgcatgcctgaagagggtgtgccattaaccccaaaagccaatctgttaacaaccgaagagattttgactttagcccgtctgtttgtgaaagagggcatcgataagatccgcctcacgggcggggaaccattgattagacccgatgttgttgacatcgttgcccagctgcagcggctggaaggtcttcgtacgatcggggtcactactaatggcataaacctggccaggttgctgccacaactgcagaaagctgggctttccgcgataaacatctctctcgataccctcgtgcccgcaaaattcgaattcatcgtcagaagaaaaggtttccacaaggtgatggagggtatccataaggctattgagttaggatacaaccccgtgaaggtgaactgtgtggtcatgcggggtctgaatgaagatgaactgctggatttcgccgctctgaccgaagggctaccattggacgtccgcttcatcgaatacatgccttttgatggcaacaaatggaacttcaaaaagatggtaagctacaaggagatgttagatacagttcgccagcagtggccagaattggaaaaggtcccagaggaagagagtagcacagcaaaagcattcaagattcctggatttcagggccaaatctccttcatcacttcaatgtctgagcatttctgcgggacatgtaaccggctgaggataaccgctgatggaaacctcaaagtttgtcttttcggaaactcagaggtcagcctccgagaccatttgcgcgccggcgccagtgagcaggaactgttacggattattggagccgctgtcggtcgcaagaaaaggcagcacgcgggtatgttcagcatttcccagatgaaaaaccggcctatgatcttaattggggggtag

SEQ ID NO: 124834 - DNA, 1158 bp, synthetic construct
  misc_feature 1..1158: note = Description of Artificial Sequence: Synthetic coding sequence
  source 1..1158: mol_type = other DNA
atgtggaagtcgtggaaactgcgtacagacgtgcgggtaagggaaggtgctgggggctctccatgtgcatcatcacagcccggatcccgaggaccgtgctttctgccaggactctcatcccaagaagtgtctaggaggagacagttcttgagggaacacgcagctccattctccgccttcctcaccgactcctttggacgccagcacagctaccttagaatctctctcacggagaaatgtaatcttcgatgtcaatactgtatgccagaggagggagtgcctctgacccccaaggccaatctcctgaccacagaagagatcctcaccctggctagacttttcgtaaaggagggaatcgacaagatcagactcacgggcggcgagcccttgatccgaccagatgtggtggacattgtggcccagttgcagcgactcgagggtttgagaaccatcggcgttacaactaacggaattaacctggcacgcctgctacctcaactgcagaaggccggactttcggccatcaatatcagcttagatacgctcgtgccggctaaatttgagttcattgtccgccggaagggatttcataaggtgatggaggggatacataaggctatcgagttgggctataacccagtcaaggtcaactgtgtggtcatgagaggtctgaacgaggatgagctcctggatttcgcagccctgacagaggggttacccctcgatgtgcgatttattgaatatatgcctttcgatggaaacaagtggaattttaaaaagatggtttcctacaaagaaatgctggacaccgttcggcagcagtggccggaactagagaaagtccccgaggaggaatcatctaccgccaaggctttcaagattcccggttttcagggacagatcagctttatcacctcaatgagcgagcacttctgcgggacatgtaaccgcctgaggatcacagccgatggcaacctcaaagtctgcctgttcggcaacagtgaggtgtctcttcgtgaccatctcagagcgggtgctagcgagcaggagctcctgaggatcatcggcgccgccgtggggcgaaagaaaaggcaacacgccgggatgttctcaattagtcagatgaagaaccgccctatgatacttatcggaggctag

SEQ ID NO: 124835 - DNA, 1158 bp, synthetic construct
  misc_feature 1..1158: note = Description of Artificial Sequence: Synthetic coding sequence
  source 1..1158: mol_type = other DNA
atggcggcccgccccctctcccgaatgctgcggagacttctccgcagttcagcccgctcttgttccagcggcgcgcctgtgacacagccatgtcctggcgagagcgccagagccgcgagtgaagaagtatctcggcggcgacagtttctgcgcgaacatgctgcacccttttcagcattcctaacagactcgttcggaagacagcattcttacttgaggatatccttaacagaaaagtgcaacctgcggtgtcagtattgtatgcccgaagagggcgtaccactgacacctaaggcaaacttgctgactaccgaagagatcctcacactggctagactctttgtgaaggaggggatcgacaagatccgcctgacgggaggggaacctctgattaggcctgatgtggtggatattgttgcccagctgcaaagactcgaaggtctaaggacgatcggcgtaaccacaaatggcattaacctggctcgtttgcttccccagctccaaaaggctggcttgtccgccatcaacatttccctagatacgctggtacccgcaaaattcgagttcatcgtgcgaaggaaaggcttccataaggtcatggaggggatccataaagccatagaactcggctacaatcccgtgaaagttaattgcgtagttatgcgtgggttgaacgaagacgagctgctagattttgccgctctgaccgagggcctgccgctggacgtgcggttcattgagtacatgccctttgatggcaataagtggaacttcaagaaaatggtcagttacaaggagatgctggacacagtaaggcaacagtggccagaactcgagaaggtgcccgaggaagagagcagcactgccaaagctttcaagattccaggctttcagggtcagatttccttcatcacttccatgagcgagcatttctgcggcacctgcaataggctccgcattacagccgatggtaatctgaaagtgtgtctctttggaaacagcgaggtgagcctccgggatcatttacgcgcaggagcatcagaacaagaattgttgagaatcatcggcgcagccgtgggtcgcaaaaagaggcagcacgcagggatgttctcaattagccagatgaagaataggcccatgatattgatcggtggatag

SEQ ID NO: 124836 - DNA, 1602 bp, synthetic construct
  misc_feature 1..1602: note = Description of Artificial Sequence: Synthetic coding sequence
  source 1..1602: mol_type = other DNA
atgcccgaggagggcgtccctctcacaccaaaggctaatttgctgaccacggaggaaattctgaccttggctcgcctatttgtgaaggaaggcatcgataaaattcgcctgaccggtggagagcccctgataagaccggacgttgtggacatcgttgcccagctgcaaagactcgagggcctgaggacaataggggtgacgactaacggcattaatcttgctcgcttgcttccccagctacaaaaggctggcctatccgccataaatatctctctcgataccctggtgcccgcaaaattcgagttcattgtgcggcggaaggggtttcacaaagtgatggagggtattcacaaagccattgagctgggatataaccccgtgaaggtcaattgcgttgtcatgcggggcctaaatgaggacgagctgctcgactttgctgcactcactgaggggctgcctttggatgtgagattcatcgaatacatgcctttcgacgggaacaagtggaatttcaagaaaatggtgagctacaaagaaatgctagacacagtgcgtcagcagtggcctgaattggaaaaggtgccggaggaggaatcatcaaccgctaaggcgtttaaaataccgggattccagggacagatttccttcataacttccatgagcgaacatttttgtgggacttgtaatcggcttcggattaccgccgacggtaatctcaaagtatgtctcttcggaaattccgaggtctctttgagagaccaccttagggcaggtgcctcagaacaggaacttctgagaatcattggcgccgctgtgggccggaaaaagaggcagcacgctgagttgttcctcatgtttccgaactctccacctgcaaacccctccatattcagctgggacccactccatgtgcaaggcctgcggcctcgcatgagtttcagctcacaggtagctaccctttggaaaggatgccgcgtgccacagacccccccgctggcccagcagaggctcggttccggcagcttccagaggcattacacaagtagagccgattcagacgctaattccaagtgtctgagtccgggaagctgggctagtgcagctccatccggaccccagttgactagcgaacagctgacccacgtagactctgaggggagagccgccatggtggacgtgggccgcaaaccagacactgagagggttgccgtggcctccgccgtagtcctgctggggccagttgcattcaagcttgttcagcaaaaccagctgaagaaaggtgatgcactagtggtggctcaactggccggggtgcaggcggctaaggtcacctcccagctgatacccctctgtcatcacgtggccctgtctcacatccaggtgcaacttgagctggattctactagacatgcagtcaagatccaggcatcctgccgcgctcgggggcccacaggggtggaaatggaggcgcttactagtgcagctgttgctgcattaacactgtacgatatgtgtaaagcagtgtcgcgcgacatcgtgctcgaagagataaaactgatcagcaagactggcgggcaacgcggggatttccaccgcgcatag

SEQ ID NO: 124837 - DNA, 1911 bp, synthetic construct
  misc_feature 1..1911: note = Description of Artificial Sequence: Synthetic coding sequence
  source 1..1911: mol_type = other DNA
atgtggaagagctggaaactgaggaccgacgttcgagtccgagagggagcgggtgggtctccatgcgcttcaagtcagcccggctcacgcggaccatgctttctgcccggacttagtagccaggaagtgtcacgacggaggcaatttcttcgcgaacacgccgcgccttttagcgcttttctcactgacagcttcggccggcagcatagctacctgcggatcagcctcaccgagaagtgcaacctgcgttgccaatattgcatgccagaggaaggggttcccctgaccccaaaggccaatctgctgaccactgaggaaatcttaaccctggctagattatttgttaaggagggtatcgacaagatacgattaacagggggagaacccttaattcgaccagatgtcgtcgacatcgtggctcagctgcagcgcttagaggggctacggactatcggggtcacaacaaacggtattaacctagccagactcctgccccagcttcagaaagcagggctttctgcaattaacatctcattggatactctggttcctgcaaaattcgagttcattgtgcgacggaaaggcttccataaagttatggaaggcatccataaggctatcgagctcgggtacaatccagtaaaagtgaactgtgttgtaatgcggggcctgaacgaggatgaactgttagatttcgctgcattaacggaggggctgccacttgatgtgcgcttcatcgaatacatgccctttgatggcaacaaatggaacttcaagaagatggtcagctataaagagatgttggatactgtccggcagcagtggcctgaactggagaaagtgcctgaagaagagtccagtactgccaaagcctttaagattccagggttccaaggccagattagcttcataacatcaatgagtgagcacttctgtgggacctgcaatcggctaagaatcaccgcagatgggaacttgaaggtgtgcctttttggcaattcagaagtgtctctcagagaccatcttcgcgccggggcctctgaacaggaactgctgcggatcatcggcgcggccgtaggcaggaagaagcgccagcacgccggcatgttctccattagtcaaatgaaaaaccgccctatgatcttgattgagttattcctcatgtttcctaactcaccaccagcgaatcccagtatatttagctgggatcctcttcatgtccagggcttgcgccctcgcatgtcattttcttcccaggtggcaactttgtggaaggggtgtcgggtcccccaaaccccaccactggctcagcagagactgggaagcggaagtttccagcgtcactacacaagtagagcggactcagacgccaactcgaagtgcctgtcacccggctcgtgggcctctgccgccccctccggcccccaactcacgtccgagcaactgacgcacgtagattcggagggaagagctgcaatggttgatgtggggcggaagccagatactgaaagagttgctgttgcaagcgctgtggtactgttaggtccagtggccttcaagctcgtccagcagaaccagctcaagaaaggggacgcccttgtggttgcacagctcgccggagtacaggctgctaaggtgacatctcagcttatcccattgtgtcatcatgtcgcactgtcacatatccaggtgcaattagagttggacagcactcggcacgctgtgaagattcaggccagttgtagggctaggggccccacaggcgtggaaatggaagccctgacaagcgcagccgtcgctgctctgaccctgtatgacatgtgcaaggcagtcagcagggacattgtgttggaggagatcaagcttatttcaaaaaccggcggacagaggggcgacttccatagggcctag

SEQ ID NO: 124838 - DNA, 1071 bp, synthetic construct
  misc_feature 1..1071: note = Description of Artificial Sequence: Synthetic coding sequence
  source 1..1071: mol_type = other DNA
atgtggaaaagttggaaacttagaaccgacgtgagggaggtgtcccggaggcggcagttcctgcgggaacacgccgctcccttttccgcttttctgaccgattcttttgggcgtcagcattcctacttacggatttcactgaccgagaaatgcaatctcaggtgccaatattgcatgcctgaggaaggtgtgcccctcactcctaaggctaacctgcttactactgaggagattctcacgctggctaggctgtttgtgaaagaaggcattgataagatccgactgaccggcggagagcctttgatcagacccgatgttgttgatatagtagctcagctgcagaggctcgagggcttgaggactatcggcgtgacgacaaacgggatcaacctcgctcgccttctgccccagctacagaaagccggcctctccgccatcaacatctccctcgacaccctggtcccggcaaagtttgagttcatcgttcgcaggaagggcttccacaaagttatggaaggaattcataaggcaattgaactggggtataaccccgtgaaagttaattgtgtggtgatgagggggctcaatgaggatgagcttttggacttcgccgcccttacagaggggctgccacttgatgtgcggttcatcgaatacatgcctttcgatggcaacaagtggaactttaaaaaaatggtctcttataaggaaatgttagacacggttcggcagcagtggcctgagttggagaaggtacccgaagaagagtcaagcacagcgaaggcctttaaaataccaggattccagggccagatcagcttcatcaccagcatgagcgagcacttctgcggtacatgtaatcgcttgcgcattaccgcggacggaaatttgaaagtgtgtttattcgggaactccgaggtgagcttgcgggatcatctcagggcaggagctagcgaacaggagttactccgcatcatcggcgccgccgtgggtcgaaaaaaaaggcagcatgcaggcatgttctcgatctcccagatgaaaaacaggccaatgattctgattggcggatag

SEQ ID NO: 124839 - DNA, 267 bp, synthetic construct
  misc_feature 1..267: note = Description of Artificial Sequence: Synthetic coding sequence
  source 1..267: mol_type = other DNA
atggttcctctctgtcaggtggaagtgttatactttgcaaaatccgctgagataaccggcgtccgcagtgagaccatcagcgtccctcaggagatcaaggccctccagttgtggaaggaaattgagaccaggcacccagggcttgctgatgtgcgaaaccagataatcttcgctgtgaggcaggagtacgtggagctgggggaccagctcctggttcttcagcctggcgacgaaattgcagtcataccccctattagtggagggtag

SEQ ID NO: 124840 - DNA, 567 bp, synthetic construct
  misc_feature 1..567: note = Description of Artificial Sequence: Synthetic coding sequence
  source 1..567: mol_type = other DNA
atgtcttccctcgaaatatcttcatcatgtttctcattagaaaccaaacttccgcttagcccaccattagtagaggactccgcttttgaaccttcacgtaaagacatggatgaagtggaggagaagtccaaggacgtcattaacttcacagcagagaagctttcagtggacgaagtcagccagttggtcatctcccccttgtgtggcgcaataagtctcttcgtgggtacaacccggaataacttcgagggcaagaaggtgattagtctcgaatacgaagcctatttgcctatggctgaaaatgaggttcgcaagatctgtagcgacatacggcagaagtggcccgtaaagcatattgcagtcttccaccggctcgggttagtgcctgtcagcgaagctagtattatcatcgccgtgagcagcgcgcaccgcgccgccagcttagaggcagtgagctatgcgatcgacacccttaaggccaaagtgcctatctggaagaaggagatttatgaggagagtagcacgtggaaaggcaacaaggagtgcttttgggcctcaaatagctag

SEQ ID NO: 124841 - DNA, 267 bp, synthetic construct
  misc_feature 1..267: note = Description of Artificial Sequence: Synthetic coding sequence
  source 1..267: mol_type = other DNA
atggtgccactgtgtcaggtagaagttttatactttgccaaatcagccgaaattactggagtgcggagtgagacaatatccgttcctcaggagattaaggcgttgcagctgtggaaggagattgagacgagacaccccgggctggccgacgttcgcaatcaaattatcttcgcagtccgacaggagtacgtggagctcggcgaccaactgttggtgctgcagccaggtgatgagattgctgttataccacccataagcggaggttag

SEQ ID NO: 124842 - DNA, 267 bp, synthetic construct
  misc_feature 1..267: note = Description of Artificial Sequence: Synthetic coding sequence
  source 1..267: mol_type = other DNA
atggtgcccttatgtcaggtggaggttttatacttcgccaaaagtgccgagatcaccggcgtgagatcggaaactatttctgtgccacaagaaattaaggctctgcaactgtggaaggaaatcgaaacacgacacccaggtcttgccgatgttcggaaccagattatctttgcagtccgccaggagtatgttgaactaggggatcagcttttggtactgcagcccggtgatgagatcgccgtgattccgcctatatcaggtgggtag

SEQ ID NO: 124843 - DNA, 267 bp, synthetic construct
  misc_feature 1..267: note = Description of Artificial Sequence: Synthetic coding sequence
  source 1..267: mol_type = other DNA
atggtcccgctgtgtcaggtcgaagttctctacttcgctaagagtgccgagatcacaggtgtgcggtctgagaccatctccgttccacaggaaataaaagcactgcagctctggaaggagatcgaaacccgtcatcccggtctcgctgacgtacgaaaccaaattatttttgctgtgcggcaggagtacgtggagttgggcgatcaactgctggttctgcagccaggagatgaaattgccgtcatcccaccaatcagcggagggtag

SEQ ID NO: 124844 - DNA, 462 bp, synthetic construct
  misc_feature 1..462: note = Description of Artificial Sequence: Synthetic coding sequence
  source 1..462: mol_type = other DNA
atgagttccctggagatcagctcaagctgtttctcactagagacgaaattgccactcagtcctcccctagtagaggacagcgcctttgagccctcccgtaaagatatggacgaagtcgaggagaagtcaaaggatgtgataaattttaccgcagagaagctcagcgtggacgaggttagtcagctggtgatttctccactgtgtggcgccatatccctgtttgtaggcactacaagaaacaacttcgagggaaagaaggtcattagtcttgagtacgaagcgtatttacccatggcagagaacgaggtacgtaagatctgctccgacattcgacagaaatggccagtgaaacatattgcagtgtttcataggctgggactggttcccgtctccgaggcctcaataattattgctgtgtccagtgcacacagagccgcctctctggaagcagtcagctactag

SEQ ID NO: 124845 - DNA, 1644 bp, synthetic construct
  misc_feature 1..1644: note = Description of Artificial Sequence: Synthetic coding sequence
  source 1..1644: mol_type = other DNA
atggaggtaggaggtgatactgccgcccctgctccgggtggcgctgaagaccttgaagacacccaatttccctctgaagaagccagagagggtggtggtgtgcacgctgtcccccccgacccagaggatgagggactggaggagaccgggagcaaggataaagaccagcctccaagtccgtcccctccgcctcagtccgaagcactgagcagtacatcccgattatggagtccagccgctcccgagaattcaccaacttgttccccagagtctagctcgggcggacaaggcggtgacccaagcgacgaagagtggagatctcaaaggaaacacgttttcgttctaagcgaggccggtaagccaatttactctaggtatgggtccgtcgaggccctgtctgcgaccatgggtgtcatgacagcacttgtgagtttcgtgcagagcgcaggggacgctattcgcgcaatatacgccgaggaccacaagttggtgttcctgcaacagggacccttactgctcgtcgccatgagccgtacatcccagtccgctgcacaactccgaggagaattactcgcagttcacgcacagatcgtgtcgaccctgaccagagcgagcgtcgctaggatattcgcgcataagcaaaattatgatctcagaagactgctggctggaagtgagcggactctcgacagattgcttgatagcatggagcaggaccccggtgcactcctcctaggtgctgtgaggtgtgtcccactggcgaggcccttacgcgacgccctcggcgctctcttacgacggtgtacagcaccgggcttggctcttagcgtgctggcggtcggcggccggcttatcaccgcagcccaggaaaggaacgtcttagccgaatgccgcctagatcccgctgatctacaactgttgctggactgggtgggcgcccccgccttcgctgcgggcgaagcatgggctcctgtctgtcttccgcgatttaacccagacggcttcttttatgcctatgtagcacgtctggacgcaatgccagtttgcctcctcctgctgggaacccagcgtgaagcctttcatgcaatggccgcgtgccggaggctggtggaagatggcatgcacgcgcttggtgcgatgagagccctcggtgaagcagcctctttcagcaatgctagctcagccagcgcacctgcctactcagtacaggccgtgggagcccctggactccgccacttcctgtacaaaccactcgacatccccgatcatcatcgccagctgccccagttcacttcccctgagctggaagccccttactctagggaggaagaacgccaacgcctgagcgacctgtatcacaggctccatgcccgtcttcactcgacttcacggcccctccggctgatttatcatgtggccgagaaggaaacgctgttggcgtgggtgacaagtaagttcgaactttatacttgcttatcacccttggtgacaaaggctggagcaatccttgtggttacaaagctcctgcggtgggtcaagaaagaggaggatagactattcataagatatcccccgaaatattcgacaccccctgccacctctactgaccaggccgcccacaacggtctattcactggactgtag

SEQ ID NO: 124846 - DNA, 438 bp, synthetic construct
  misc_feature 1..438: note = Description of Artificial Sequence: Synthetic coding sequence
  source 1..438: mol_type = other DNA
atggaggtcggtggggacaccgctgctccagcccctggaggggccgaggacctcgaggatacccagttccccagcgaagaggcgcgcgagggagggggcgtgcacgcagttcctccggatcccgaagatgagggcctggaagagacagggagtaaggacaaggatcagccgccctccccgtctccaccacctcagtctgaagctctgagctcaactagtcggctatggtcgcccgctgcccccgagaactcacctacatgctccccagagtcctccagcggtggtcagggaggagatccgagtgacgaagagtggcggtctcaaaggaatgggtgcaggacgtgcaccacggcttgcatgctagtatctactgccccacctgacccatgtgcttcctttactacgtggctgagaaggagacactactggcctggctag

SEQ ID NO: 124847 - DNA, 1317 bp, synthetic construct
  misc_feature 1..1317: note = Description of Artificial Sequence: Synthetic coding sequence
  source 1..1317: mol_type = other DNA
atggaggtgggcggagacacagcagcccctgcacctggtggtgctgaggatttggaggatacccagttcccctctgaagaggcccgggagggcggcggagtgcacgccgtgccacctgatcccgaagatgaagggctcgaggaaaccgaggaccataaacttgtttttctccagcagggccccctcttgctggtcgccatgtccagaaccagtcagtccgcagcacagctccgaggtgaactgctcgccgttcacgcccaaatagtgagcacattaaccagggcctcagtcgccaggatctttgcccacaaacagaactacgacctcagaagactgctggcggggtcagaacgtacattagacaggctgctggatagcatggagcaagaccccggggcactcttgctgggggccgtgcgctgtgtccccttggccaggccattgagggatgccttaggagctctcctccgcagatgtaccgcccctgggctcgcactcagcgtgttggccgttggcggccgcctcatcaccgcggcgcaggagcgcaacgtcttggccgaatgcaggttagatccagctgacttgcagctgctgctggactgggttggcgctccagcctttgccgcgggtgaagcttgggcacctgtttgcctgccccgctttaaccccgacgggtttttctacgcatacgttgcccggctagacgcaatgcccgtctgtctgttgctcctgggtacacaaagagaggcatttcatgcaatggcggcctgtcgcaggctggtggaagacggcatgcatgcactgggagcaatgcgcgcgttaggcgaagctgcaagtttctctaatgcctctagcgcttccgctcccgcttacagcgtacaggcggtcggtgcaccgggactgcgacacttcctgtacaagcccctggacattcccgaccaccacagacaacttcctcagtttacaagtccagagctggaagctccgtactcccgggaggaagagcggcagcggctctctgacttgtatcacagacttcacgcacgtttgcatagcacatcccggccattgagacttatctatcacgtcgctgagaaagagactctccttgcctgggtgacatctaaatttgaactctatacttgcttgagccccctggttactaaagccggggccatcctcgtggttactaagctgctgcgttgggtgaagaaagaggaggacaggctcttcatccggtatccacccaaatacagtacccctccagcaaccagtactgatcaagctgcacataatgggctgtttaccgggctgtag

SEQ ID NO: 124848 - DNA, 1206 bp, synthetic construct
  misc_feature 1..1206: note = Description of Artificial Sequence: Synthetic coding sequence
  source 1..1206: mol_type = other DNA
atggtcagcggacaactgagatttggtgttaagactgaggaccacaaactggtctttctgcagcaggggcctctccttttggtggcaatgtctaggaccagccagtccgcggcccagctccggggggagttgctcgccgtgcacgctcaaatcgtctccaccctaactagagcttctgtagcgaggatctttgctcacaagcagaattatgacctgaggagactcttggccgggagcgagaggactctcgaccggctgctggactcgatggagcaagatcctggcgccctgctgctgggcgccgtgcggtgcgtgcccctagcaagacccctccgcgatgctctcggcgcactcctccggcggtgtacagcaccaggcctcgcactttcagttctggcagttggtggacggttgatcacagccgcccaggaacgcaatgtgctcgctgaatgcagacttgatcccgccgacttgcagcttctgctggactgggtcggggcacctgcatttgcagccggtgaggcgtgggcacccgtgtgtctcccgcggttcaaccctgatgggtttttttacgcatatgtcgcaaggttggatgctatgcccgtctgcctgctgcttctgggcacacagcgtgaagctttccacgccatggccgcctgtcgcagactagtcgaagacggcatgcacgcgctgggcgcgatgagggcactgggggaggcagctagcttcagcaacgcaagtagcgccagcgcccctgcctatagtgtgcaggcggtgggggccccaggactcagacattttctgtacaagcccctcgacatccctgaccaccacaggcagttaccccagtttacatcacccgaactcgaagccccgtatagccgcgaggaagagaggcaaaggctgagcgatctgtatcacaggcttcacgccaggttgcattctacttctcggcctttacgcctgatctatcacgttgccgaaaaagagaccctgcttgcctgggtcacgtccaagttcgagttatatacctgcctgtctcctttggtgactaaagcaggcgccatcctagtcgtgactaagctattacggtgggtcaagaaagaagaggatagactctttatccgctatccgcccaaatactccaccccacccgcaacaagcaccgatcaggctgcacacaatggacttttcaccggactatag

SEQ ID NO: 124849 - DNA, 1584 bp, synthetic construct
  misc_feature 1..1584: note = Description of Artificial Sequence: Synthetic coding sequence
  source 1..1584: mol_type = other DNA
atggaaaatcaagaaaaggctagtattgccggccatatgtttgatgtggtggtgataggcgggggcatcagcggcttgagcgccgccaagcttctgaccgagtatggagttagcgtgctggtgctcgaggctagggatcgggtgggaggccgcacttacaccatcaggaatgaacacgtggattacgtcgacgtaggcggcgcctacgtcggaccaacacagaacaggatactgagattatcaaaggagcttgggatagagacatataaggtgaacgtttccgagaggctggtccaatacgtgaagggaaagacatacccctttagaggtgctttccctccggtgtggaaccccattgcatatctggactacaataatctgtggagaacaatagataacatgggtaaagaaatcccgacagacgccccttgggaggcccagcatgccgataaatgggacaagatgactatgaaggagctgatcgataagatctgctggaccaagaccgcccgtcgcttcgcttatttgttcgtgaatattaatgtgacgagtgagccccatgaagtgtcggcactttggttcctgtggtatgtcaagcagtgtggcggcacaaccagaattttctccgtgaccaacggtgggcaagaacgaaagttcgtcggagggtcagggcaagtcagtgagcgaatcatggatttgttaggagaccaggtgaaactgaaccaccccgtgacacatgtggaccagagcagtgacaatatcatcatagagacactgaaccacgagcattacgagtgcaaatacgttataaatgctatcccacccactctgaccgcaaagatccacttcagacctgaattacccgcagaaagaaatcagttaattcagagacttcccatgggcgcagtgatcaaatgtatgatgtattacaaagaggctttctggaagaagaaggactactgtggatgtatgattattgaggatgaggacgctcccatcagtataacactagacgataccaagcccgatggttctctgccagcaattatgggtttcattctggcccgcaaagccgataggttggctaagttgcacaaagaaattcgtaagaagaaaatctgtgagctttacgccaaggtcctcgggtctcaggaagccctgcatcccgtacactatgaagaaaaaaactggtgtgaggaacaatacagcggcgggtgctacacagcctatttccccccaggcattatgacccagtatggccgcgtcatacggcagcctgtaggcaggatcttcttcgcaggcaccgagaccgcaactaaatggtcgggatatatggagggtgcagtcgaggccggtgaacgcgcggctagagaggtgctgaacggacttgggaaggtaacagaaaaagacatttgggtgcaagagcccgaatctaaagacgtgcccgctgtggagattacgcacacattttgggagaggaatctgccaagtgtcagtgggctgctgaaaatcattggctttagcacatcagtgactgccctaggctttgtgctgtataagtacaagcttttaccgcgatcatag

SEQ ID NO: 124850 - DNA, 1185 bp, synthetic construct
  misc_feature 1..1185: note = Description of Artificial Sequence: Synthetic coding sequence
  source 1..1185: mol_type = other DNA
atgggaaaagaaatccctaccgacgccccgtgggaagctcagcacgcggacaagtgggataaaatgaccatgaaagaactcatagacaagatctgctggactaaaacggcgcgacgattcgcatatctgttcgttaatataaatgtaacaagcgaaccacatgaggtttctgctttatggttcttatggtatgtcaagcaatgcgggggcaccacccggatcttctccgtaaccaatggcgggcaggagcgaaaattcgtgggtggatcaggtcaggtgtctgaaaggattatggaccttttgggagatcaggtcaaacttaaccatcccgtaactcacgtagaccagtcctccgataatatcatcatcgagacactcaaccacgagcattatgaatgcaagtacgtaattaatgccataccacccacactaaccgcgaagatacatttccggcctgagctgccagccgagcggaaccagctgatacagcgtctcccaatgggagccgtaataaaatgtatgatgtattacaaagaggctttttggaaaaagaaggattactgcggttgtatgatcattgaagatgaggatgcccctatctcaatcacacttgacgatacaaaacctgatggatccctccctgccatcatgggcttcattctggcgaggaaagccgaccggttggcgaagctccataaggaaatccgtaagaaaaagatctgtgaattgtatgctaaagtactgggctcccaagaagccctccatcccgtccactatgaggagaagaattggtgcgaagaacagtacagcggagggtgctatacggcctactttccaccagggattatgactcagtatggccgggtcataaggcaacccgttgggcgaatcttctttgcaggtactgagaccgccaccaagtggtcaggatacatggaaggagcagttgaagctggcgaacgcgcagccagggaagtgctcaacgggctcggtaaggtgaccgagaaggacatctgggtacaggagccggagtctaaggatgtaccggctgtggaaataactcacaccttctgggaacggaacctaccatctgtgagcgggctgttgaagataataggtttcagtacatctgttacagccctgggattcgttctctacaaatataaactgctgccacgctcctag

SEQ ID NO: 124851 - DNA, 1563 bp, synthetic construct
  misc_feature 1..1563: note = Description of Artificial Sequence: Synthetic coding sequence
  source 1..1563: mol_type = other DNA
atgagcaacaaatgtgacgtggttgttgttggcgggggcatctcaggcatggctgctgccaagttattgcacgattccggactgaacgtggtggttctggaggctcgcgatagggtgggcggcaggacatacactctgcgaaaccagaaagtgaagtatgtcgacctgggaggatcatatgttggtccaactcagaacagaattctcagactagccaaggagttaggccttgagacctacaaagttaatgaagtcgagcgcctgatccaccatgtaaagggcaaatcctatccttttcgtgggccttttccacccgtatggaaccctattacataccttgaccataataacttttggcgaacaatggatgacatgggcagggaaattcccagtgacgctccttggaaagcaccattagcagaggagtgggacaacatgaccatgaaagagctgcttgacaagctgtgctggaccgaaagcgcgaaacagttggccaccttgtttgtgaatctgtgtgtcaccgccgagactcacgaggtttccgctctttggttcctctggtatgtgaagcaatgcggggggaccacccgcatcatctccacaacaaatggtggccaggagcgcaagttcgtcggtggctccggtcaggtttccgaaagaataatggatctcctcggcgaccgggtcaaactcgagagacctgtcatctacattgaccaaacaagggaaaacgtactggtggaaaccctgaatcacgaaatgtacgaggcaaagtatgtgatctcagcaatccccccaaccctgggtatgaagatacatttcaatccaccccttccaatgatgaggaatcagatgatcacccgagtgccactaggctccgtcataaagtgcatcgtgtattacaaagagccattttggcgtaaaaaggactactgcggaaccatgataatcgacggggaagaggcccctgtcgcttacactttagacgacacaaaaccagagggcaactacgctgcaattatgggtttcatcttagcacacaaggctcgcaaacttgctcgcctgaccaaagaagaacggttgaagaaactttgtgagctgtatgcgaaggtcctgggctcactggaggccctcgaaccagtgcactacgaggaaaaaaactggtgtgaggaacaatattcaggggggtgttatactacctacttcccgcctggtatactgacccagtacggccgggtcctgcgacagccggtggaccggatctatttcgctggcacagagacagccacccactggtccggatatatggaaggagccgtggaagccggcgagagggcagccagggagattctgcacgcaatggggaaaatacctgaagatgaaatttggcagtctgagcctgagtcggtggacgtccccgcacaacctataaccacaactttcctggagcgacatctgccaagtgtccctggattgcttcgcctaatcggcctcactacgatctttagtgcaacagcactaggctttctggcacacaagagggggctgttggttagagtctag

SEQ ID NO: 124852 - DNA, 1515 bp, synthetic construct
  misc_feature 1..1515: note = Description of Artificial Sequence: Synthetic coding sequence
  source 1..1515: mol_type = other DNA
atggctgctgccaaactgctgcacgactcaggtctgaacgtggttgtcttagaagccagggaccgcgttggcggtcgcacctacaccctgcgcaatcagaaagtgaaatacgtggacttgggcggatcttacgtgggaccgacacagaatagaatcctgcgattagccaaagaactggggctagagacctataaggtgaacgaagtggaaaggctgatccatcacgtgaaaggcaagtcttacccctttcgcggaccttttccgccggtttggaatcccattacgtaccttgatcacaataatttctggcggacaatggatgacatgggcagagagatcccctccgacgccccctggaaagccccgttggctgaagaatgggacaacatgacgatgaaggaactactggacaagctgtgttggaccgagtccgccaaacagctggctacactgttcgtaaacctgtgcgtaaccgctgaaacccacgaggtgagcgctttgtggttcttgtggtacgtgaagcagtgcggtggaaccacccgcattatcagtactacaaatggggggcaggagagaaaattcgtgggcggatctggtcaggtgagcgagaggattatggatttactcggcgatcgggtgaagttggagcggccagtgatttatattgaccaaactcgtgagaatgtattagtagagaccctgaaccacgaaatgtatgaggctaagtacgtcatttctgcgataccaccaacattgggcatgaaaatacatttcaacccacccctacccatgatgcgcaaccaaatgattacaagagtacctctgggatctgtgataaaatgtatcgtctattataaagaaccattttggcggaagaaagactactgtgggaccatgatcattgacggtgaagaggccccggtagcctacaccctcgacgacacaaagccagagggcaactacgcagcaattatgggctttattcttgctcacaaggcgaggaagctggcacgcctgaccaaggaagagcgactgaaaaagctgtgcgagctgtacgccaaggtgctggggagcctcgaagctctggaaccagtacattacgaagagaaaaattggtgcgaggaacagtatagcggcgggtgctacactacctatttcccccccggtatactgacacaatacggcagagtactccgacagcctgttgaccgcatatactttgctggtacagagaccgctacgcattggagtggctacatggagggagcagttgaagccggagagagggcggcgcgggaaatactccatgcaatggggaagatccccgaggatgaaatttggcaaagcgagccggagagcgtggacgttcctgcacagcccatcacaaccacttttttggagcggcatctgcctagcgtgccaggcctgctgcgactgattggtttgacaactatatttagtgccaccgctctaggctttctggctcataaacgcggtctactggttcgggtgtag

SEQ ID NO: 124853 - DNA, 1236 bp, synthetic construct
  misc_feature 1..1236: note = Description of Artificial Sequence: Synthetic coding sequence
  source 1..1236: mol_type = other DNA
atggcagcagctaagctgcttcacgacagtggtttgaatgttgtggtgctggaagccagggatcgggtggggggtcgcacctacacactgaggaatcaaaaagttaaatatgtagatctgggcggtagttatgtaggacccacccagaaccgcattttacgcctggccaaggagctcggcttggaaacatacaaggtgaacgaggtggagcggcttatccaccacgttaagggaaagagctatccctttcggggaccttttccgcctgtctggaaccctatcacctatctggaccacaacaacttttggagaacaatggacgacatgggccgcgaaatcccaagcgatgccccatggaaggcacctctggccgaagaatgggacaatatgacaatgaaggagctactagacaaattatgttggaccgagtccgcaaaacagcttgctactctctttgtgaacttgtgcgtcactgccgaaacacacgaggtgagcgctttatggtttctatggtacgtgaagcagtgcggtgggaccactcgaattatctctactactaatgggggacaggaacgcaagttcgtgggcggctctggccaggtgtcggagcgaattatggatctgcttggcgaccgtgtcaagctcgaacggccagtcatctatatcgaccagacacgcgaaaatgtgctcgtggagaccctcaatcatgagatgtatgaggccaaatacgtaatttcggcgattccacctacgctgggaatgaagatccatttcaaccctccattgccgatgatgcgcaaccagatgattacaagggtgccccttggcagcgtgataaaatgtattgtgtactataaagagccattctggagaaagaaggattactgcggcactatgatcatcgatggggaggaagccccggtcgcctacaccctggatgataccaagccagagggaaactacgcagcaatcatgggctttatattggcccacaaggcacggaagctggccaggctgaccaaggaagagcgactaaagaagttgtgcgagctgtatgcaaaggtccttggttcactggaggccctggagggatcgacacccgcgagcggacaggatctgctttgccgacaccgggactgtcacaccctggagaggctacacggggggggttgtcggggacgcggagaatcatcccctagagatcccgcctgtcacggcgaggattctaggggatag

SEQ ID NO: 124854 - DNA, 741 bp, synthetic construct
  misc_feature 1..741: note = Description of Artificial Sequence: Synthetic coding sequence
  source 1..741: mol_type = other DNA
atgtttgccccccgcctcctcgactttcagaaaaccaaatatgcacgttttatgaaccatagagtgccggcccacaaacgatatcaacctactgagtatgaacacgccgccaactgtgcaactcacgctttctggattattccatcaatactcggctcttcaaacttatatttcctgtcagatgacgattgggagactatctctgcatggatctacggtcttggactgtgcggactctttgtggtgtcaacggtgttccacacaatttcctggaaaaaaagtcacctgcggatggtcgagcactgtctgcacatgttcgaccggatggtcatctatttcttcatcgccgctagctacgccccttggttaaacctgcgcgaactcggaccttgggcgtctcacatgaggtggctcgtatggatcatggcttctgtcggaaccatctacgtattctttttccatgagcgctacaagctggtggaactgttgtgctacgttgtgatgggcttttttcccgcactggtgattctgtccatgcctaacaccgagggaatctgggagctggtgactggtggtgtcttttactgcttagggatggtgttctttaaaagtgatggccgaatccccttcgcgcatgccatatggcacctgtttgtggccttcggagcaggaacccactactatgccatctggcgatatctttacctaccaagcacgctgcaaactaaagtgtccaagtag

SEQ ID NO: 124855 - DNA, 813 bp, synthetic construct
  misc_feature 1..813: note = Description of Artificial Sequence: Synthetic coding sequence
  source 1..813: mol_type = other DNA
atgttcgctcccaggctccttgatttccagaaaacaaagtacgctcggtttatgaatcaccgggtgcccgctcataaaaggtaccagcctacagagtacgaacacgccgcgaattgtgcaacccacgcgttttggatcattccttctattctggggtctagtaacctttacttcctatcggatgatgactgggaaaccatcagtgcatggatctatggcctcggcctctgtggcctcttcgtagtaagtactgtgttccacaccatctcttggaaaaaaagccatctgcgcatggttgaacactgtttacacatgtttgatcgcatggttatctacttttttattgctgctagttacgcgccatggttgaacctccgtgaattaggtccttgggcttcacacatgagatggctggtttggattatggcttcagtcggcactatttacgtgttcttttttcacgaaagaaccggcagttgtgtacagttcctgcgcggggaagcctgccccaaagcggggactgcatgcctcccagcccggtataagctcgtggagctgctgtgttatgtcgtcatgggcttctttcccgccctggttatcctgagcatgcctaataccgagggaatctgggagctcgtaacgggcggcgtcttttactgtctcggcatggtgttttttaagtccgatgggaggataccctttgcacacgcaatctggcacttgtttgtcgccttcggagcgggcacccactattacgctatttggagatacctttatctcccttcaacactacaaaccaaggtttctaaatag

SEQ ID NO: 124856 - DNA, 582 bp, synthetic construct
  misc_feature 1..582: note = Description of Artificial Sequence: Synthetic coding sequence
  source 1..582: mol_type = other DNA
atgttcgctccccgcttactggacttccagaagactaagtatgccagattcatgaaccaccgggtgcccgcacacaagagatatcagccaactgaatacgagcacgccgcaaactgcgcaacccatgcattctggatcataccctctatcttgggctccagtaatttatatttcttatctgacgatgactgggaaacaattagcgcttggatctatggcttgggattgtgtggactgttcgtcgtgagcacagtgttccacacgataagctggaagaagtcccatctgcgaatggtggaacactgcctgcacatgttcgaccgcatggtgatctacttcttcatcgcggccagctacgccccttggctgaatctcagagagctcggtccatgggccagtcatatgcgctggctagtctggattatggcatcagtgggcactatatacgtcttcttctttcacgaacggtacaagctcgtggaactcctgtgctatgtggtgatggggttctttccagctctggtgatactgagcatggcaggtaagctacgcccaggaatgacatgcctgaagcgacagtag

SEQ ID NO: 124857 - DNA, 942 bp, synthetic construct
  misc_feature 1..942: note = Description of Artificial Sequence: Synthetic coding sequence
  source 1..942: mol_type = other DNA
atggagactggcccagaagatccaagtagtatgcccgaagagtcaagcccccgcagaaccccccagtccatcccatatcaggaccttccgcacttggtgaacgccgatggccaataccttttctgtaggtactggaagccgacaggcactcccaaggccctgatcttcgtttctcacggtgccggcgaacacagtggaaggtatgaagagctcgccagaatgttgatgggcctggacctgctggtcttcgcacatgaccatgtgggtcatggacagtcagagggggagcgaatggtggtttctgatttccacgtgttcgtgcgcgatgtcttgcagcacgttgactccatgcaaaaagattatcctgggttacctgtttttctattgggccattcaatgggtggagccatagcaatccttactgcggccgagaggccaggccactttgctggcatggtcctgatctctcccctcgttttagcaaaccctgagtccgctaccaccttcaaagttttggcagccaaggtgctcaatcttgtgctgcccaatctcagcttggggcctatcgatagcagcgttctcagcaggaacaagacagaggttgacatatacaacagtgaccctcttatttgtagggctgggctcaaagtctgcttcggaatccagctcctgaatgctgtctcacgggttgaacgcgctctgcctaagctgactgtcccattcctgctgttgcaaggatctgccgaccggttgtgcgactccaagggagcatatctgctcatggagctggccaagtcacaggacaaaactctcaaaatctatgaaggtgcctaccatgtgctgcataaggaactcccagaggtcactaactcggtctttcacgaaataaatatgtgggtgtcccagagaacagcaaccgccggcactgcgtccccaccgtag

SEQ ID NO: 124858 - DNA, 912 bp, synthetic construct
  misc_feature 1..912: note = Description of Artificial Sequence: Synthetic coding sequence
  source 1..912: mol_type = other DNA
atgcctgaagagtccagtcccaggcgtacgcctcagtctattccgtaccaggacctccctcacctggtaaatgcagacggccagtacctgttttgtcggtactggaaaccaacaggcacccccaaggctctaatatttgtgagccatggcgccggtgagcacagcggtagatatgaggagctggccaggatgttgatgggtctcgacttactcgtgttcgcccacgaccacgtgggccatggacagagtgagggcgaacgcatggttgtctccgacttccatgtcttcgtcagggatgtgctgcagcacgttgattctatgcaaaaggattaccccggcttgcccgtattcctgctgggtcacagcatggggggagccatcgccattcttacagctgcggagaggcccggacacttcgccgggatggtactgatcagccccttggtgctggctaaccccgagtctgcgaccacattcaaagtgctggcagctaaggttctgaacttggtgctgcccaacctgtcactgggcccaatagactcctccgtattgtcgaggaataagaccgaggtagatatctataactctgatcctctcatatgtcgggcaggcctgaaggtttgttttggaatccagctcctgaatgcagtctcccgggtggagagggcactccccaagctgacagtgccgttcttactcctgcaggggagtgctgaccgcctctgtgatagcaagggcgcatatctgttaatggaactggcaaagagccaagacaagacattaaagatctacgagggggcctatcatgtcctccataaggagctacctgaggtgactaacagcgtattccacgagataaacatgtgggtgagtcaaagaacagccacagcaggaactgctagccccccatag

SEQ ID NO: 124859 - DNA, 912 bp, synthetic construct
  misc_feature 1..912: note = Description of Artificial Sequence: Synthetic coding sequence
  source 1..912: mol_type = other DNA
atgcccgaggagtcatcacctaggcggaccccacagtcaataccataccaggatctgccccacctcgttaacgccgatggccagtacctgttctgcaggtattggaaacctactggtactcctaaggccttgatcttcgtgtcacatggggcgggcgaacacagcggtagatacgaagagcttgctagaatgctcatgggattggacctgctcgtgttcgcacatgaccacgtgggccacggtcaatcagagggtgaacggatggtcgtgtcagatttccatgtcttcgtgcgcgacgtgctccaacacgttgattccatgcagaaagactatcctggtctgccggtttttctgctcggccatagcatgggaggagctatcgctattctgaccgctgcagaacggccaggacatttcgccgggatggtccttatctcacctttggtgctggctaacccagagagcgccactacttttaaggtactcgccgccaaagtcctgaacctggtgctcccgaacctttcgcttggcccgatcgattcttcggtgctgtcaagaaacaaaacagaggttgacatctacaattctgatcccttgatctgccgggcgggcctgaaagtctgctttggcattcaattactgaatgctgtaagtcgcgtggagcgggccctgcccaaactgactgttccttttctgcttctgcagggatctgctgataggctctgcgacagcaagggagcctacttgctaatggagctggcaaagtctcaagataaaactctcaaaatatacgagggcgcctaccatgttctccacaaggagcttccagaggtcacaaactcggtgttccacgaaatcaacatgtgggtttcccagcgcaccgccaccgccgggactgcctcccccccatag

SEQ ID NO: 124860 - DNA, 852 bp, synthetic construct
  misc_feature 1..852: note = Description of Artificial Sequence: Synthetic coding sequence
  source 1..852: mol_type = other DNA
atggaaactggcccagaggaccccagctccatgcctgaggaatctagcccacggagaactccacagtccatcccatatcaggatctgcctcatttagtgaatgctgacgggcagtatctgttttgccggtactggaagcctactggcacacccaaagcactgatttttgtgtcccatggcgccggggagcacagcggacgctacgaggaacttgcgagaatgttaatggggctggacctccttgtttttgcccatgatcacgtcggacatggccagtccgaaggcgagcgcatggtggtgagcgatttccatgttttcgtaagggacgttcttcagcacgtcgatagcatgcagaaggactatcctggccttccagttttcctattaggtcacagtatgggtggagctatagccatccttacagcagcagaacgtcccggacactttgccggaatggtgttgatcagtccattggtactggcgaatcccgagagtgcaactacctttaaggtcgacatctataacagcgacccccttatctgccgggctggactcaaggtgtgttttggcattcagctgctgaacgctgtgagtcgcgttgagagggcgctcccgaaactgactgttcctttcctactgctccaagggagtgcagatcgcctttgcgacagtaagggcgcgtaccttctaatggaacttgctaaatcccaggataagacactgaaaatttacgaaggcgcctaccacgtacttcacaaggagcttcctgaggtcacaaatagtgttttccacgaaattaatatgtgggtaagccagcgaacagctactgccggtaccgcctctcccccctag

SEQ ID NO: 124861 - DNA, 234 bp, synthetic construct
  misc_feature 1..234: note = Description of Artificial Sequence: Synthetic coding sequence
  source 1..234: mol_type = other DNA
atgcccgaggagtctagtccacgaaggacccctcagagcattccataccaagaccttcctcatctggtcaatgcagatggacaatacctattctgccgatactggaaaccaacgggcacccccaaagccctgatctttgtaagtcacggggccggagagcacagcgggcgctacgaggagctggcccgcatgttgatgggcctggatctgttggtcttcgcccacgaccactag

SEQ ID NO: 124862 - DNA, 942 bp, synthetic construct
  misc_feature 1..942: note = Description of Artificial Sequence: Synthetic coding sequence
  source 1..942: mol_type = other DNA
atgaagaccagacctgaggatcccagtagcatgcctgaggaatccagcccccgtcggactcctcagtcgatcccataccaggaccttccccatttggtgaatgcagacggccagtacctcttttgtcgttactggaagcccaccggaacacctaaagccctgatcttcgtgagtcacggcgccggcgaacactccggacggtatgaagaactagctaggatgctgatgggcttggacttgttagttttcgcccatgatcacgtcggacatggacaatcagaaggtgaaaggatggtggttagtgatttccacgtgtttgtgagggatgtgctgcagcacgtggacagtatgcagaaggattatcctggtttaccggtgtttcttctgggacactctatgggtggggcaatagccatactgaccgctgcagaacgcccaggccacttcgcaggtatggtgctgatctctcccttagtgctcgctaatccggagtctgcgaccacatttaaggtgctggcagcaaaagtgttgaacctggtgctgccaaacctgtctttaggcccaatcgacagttctgtcttgtcgagaaacaaaactgaggtcgacatatataactctgatcccctgatttgccgggcgggcctcaaagtttgctttggaattcagctgttgaacgctgtctcgcgtgtggagagggcacttcccaaactcactgtgcccttcttgcttctgcagggctccgctgatagactgtgcgacagcaagggcgcttaccttctaatggagctggctaagagtcaggacaagactttaaagatctatgagggggcttatcacgtgctgcacaaggagttgcccgaggtgacgaatagcgttttccacgaaataaatatgtgggtgagccaaaggactgctacagccggcaccgcctccccgccctag

SEQ ID NO: 124863 - DNA, 1842 bp, synthetic construct
  misc_feature 1..1842: note = Description of Artificial Sequence: Synthetic coding sequence
  source 1..1842: mol_type = other DNA
atgtgttgctggcctctccttctgctttggggattgctgcccggtactgcggccggcggttctggccggacctacccccaccggacccttctggattctgaaggcaagtattggctggggtggagccagaggggttcacagatagcttttaggcttcaggtcagaaccgctggctatgtggggttcggatttagtcctaccggcgcaatggcttctgctgatatagtggtgggaggcgtggcacacggtcgcccttatttacaagactacttcaccaatgccaaccgtgaattgaaaaaggatgctcaacaggattaccacttggagtatgcaatggagaactcaacccacacaataattgaattcaccagagagctgcatacatgtgatattaacgataaaagcattacagactctactgttagagtcatttgggcatatcatcacgaggatgctggtgaggccggtcccaaataccacgacagcaatcggggcaccaagtctctgcgcttgctgaatcccgaaaaaaccagtgtcctgagtactgccctcccttacttcgacctcgttaaccaggatgtgcctatacctaataaagataccacctattggtgccagatgttcaagattccagtcttccaggaaaagcaccatgtcatcaaggtagaacccgtaattcagaggggccacgagagtcttgtgcaccacatcttactctaccagtgtagtaataacttcaatgactctgtgttggagtccggacatgaatgttatcaccctaacatgcctgacgcttttttgacctgcgagacagttatatttgcttgggctatcggaggagagggcttcagttacccgccgcacgttggcctgtccctcggaactccattggacccccactacgtgctgctagaagtgcattatgataaccctacatatgaggaaggtcttattgataactcagggctcagacttttctacacaatggacatccggaagtacgacgccggcgtgatcgaggccgggctctgggtttcactattccatacaattccgcccgggatgcccgaatttcagtccgagggacactgtaccctcgaatgcctggaggaagctctagaggccgagaagccttcaggtatccatgtatttgctgtgcttttgcatgcacacctggccgggcgtgggatccggttaaggcacttccgtaaaggtaaggagatgaagttacttgcttacgatgatgattttgatttcaactttcaggagtttcaatacctaaaggaagagcagaccattctgccaggtgataacctcatcaccgagtgccgttataacaccaaagacagggcggagatgacatggggagggctatccacccggtccgagatgtgcttatcgtacctactgtattacccccgcatcaatctcaccagatgcgcaagtatccccgacatcatggaacagctccagttcattggggtgaaggaaatctaccgtcccgtcactacctggccgtttatcattaagtcgcctaaacagtacaagaatctctcattcatggacgcgatgaacaaattcaagtggactaaaaaggaaggcttatcctttaacaaactggttctcagcctaccagtcaatgttcgctgctcgaaaacagacaacgcagagtggtccatccaagggatgactgcactcccccccgacatcgagcgtccatataaagcagaacccctcgtatgtggaacatcgagctcgagttccctgcacagggatttttccattaaccttcttgtctgcttactactcctgtcctgcacactctctactaaatcactttag

SEQ ID NO: 124864 - DNA, 1023 bp, synthetic construct
  misc_feature 1..1023: note = Description of Artificial Sequence: Synthetic coding sequence
  source 1..1023: mol_type = other DNA
atgtccgagctggaacagctccggcaggaggcagagcaacttcgcaatcagatccaggatgcaaggaaggcctgtaacgacgcaacactggtacagatcacctcgaacatggacagtgtggggagaatacaaatgagaacaaggagaaccctcaggggtcacctggccaagatttatgccatgcactggggctacgacagtcgtctgctcgtgtcggcaagccaggacggcaaactcattatctgggattcctacaccacaaacaagatgcacgccatcccactacgttcttcatgggttatgacgtgtgcctatgccccttctggcaactatgtggcctgtgggggactggacaacatttgttctatatataatctgaaaactcgagagggcaacgtgcgagtgtcccgcgagctaccggggcacacagggtacctctcctgttgccggtttctggacgattcgcagatcgtgaccagttcaggtgacacaacctgcgccctctgggatatcgagacagctcagcaaaccaccaccttcaccgggcacagtggagacgtgatgagcctctcattgagccccgacatgcgaacatttgtgtctggcgcttgcgacgctagttcaaagctctgggacattagagacggtatgtgtcggcagtccttcacgggtcacgtgtcagatatcaacgccgtatcattcttccccaacggatacgcattcgcgactggatctgatgatgcgacatgtcgcctctttgacctgcgcgccgaccaggaactgctgctgtattcacatgataatattatttgcggtattaccagcgtggccttcagtaaatctgggagactcttactggctggttatgatgatttcaattgcaacgtgtgggatactctcaaaggggaccgagccggcgtcctcgctggtcacgacaatcgggtatcatgtctgggggtcaccgacgatggcatggctgttgctaccggaagctgggattcattccttagaatctggaactag

SEQ ID NO: 124865 - DNA, 1089 bp, synthetic construct
  misc_feature 1..1089: note = Description of Artificial Sequence: Synthetic coding sequence
  source 1..1089: mol_type = other DNA
atggctcccaagcaggatccgaaaccaaaattccaggagggggaaagagtcctctgtttccacggccccctcctttacgaggccaaatgcgtcaaggttgctatcaaagataaacaggtcaaatatttcatccactattcaggttggaataagaaatcggccgtacggcctagacggtctgagaagagccttaaaacccacgaggatatcgttgccctgtttcccgtgcccgaaggagctccatccgttcatcaccctctcctgacctcctcctgggatgagtgggtccctgagagccgggtactcaaatacgttgatactaacctgcagaaacaacgggaactgcagaaggcaaaccaggaacagtatgcagagggcaagatgaggggcgccgcaccaggtaaaaaaacgagcggcctgcagcagaagaacgtcgaggtgaaaaccaagaagaataaacaaaagactcctgggaacggcgacggagggagcacttcagagactccacagcccccaagaaagaagcgcgcaagggtggaccccactgtagaaaacgaggagacgttcatgaatcgggtggaggtcaaagtcaaaattcccgaggagctgaaaccctggctcgtggacgattgggaccttatcaccagacagaaacagctcttttacctacccgccaagaagaacgtagattcaatcctggaagactatgctaattataagaaatccagaggcaataccgacaataaggaatacgccgttaatgaagtggttgcaggaattaaggagtatttcaacgtgatgctggggactcagctgttgtataagttcgaaaggccacagtacgccgagatcctggcagatcatcccgacgcgccaatgtcgcaagtgtacggcgccccgcatctgcttaggctgttcgttagaatcggcgcaatgctggcctatactccgcttgatgagaaaagtctggccctcttactgaattacttgcacgatttccttaagtacctagcgaaaaatagtgctaccttgttcagcgcatcagactatgaggtggcccctcccgagtatcacagaaaggctgtgtag

SEQ ID NO: 124866 - DNA, 1047 bp, synthetic construct
  misc_feature 1..1047: note = Description of Artificial Sequence: Synthetic coding sequence
  source 1..1047: mol_type = other DNA
atgattccttttccacaccctcaggtgactgacgcgctgggccgatacagcaactacattctctcaagcactgtcgaatctccctcgttgcgatccatgaattttgaaaagcagggagaacgcgtcctgtgcttccatggtcccttgctttacgaggccaagtgcgtgaaggtcgccatcaaggataaacaggtgaaatacttcatccattattctggttggaacaagaattgggacgagtgggtgcccgagtcaagggtcctgaaatacgtcgatacaaatttacagaagcagagggagctccaaaaggcaaaccaagagcagtatgccgaagggaaaatgcggggagcagcccccggtaaaaagactagcggccttcagcaaaagaatgtcgaagtcaaaacaaagaagaataagcagaaaactccgggaaatggcgatggagggagtactagcgaaacaccgcagccaccccgaaaaaagcgcgcgcgagtggatcccaccgttgaaaacgaagagacatttatgaatagagtcgaagtgaaggttaagattcccgaggaactgaaaccttggctggtcgatgactgggaccttataacccgacagaagcagcttttctatttacccgcaaagaagaacgtcgattccatcctggaggactatgccaactacaaaaaatctaggggtaacaccgataataaggaatatgccgtcaacgaggtggtagcagggatcaaagaatatttcaatgtgatgttgggaacccaactgttatacaaatttgaaagaccccagtacgctgaaatactggccgaccatccagatgctcccatgagtcaggtgtacggtgctccacatctgctacgcctgtttgttcgcatcggcgcaatgctcgcctacacaccccttgacgaaaagagcctggctctgttgctgaactacctgcacgacttcctgaagtaccttgccaaaaactctgcaaccctgttctccgcgagtgattacgaggtagcacccccagagtatcatagaaaggcggtgtag

SEQ ID NO: 124867 - DNA, 972 bp, synthetic construct
  misc_feature 1..972: note = Description of Artificial Sequence: Synthetic coding sequence
  source 1..972: mol_type = other DNA
atggctccaaagcaggaccccaagccaaagtttcaggagggagaaagagtcctgtgtttccatgggcctctgctgtatgaagctaaatgcgttaaggtggccatcaaagataagcaggtgaaatactttatacactattcagggtggaacaagaattgggatgagtgggtgcctgagagtagagtgctgaagtacgtcgacaccaacctgcagaaacaaagggaactccaaaaagccaatcaggagcagtacgccgagggcaaaatgagaggagccgctccggggaagaagacatctggattacagcaaaagaatgttgaggtcaagactaagaaaaacaaacaaaagacccctggcaatggcgacgggggcagtactagcgaaacaccgcagcctccccgaaaaaaaagggcccgtgtggacccgacagtggaaaatgaagagacatttatgaaccgggtggaggtgaaggttaagatccccgaggaattgaaaccttggttagtagatgattgggatctcatcacgcggcagaaacagctgttctatctacctgctaagaagaatgtggactctattctggaggactatgcgaattataagaagagtagaggcaacaccgataacaaagaatacgctgtaaatgaagttgtggccggaattaaagaatattttaatgtcatgctaggcacccaactgctctataaattcgaaaggcctcagtatgccgagattctcgcagatcatcccgacgccccaatgagccaggtatatggtgcgcctcatctgctgaggctttttgtacggattggagccatgctggcttacacgccacttgacgaaaagagtctcgccttgctgcttaattacttacacgattttctgaaatatctggctaaaaactctgctacactgttcagcgcctctgattatgaagtggcgccaccagaatatcaccggaaagcagtgtag

SEQ ID NO: 124868 - DNA, 708 bp, synthetic construct
  misc_feature 1..708: note = Description of Artificial Sequence: Synthetic coding sequence
  source 1..708: mol_type = other DNA
atgagaggcgctgctcccggaaaaaagacctccggccttcagcaaaaaaacgtagaggtcaagacaaagaaaaacaagcagaagacaccagggaacggcgatggcggctcaacttctgaaacaccccagccgcctcgaaaaaaacgggcccgggttgaccctactgtcgagaatgaggaaaccttcatgaatagggtggaggtgaaggtgaagattcccgaagaactgaagccatggttggttgatgattgggatcttatcactagacagaaacagctgttttaccttcccgccaagaagaatgtggactccatcctcgaagattacgcaaattacaaaaagagccgaggaaacactgataacaaggagtatgcagttaacgaagtggtagcagggatcaaagagtatttcaacgtgatgctgggcacgcaactactctataaatttgagagaccccaatacgccgagatcctcgcagaccaccccgatgcccctatgtcacaggtttacggcgctccccatttactgagactcttcgtgagaataggagctatgctggcctacacgcctctggacgaaaagtctctagccctgctgctgaattaccttcacgactttttgaagtatcttgcaaaaaactcagccaccctgttctctgcctccgactatgaggtggcccctccagagtaccaccgaaaggccgtctag

SEQ ID NO: 124869 - DNA, 708 bp, synthetic construct
  misc_feature 1..708: note = Description of Artificial Sequence: Synthetic coding sequence
  source 1..708: mol_type = other DNA
atgcgtggagccgctcctgggaagaaaactagcgggctgcagcagaagaatgtggaagtgaagactaagaagaacaagcagaaaacacctggcaatggagacggcggttccacgagtgagactccccagcctcccagaaagaaacgcgctagagttgaccccacagtggagaacgaagaaacctttatgaatagagttgaagtgaaggtgaaaatacctgaagaattaaagccctggctagtcgacgactgggatttgattacacgacaaaaacagctgttctacctccccgccaagaaaaacgtggactctatcttagaggactacgcaaattacaagaagtcacgaggaaacaccgataacaaggagtatgcggtgaatgaggtcgtggcaggcattaaggaatactttaacgtaatgttgggtacccagctgctctacaaattcgaacgccctcagtacgctgaaattttggcagaccaccctgatgcaccaatgtcccaggtgtacggggcccctcatttactaaggctctttgtgaggatcggagctatgctcgcctatacaccactcgacgagaaatcactcgctttgctgttgaactaccttcatgactttctgaagtacttggccaagaattccgccacactgtttagcgcaagtgactatgaggtcgcacccccagagtatcacaggaaagccgtgtag

SEQ ID NO: 124870 - DNA, 345 bp, synthetic construct
  misc_feature 1..345: note = Description of Artificial Sequence: Synthetic coding sequence
  source 1..345: mol_type = other DNA
atggtttcccgcaaagccgtcgcggcacttcttgtcgtgcatgtagcagctatgctggcttcccagacagaagcctttgttcctatattcacctacggagaattgcagcggatgcaggagaaagagagaaataagggccagaagaagtctctgtccgtgtggcaaagatccggcgaggaaggccctgtcgacccggctgagcccatcagggaggaggagaatgaaatgatcaagctgacagccccactggagatagggatgaggatgaattcaaggcagctggaaaaataccccgcaacactagagggtcttctatctgaaatgctgccacagcacgccaagtag

SEQ ID NO: 124871 - DNA, 348 bp, synthetic construct
  misc_feature 1..348: note = Description of Artificial Sequence: Synthetic coding sequence
  source 1..348: mol_type = other DNA
atggtcagccggaaggcggtggccgctctgctggtggttcacgtcgcagcaatgttagccagccaaactgaggcctttgtccccatctttacatacggcgaactgcaacgcatgcaggaaaaagagcggaataaaggccagaagaagtccctaagtgtttggcagcggagcggcgaagagggacccgtggaccccgctgaaccaatccgggaagaggagaatgagatgatcaagctgacagcacccctggaaattggcatgcgtatgaacagtagacagctggaaaagtaccccgcgacactggaaggactgcttagcgaaatgcttcctcaacatgcagcaaaatag

SEQ ID NO: 124872 - DNA, 327 bp, synthetic construct
  misc_feature 1..327: note = Description of Artificial Sequence: Synthetic coding sequence
  source 1..327: mol_type = other DNA
atggtcagtaggaaggctgtggccgcccttttggtcgtccatgtggccgctatgctggcgtcccagactgaggcctttgtgccaattttcacctacggagagttacagcgcatgcaagaaaaagaacgcaataaaggacagaaaaagtccctttccgtttggcagaggagcggtgaggaggggccagttgaccctgctgagcccatccgggaagaggagaatgaaatgattaaactaaccgctcctttagagattggaatgcgcatgaactcccggcagttagaaaagtatcccgcaactctagaagggctgctgacagccaagtag

SEQ ID NO: 124873 - DNA, 1011 bp, synthetic construct
  misc_feature 1..1011: note = Description of Artificial Sequence: Synthetic coding sequence
  source 1..1011: mol_type = other DNA
atggctagaaggagatcccagagggtgtgcgcctcagggccatcgatgttgaactctgcccggggggcccccgagctcctgcggggcacagccacaaatgccgaggtgagcgctgccgccgccggggctaccggctcagaggagctcccaccaggagaccgcggctgtagaaatggagggggcagggggcctgccgctacaactagttcgaccggagtggcagtgggggcagaacacggcgaagactcactcagccggaaaccagatccagagcccggccgtatggatcaccatcagcctgggacgggccgctaccaggtgctgctgaacgaggaagataactcagagtccagcgcaatcgagcagccccccacctcaaatcctgcaccccagattgtgcaggctgcctcatctgctccagcactcgagaccgatagcagtccaccaccctattcctctattacagttgaagttcccacaacctcagatacagaggtttacggcgaattctatccagttcctccgccctacagcgtagcaaccagtttgccaacatacgatgaagctgaaaaagccaaagccgcagcaatggcagcagcggctgccgagaccagtcagcgaattcaagaagaggagtgtccgccaagagacgacttctctgacgccgatcaattacgagtgggcaatgacgggattttcatgcttgctttctttatggcttttattttcaattggctaggcttctgcttgagtttctgtattactaacacaatcgccggtcggtatggtgcaatttgtggatttgggctgtccttaatcaaatggatcctcatcgtcagattttccgattactttaccggctattttaacggccaatactggctatggtggatcttcttggtgctgggccttttactgttctttaggggatttgtgaactacttgaaggtcaggaatatgtcagaatcaatggccgctgcccaccgtacacgctacttctttcttctgtag

SEQ ID NO: 124874 - DNA, 1161 bp, synthetic construct
  misc_feature 1..1161: note = Description of Artificial Sequence: Synthetic coding sequence
  source 1..1161: mol_type = other DNA
atgggctcgccttggaatggatcagatggccctgagggggctcgcgagcccccctggcctgcactccctccatgcgatgaacggcggtgctctccttttccccttggtgcccttgtgcccgttactgccgtttgcctctgcctgtttgtggtcggagtgtccggcaacgtagtgactgttatgctcattgggcggtatcgcgacatgcgtaccaccacaaacctgtatctggggtctatggcggtatccgatctgcttatactcctcggtttgcccttcgacctttaccggctctggcggagcaggccgtgggtgttcgggccactgctctgtcggctcagtctctacgtgggcgaaggatgcacatacgccaccctgctccatatgaccgctctgagcgttgagagataccttgccatatgtagacctttgcgggccagagtcctggtcactaggcggagagtgcgcgccctaatcgcggttttgtgggccgtggcactactgagtgcgggcccttttttgtttctggtaggagtggagcaggatccaggaatcagcgtcgtccctggtttgaatggaactgctcgcatagctagcagcccactggcctcctccccccccctctggctctcacgggcgccacctccctcccctccatccggtccggagacagccgaagccgctgctctgttttctcgtgagtgtcgcccctccccagcccagctgggcgccctaagggtaatgctctgggtgaccaccgcctactttttcctgccattcctgtgtctcagcatcctctacggactaatcggaagggagctttggtctagcagaagacccctgcggggccctgccgcctcaggtcgcgagcgcgggcaccgccagacagtccgcgttcttcggaaatggtcccgacgcggatccaaagatgcatgcctccagtccgcccctccagggacagcacaaacacttggcccacttcctttgctggctcagctttgggcgccacttccagcccctttccccatcagcattcctgcctccacgagacggggagggggcagcggaatttacaacctgctggtagctctgcctagatggcagaaccacctccataaacacggccgtttcgccgacgatgtcttattatctgtgctgtag

SEQ ID NO: 124875 - DNA, 1206 bp, synthetic construct
  misc_feature 1..1206: note = Description of Artificial Sequence: Synthetic coding sequence
  source 1..1206: mol_type = other DNA
atggaaaaaagcaaaaattttaggatcgatgcattgctggcagtggacccacctcgagcagcatcggcccagagtgctcccctcgcattggtaacatccctggctgcggcagccagcggcacaggggggggaggaggtggcggaggtgccagcggagggacctccggcagttgcagtcccgcgtctagcgagcctccagcagcaccagccgatcgtctgagggctgaaagtccatcccccccgaggctgctggccgctcactgcgctttactaccaaagcccggctttctaggggccggggggggtggggggggcaccgggggggggcatggtggaccacatcaccatgcacaccccggcgctgctgctgctgcagctgccgcggccgctgccgctgccgctgggggactcgccctgggtttgcaccccggtggtgcccagggaggcgctggcctcccagcccaggcggcattgtacggacaccctgtgtacggttacagtgcggccgctgcagccgcagcattggccggtcaacaccctgctctgagttattcataccctcaagtgcagggggcacacccagcccaccccgcggaccctattaagctgggggctggcacctttcaattggaccaatggctgagagctagtacagctgggatgatactgcctaagatgcctgatttcaacagtcaggctcagtccaatttattaggcaagtgtcggcgccccagaacagcgtttaccagtcaacagctattggaacttgaacatcagtttaagctaaacaagtacctcagccgccccaaaaggtttgaggttgccacctcgctgatgctgaccgagacacaagtgaaaatttggtttcagaaccgacgcatgaagtggaagcggtccaaaaaagctaaggagcaggcagctcaggaggcagagaagcagaagggcgggggcggaggggccggaaagggtggggcagaagaaccaggtgcagaggaactgctgggtcctccagccccgggggacaaggggtcaggaagacgcctccgagatctcagggacagtgatccggaagaggacgaagacgaagacgacgaagaccattttccctatagcaacggggcgagtgtgcatgcagcaagtagcgactgctcatcagaggacgactctcctcctcctcgcccgagtcatcagccggccccgcaatag

SEQ ID NO: 124876 - DNA, 696 bp, synthetic construct
  misc_feature 1..696: note = Description of Artificial Sequence: Synthetic coding sequence
  source 1..696: mol_type = other DNA
gccgcagctgcgctggctgggcagcacccagcgctgagttactcctatccgcaggttcagggcgcgcatcctgcacaccccgccgatcccatcaaactgggcgctggcacgtttcagttagaccagtggcttagagcaagcaccgcagggatgatcctgcctaagatgccagactttaattctcaagcccagtcgaaccttctgggaaaatgtcggcggccccgcacagcgttcacctcacagcaattgcttgagctggagcatcagtttaagctcaacaaatacctgtcaaggcctaaaagattcgaggtcgctaccagcttgatgctcacagaaacgcaggtgaagatctggttccagaatagacgtatgaaatggaaaaggtccaagaaggcgaaggagcaagcagcccaggaggccgagaaacagaaggggggcggcgggggggccggtaaggggggtgcggaggagcctggcgccgaagaactgctcggaccccccgcccccggggacaaagggtctgggagaaggctgcgtgacctgcgagactcagaccctgaggaggatgaagatgaagatgatgaagatcatttcccatactccaatggggctagcgtacacgccgcctcctcagattgttcaagtgaggatgactctccaccaccaaggccttcacatcagccagccccgcaatag

SEQ ID NO: 124877 - DNA, 570 bp, synthetic construct
  misc_feature 1..570: note = Description of Artificial Sequence: Synthetic coding sequence
  source 1..570: mol_type = other DNA
atgggcggtctgagcactgtaggagcatgtcccggtatcctaggagcgcagcaggcccaggcccagagtaacctgttaggtaaatgccggaggcccaggaccgctttcacctctcagcagttattagaactggagcaccaatttaaattaaacaagtacctgtcccgccctaagcgtttcgaggttgccacaagtttgatgttgactgagacccaggtaaaaatttggttccagaataggcggatgaagtggaaaaggagcaaaaaagctaaggaacaggccgcacaagaagctgagaaacagaaaggcggcggcggaggcgctggcaaaggcggagcggaggaacctggtgccgaagaacttttgggccccccagcacctggtgataagggcagcgggcgacgtcttagggatctgcgcgattccgacccagaggaggacgaggatgaagacgatgaggaccatttcccttatagcaatggggcctcagtgcacgcggcgagttcggattgttccagcgaggatgactcccccccaccacgcccatctcatcagcccgcaccacagtag

SEQ ID NO: 124878 - DNA, 1692 bp, synthetic construct
  misc_feature 1..1692: note = Description of Artificial Sequence: Synthetic coding sequence
  source 1..1692: mol_type = other DNA
atgccctctaaatttagttgtcggcagctgcgtgaagcaggccagtgttttgagtctttcctggtggttaggggcctcgacatggaaaccgatagggaaagactcagaactatttacaacagagacttcaagatcagtttcggtacccctgctccagggttcagctctatgctgtacggcatgaagatagccaatctggcgtatgtgacaaaaacacgtgtgaggttctttcgtctcgaccggtgggcggacgttagatttcccgaaaagcggcgtatgaagctcgggagcgatatttctaagcaccataaaagtctgctggccaagatcttttatgacagggccgagtacctgcacggaaagcatggtgtcgacgttgaggtccaggggcctcatgaggctcgggacggtcaactgctcatccggctggaccttaatagaaaggaggtgctcaccctccgccttaggaacggaggaacacagtctgtaacccttacccacttattccctctgtgtaggaccccgcagtttgctttttacaacgaggatcaagagctgccctgtcccctgggacccggggagtgctacgaactacacgttcactgtaagacatcgtttgtggggtactttcctgcaactgtgctctgggaactcctgggcccaggagagagtggttctgagggagccggcaccttttacatagctcgcttcctggcagccgtcgcacacagccccctagcagcccagctgaaaccaatgacaccatttaagcgcacgaggatcactggaaatcctgttgtgacaaatagaatcgaggaaggtgagaggcctgaccgtgctaaagggtacgacctggaactctcaatggcactgggaacctactatcctccgcctagactgcgccaactcttgccaatgttgctgcaggggacatccattttcactgcacccaaggaaattgccgagatcaaggcccagcttgaaacagctctgaagtggcgcaattatgaggtaaagctgaggctccttctgcaccttgaagagcttcaaatggagcacgatattcgacactacgatctggagagcgtgcccatgacctgggatccggtggatcagaatccacgactgctgaccctggaggtgcctggggtgaccgagtcacgcccatccgtactcagaggtgaccacttatttgccctgctttcttcagagacccaccaagaagatccgattacgtacaagggatttgttcataaagtggaactcgatcgggtcaaattatcctttagcatgtcactcctcagccggttcgtggacggactgacattcaaagtgaactttactttcaataggcagccgctccgggtgcaacacagagccctggaactaaccggaagatggctgctttggcccatgctgttccccgtggctcctagggatgtgccattgctgccatcagacgtgaagctcaaactgtacgatcgctctctggagagcaatcccgaacagttacaggctatgaggcacattgtgacaggaacaactcgaccggctctgactgcgtgcttgaccctgaaccagaatcccgccgaacttcccctgcaaggcacggggcgcctcggcgaaggcgtgtacaacccctcgcatagcaccccgtcccccgcaggtgagaacgacacctcttcctgttag

SEQ ID NO: 124879 - DNA, 3012 bp, synthetic construct
  misc_feature 1..3012: note = Description of Artificial Sequence: Synthetic coding sequence
  source 1..3012: mol_type = other DNA
atgccttccaaattctcatgccgccagttgcgggaggccgggcagtgttttgagtcctttctggtggtgaggggcctggacatggaaaccgatagggagaggctcaggacaatttacaacagggactttaagataagctttggcacccccgcccccggattctcctcgatgttgtatgggatgaaaatcgcgaatctggcatacgtgactaaaactcgggtacggttctttcggctcgacaggtgggcggacgtgcgttttcctgagaaacgtagaatgaaactcggtagcgacatatcgaagcatcataagtctctcctcgccaaaatcttctacgatagagccgagtatttgcatggtaaacatggggtggacgtcgaagtccagggcccccacgaagctcgggatggacagctcttgatacgcctggatttaaatcgcaaggaagtccttactttacgactccgcaatggtggcacacagtccgtgactcttacccatttgttccccttgtgccggactccccagtttgcattttacaatgaggatcaggagctgccctgtccgctcgggcccggggaatgctatgagttgcacgtacactgtaagacaagcttcgtaggttatttccccgcaaccgtgctgtgggaactcttagggccaggcgaaagcgggagcgaaggtgccggtactttttatatcgcccgattcctggccgctgtcgcccatagccctctggcagcccagctgaaaccgatgaccccctttaagcgcacgcggataactggtaaccccgtggtgaccaacagaattgaagagggggaaagaccagaccgagccaaaggatacgacctggagctaagcatggcgctcggtacctattatccacccccacgcctccggcagcttctccctatgctgctccagggcaccagtatcttcacagcacctaaggaaatcgcagaaattaaagcccagcttgaaacagctttaaaatggcgcaactacgaggttaagcttcgacttctgctccacctcgaagagttacagatggagcatgacataaggcattacgacctggagagtgtgccaatgacgtgggaccccgtagaccagaatcctagacttctgacgctcgaggtccctggggttacggagagtcggccctcagtcctgcggggcgaccatctgtttgctctgctgagtagtgagacccatcaggaagatcctattacttacaaggggttcgtccacaaagtcgaattagacagggtaaagctgtctttcagcatgtcgctgctcagtaggttcgtagatgggcttaccttcaaagtgaatttcacattcaaccgccaacccttgcgtgtacagcaccgagccttggaacttacaggtcgatggctcctttggcccatgctattcccagtggcccccagagacgtccccctgctgccatcagacgtgaagcttaagttgtatgacagatctctcgagagtaaccccgagcagttacaggctatgagacacattgtgactggaacaacccggcccgccccgtacataatctttggcccccctggtacgggaaagacagtaactctcgtagaggcgattaaacaggtggtaaaacatctaccgaaggcgcatattttagcctgtgctccgtccaatagcggcgctgacttactgtgccagcgacttagagtccacctgcccagcagcatctaccggttattggcgccatccagagacatccggatggtgcccgaggatataaaaccctgttgtaactgggacgctaagaaaggcgagtatgtgttccctgcgaaaaagaagctacaagagtacagagtgctgatcactacactcattacagccggacgtttggtgagtgcccagttcccaattgaccacttcacacacatcttcattgatgaggcaggacactgtatggaacccgagtcactggtggcaatcgcaggtttgatggaggtaaaagagacgggtgacccaggtggacagctagtattggccggcgacccaagacagctgggccctgtgctgagatccccactcacccagaagcatggtctaggatattcactcctggagaggctacttacatataatagcttgtacaaaaagggtcctgacggctatgatccacagttcatcaccaaactgctgaggaattatcggtcgcacccaacaatcctcgacatccccaaccagctctactatgagggcgagctgcaagcttgcgcagacgtggtggatcgagaacgcttttgccggtgggctggcctccccaggcagggtttcccaataatattccatggtgtgatgggcaaggatgagagggaaggtaattccccctcgttcttcaacccagaggaggcagctacagtaaccagctatctcaaactgttgctcgctccaagcagcaagaaggggaaggcaagactgagccctagatctgtgggtgtgatcagcccttaccgcaagcaggtggagaagattcgctactgtattactaaattagaccgcgagcttagaggcctggatgacataaaggacctgaaagttggctccgtggaggagtttcaaggccaggagaggtcagtgatacttatttctactgtgcgctccagtcagtcttttgttcaactggatcttgacttcaatcttggttttcttaagaatcctaagagattcaatgttgccgtcaccagagcaaaggcactgctgatcatagttggaaaccctctgcttttgggccacgacccggattggaaggtctttctcgagttctgtaaggagaacggcgggtatacaggctgtccattcccagcaaagctcgacctgcaacagggtcaaaacctccttcagggcctgagtaagttgagcccttctacctccgggccccactcccatgactatttgccacaggaacgagagggggagggaggattaagcctccaggtggagcctgaatggcggaacgagctctag

SEQ ID NO: 124880 - DNA, 2844 bp, synthetic construct
  misc_feature 1..2844: note = Description of Artificial Sequence: Synthetic coding sequence
  source 1..2844: mol_type = other DNA
atgctgtatggaatgaagatcgcaaacctggcgtacgtgacaaaaacaagagttaggtttttccgactggaccgttgggcagacgtgaggttccccgaaaaacgaaggatgaagcttggtagcgacatctcaaaacatcacaagtcgctgctcgccaaaatcttctacgatcgcgccgagtatctgcatgggaagcatggagtcgatgtcgaggtgcaagggcctcatgaagccagggacgggcagttgttgattaggcttgatcttaatagaaaggaggtgctgaccctgaggctgaggaatggcgggactcagtccgtgaccctgactcaccttttcccgttgtgcagaaccccccagttcgctttctacaacgaggaccaggagttaccttgccccctgggtcccggtgagtgctacgagctgcatgtgcattgtaaaactagcttcgttggatacttccccgcaacggtgctctgggagctcctcgggcctggggaatctgggtccgaaggcgccggaaccttctatatcgcgcgcttcctggccgctgttgcgcattcacccctggcagcacagctgaaacctatgacacccttcaagcggacacggatcaccggcaaccctgttgtcaccaaccgcatcgaggagggcgaacgccccgatcgtgcaaaagggtatgacctcgagctatcaatggctcttgggacttattacccaccgcccagactccggcaactgctgcctatgttactacaggggacttcaatttttaccgctcccaaggaaattgcggaaattaaggcccagctggagacagcactgaagtggaggaactatgaggtcaagctgcggcttctccttcatctcgaggagctgcaaatggaacacgatatacgccactacgatctggagtccgtacctatgacctgggatcctgtggaccaaaaccccagacttttgacactggaagttccaggggtcacagaatctcggccatccgtgctgcgcggagaccacctatttgccttgttgagttccgagactcaccaggaagaccctattacttacaaggggtttgtccacaaagtggagttagacagagttaaactctcattttcaatgtcccttctcagtaggtttgtggatggacttacatttaaggtcaacttcactttcaaccgacagcctcttcgagtccaacacagagctctcgaattaaccgggagatggctcctatggcccatgttgtttcctgttgctccacgggatgttcctctgctcccaagcgatgttaaattaaagctctatgacagatcactggagtcaaacccagaacagcttcaggcgatgcgtcacatcgtgaccggcacaaccaggcccgcaccatacataattttcggcccgcctgggacgggaaagactgttaccttggtagaagctatcaaacaggtggtaaagcacctgccaaaagcccatatcttggcttgtgctcccagcaatagtggcgccgatctgctgtgtcaacggctccgggtccatctgccaagttcaatctacagactgctagcccccagccgtgacattcgaatggtcccagaagacatcaagccctgttgcaattgggacgctaagaagggggaatatgtgtttcctgcaaagaaaaaactccaggagtatcgtgtcctgatcactacactaatcacagctgggcgattggtgtctgcccagtttcccatcgaccactttacccatatttttatcgatgaagccgggcactgtatggaaccggagagtttggttgcaatcgccggactaatggaagtaaaagaaaccggcgaccctgggggccagctcgtgctggccggagatcccaggcagttaggtccagtcttacgaagccccctgactcagaagcatggtctcgggtactctctgctggagagactgctgacatataactctctgtacaaaaagggcccagacggatacgatccacaatttattaccaagcttctgcggaactaccggagtcaccccaccatcctggatattcctaaccagctgtactatgaaggtgagcttcaggcatgcgccgacgttgtcgatcgggaacggttctgtcggtgggccggattgccccgacagggctttcccatcattttccacggtgtgatgggcaaagacgagcgcgaggggaactccccatcattctttaacccagaggaggccgcgaccgttacgtcctatctgaagttgttgctagctccaagttcaaagaagggaaaggccagactaagcccacggagcgtcggggtcatcagcccctatagaaagcaggtggagaagattcggtattgcatcaccaaactggatcgggaactgaggggtcttgatgatattaaggacttaaaggttgggtccgtcgaggagttccagggacaggagcgtagcgttatcctaatctcgactgtgagaagcagtcagtcattcgtccagctcgatctcgacttcaacttgggttttctaaagaatcctaaacgattcaatgtggcagtaactcgtgcgaaggctcttctgataatcgtcgggaatcctctgcttttaggacacgatccggattggaaagtttttcttgaattctgtaaggaaaatgggggctataccggctgtcccttccccgctaagctcgatctccaacaaggtcagaacctgctgcagggtctgtctaaactgtccccctcgacgtcagggcctcatagtcatgattacctgccccaagaacgggaaggcgaaggcgggttgagcctacaggtcgagccagaatggcgcaacgagctgtag

SEQ ID NO: 124881 - DNA, 3012 bp, synthetic construct
  misc_feature 1..3012: note = Description of Artificial Sequence: Synthetic coding sequence
  source 1..3012: mol_type = other DNA
atgccgtccaagttcagctgccggcagcttagggaagccggccagtgcttcgagagtttcctagtcgtccgtggtctggacatggaaaccgaccgcgaaagattacggacgatctataatcgggactttaagattagtttcggcactcctgctcctggattttctagtatgctgtatgggatgaaaattgcaaatctcgcctacgtcactaagactcgggttaggtttttccgcctagaccgctgggcagatgtgcgctttccagagaagagaaggatgaagctaggctcagacatttccaagcatcacaagagtctcctggctaagattttttatgaccgggccgaatatctgcacggtaaacatggagtggacgtagaagtgcaggggccccatgaagctcgggacggtcagctgctgatacgtcttgacttgaacaggaaggaagtgttaacattgcgtctccgaaatggtggcacacagtccgttacccttacccatctctttcctctctgccgcacccctcagttcgctttttataatgaggaccaagagttgccttgccccctgggaccaggagagtgctacgagctgcatgtacactgcaagacaagcttcgttgggtacttccccgccaccgtcttgtgggaactcctgggccccggtgaaagcggcagcgaaggcgctggaaccttctatatcgctcgattcctcgcggctgtggctcattcgcccctggctgcacagctaaaacctatgacccctttcaagcgtactaggataactgggaacccggtggtgacgaacaggatcgaagagggggagcgccccgacagggcaaagggctacgatctggaactttcaatggctctggggacgtattatccccctcctaggcttagacagctgctgccgatgctgctgcaaggcacatccatttttaccgcgcctaaagaaatcgccgagattaaggcacagttagaaacagccctgaagtggaggaactacgaagttaagcttcggctcctgctccacctggaggagctgcagatggaacacgatatacggcactacgatctcgagagtgtgcctatgacttgggaccccgtggaccagaatccccggctactaacattagaggtgcccggagtcacagagagcaggccttccgtgctccgcggtgaccatctgtttgctcttctgtcaagcgagacacaccaggaggacccaattacctataaaggcttcgtgcataaagttgagctggatcgagttaagctaagcttttccatgtcactcctttcgcgttttgtggacggactgacttttaaggtgaacttcactttcaaccggcagccactgagggtacagcatcgcgcactcgaactaacaggccgatggcttctgtggcccatgctgtttcccgtggcccctcgagacgtgccactgctacccagcgacgttaaattgaaattatacgatcgatcgctggagagcaatccagagcagttacaggccatgcggcatatagtcactgggacaactaggccagccccgtacattatattcggaccacctggaacaggaaagactgtgactctggtggaggccatcaaacaggtcgtgaaacatctccctaaggcccacatcttggcatgcgctccctcaaacagtggggccgacctgttgtgccagagactgagagtacatctcccaagctccatctacaggctgttggctccctctagggacatcagaatggtgccagaggatataaaaccctgttgcaattgggacgccaaaaagggggagtacgtgttccccgccaagaagaaactgcaagaatatcgcgtcttgattactacgctgatcacagcaggacgtttggtcagcgcacagtttcccattgatcactttacccacattttcattgacgaagccgggcattgcatggagcccgagtctctcgtagccatagctgggcttatggaagttaaggagaccggtgacccagggggtcagctggttctcgcaggggaccctcggcagctgggacccgtgctgagatctccgctgacacagaagcacggtctgggatatagcctcctggagcgattgcttacctataactctctgtataagaagggccctgacggatacgacccgcagttcatcaccaaacttctccggaattatcgctcacaccccacaattctggacatcccgaaccagttatactatgaaggagaactgcaggcctgcgcagatgttgtggacagagaacggttttgtcgctgggccggtcttccacgccagggttttccaattatctttcacggcgttatggggaaagatgagagagaaggtaacagcccctcattcttcaacccagaagaggccgccactgtcacctcctatctgaaattgcttctggctccgagcagcaaaaagggcaaggcacgtttatcaccacggtcagtcggtgtcattagcccataccggaagcaggtggaaaagatacggtattgtattaccaagcttgatagagaacttcgcggacttgacgacatcaaggatctgaaggtcggctccgtcgaggagttccagggccaggaaaggagtgtgattctgataagcacggtgaggtcctctcaatcgtttgtccagctggacttggatttcaacttgggtttcttaaaaaatccgaagcgttttaacgtcgcagtcacgcgggccaaggcccttctcatcattgtggggaacccactcctgcttggccatgaccctgactggaaagtgtttctggagttctgtaaagaaaacggcgggtatactggatgcccctttcctgcaaagctggacctgcagcaggggcagaatctcctgcagggacttagtaagctgtcaccgagcacaagtgggccccactcccacgactatttgcctcaggaacgtgagggagaaggcggtctaagccttcaggtggagcccgaatggcgaaatgagttgtag

SEQ ID NO: 124882 - DNA, 2826 bp, synthetic construct
  misc_feature 1..2826: note = Description of Artificial Sequence: Synthetic coding sequence
  source 1..2826: mol_type = other DNA
atggagactgaccgggaacggctgagaaccatctacaatagggatttcaagatttcctttggtacccctgctcccggcttttctagcatgttatacggaatgaagatcgctaaccttgcgtacgtgaccaagacccgcgtgcggtttttcaggcttgacaggtgggccgacgtgagattcccagaaaaaagaaggatgaaactgggatctgatatatccaaacaccacaaaagtctgctcgctaagattttttatgatagagccgagtacctgcatgggaagcacggtggtacccagtcggtcacactgacacacctgttccccctttgtagaactccccagtttgccttctacaacgaggatcaagaattgccgtgtccactgggccccggcgaatgttatgagctgcacgttcattgtaagacgtcctttgtagggtatttccccgctaccgtgctgtgggaactcctggggcccggcgaaagcggctcagaaggggcaggcaccttctatattgcccggtttctcgcagccgtggcacactcaccactcgccgcgcagctgaagcccatgactccctttaagaggacccgcatcactggaaaccctgtggtcacaaaccggatcgaggagggcgagagaccagaccgcgccaagggttacgacctcgaattgagtatggctctgggcacctactacccacccccccggctccggcagctgctacccatgctgcttcagggaaccagcattttcacggctcctaaggaaatcgcggaaatcaaggctcagctggagaccgccctcaagtggagaaactacgaggtgaagcttcgattgctcctacacctagaggagctacaaatggagcatgacatacgacattatgatctggagtcagtaccgatgacttgggatccagttgatcaaaacccccgcctgttaacactggaagtgcctggcgtgacagagagtagaccctctgtcctgaggggggatcatttgtttgcactgctgagtagcgagacccatcaagaagatcctatcacatacaagggattcgttcataaggtggaactggacagagtgaaattgagtttttccatgtctctgctttcaaggttcgtggacggtctaacattcaaagtcaatttcacttttaatcgacagcccctcagggtccagcatagagcccttgagctgacggggagatggctgttgtggccaatgctgtttcctgtggcaccaagagacgtccccctgctgccttctgacgtcaagttgaaactatacgatcgatccctagagagcaaccccgaacaactgcaggctatgaggcacatagttaccggcactacgcggcccgccccctacatcatcttcggccccccaggaaccgggaagacagtcaccctggtcgaggccataaagcaggtggtgaagcacctgccaaaggcgcatatcctggcatgcgcccctagcaactcaggtgccgacttactgtgccagcgcctccgggtgcacttgccctcgtctatttacagacttcttgccccttctcgcgacatacgcatggttcctgaagatatcaaaccctgttgtaactgggacgctaagaaaggagagtatgtgttccctgccaaaaagaaattgcaggagtatcgggttctgataaccactctcatcaccgctggacgtctggtgtccgcccagtttccaatcgatcatttcacccacatttttattgacgaggccggacactgcatggagcctgaaagtctagtggccatcgctggcctgatggaggtgaaagagacaggcgatccaggtgggcaactcgtcctcgctggggatccacggcagctggggcccgttctgaggagtcccttgacccagaaacatggtttaggatatagtctactagagaggctgctgacatacaattccctctacaaaaagggccctgatgggtacgacccacagttcatcacaaagctcttgagaaactacaggagtcatcctaccattctggacatccccaaccagctgtattacgaaggggagttgcaggcctgtgctgatgtggtcgacagggaaagattttgcagatgggccggactgccccgacaggggtttcctataatctttcacggggtgatgggaaaagacgagcgagaaggcaattcgcctagtttcttcaatcctgaggaggctgcaaccgtgactagctatctcaagctgctgcttgctcccagtagcaaaaagggtaaagctagactctcacctcggtcagtaggggtgatttccccctatcgcaaacaggttgagaaaatccgatattgtataactaagctagaccgcgagctcagaggactagatgatatcaaagatcttaaggtcggctcagtcgaagagtttcagggtcaagagaggtcagtgattttgatcagcacagtccgaagctcacagtctttcgtccagctcgatctggacttcaatctgggctttctgaaaaaccccaaaaggtttaatgtggctgtcacccgagctaaagcactgctgatcatagtcggcaatcccctcttgcttgggcacgacccggactggaaagtcttcctcgaattttgtaaggaaaatggcgggtacactgggtgcccgtttcccgccaagttggacctacagcagggccagaatctgctccaaggcttgtctaaactgagccccagcacaagcggcccccactcccacgattacctcccacaggagcgagaaggagagggaggcttgtcactacaggtggaacctgaatggagaaacgaactgtag

SEQ ID NO: 124883 - DNA, 3012 bp, synthetic construct
  misc_feature 1..3012: note = Description of Artificial Sequence: Synthetic coding sequence
  source 1..3012: mol_type = other DNA
atgccatctaaattctcatgtcggcagttgagggaggccggtcagtgttttgaaagttttctggtcgttcgggggctagatatggaaaccgacagagaaagacttcggaccatctacaatcgggacttcaaaatttcttttggtaccccagctccaggatttagttcgatgctttatgggatgaaaatcgccaacctcgcatatgttacaaagactagggtcaggttcttcaggctcgatcgctgggccgatgtgcggtttcctgaaaagaggcgtatgaagctcggttcagacatcagtaaacatcacaaatccttgctcgccaaaatcttttatgatagggccgaatacctccacggaaagcacggggtagacgtcgaggtccagggaccacatgaggctcgcgatgggcagctcctgataagacttgatttgaacaggaaagaggtgttgacactgagactgagaaatggcggaacacagagcgtgacactcacccacctgttcccactgtgccgaacaccccagtttgctttctataacgaagaccaggagcttccgtgccccttgggccccggtgaatgctacgagcttcacgtgcactgcaagaccagcttcgtgggctactttcccgctacagtgctttgggagctgctgggtccgggcgagtctggatccgaaggagctgggactttctacatagctcggttccttgctgccgtggcacattccccgctagccgcgcaactgaaacctatgactccttttaaaagaaccagaattaccggcaacccagttgttacgaatcggattgaggaaggcgaacgccccgatagggccaaaggctacgacctggagctgtccatggctttagggacctattatcccccccctcggctacggcagctgttgccaatgctcctgcaggggacaagcatctttacagcccccaaagaaatcgctgagatcaaggcccagctcgaaacagccctaaaatggcggaattatgaggtgaagctacgcttgctcctgcacctcgaagagctgcagatggagcacgatatcagacattacgacctggagagtgtgcctatgacatgggatcctgtagaccagaacccacgcctgctgaccctggaagtccccggcgtaactgaaagtcgtccctctgtgctccggggcgatcatctatttgcactcctctccagcgaaacacaccaggaggaccctatcacctataaggggttcgttcataaggtggagttagacagagtgaagctgagcttttcgatgagccttttgagtagattcgtggacgggctgacatttaaggtcaacttcacctttaacaggcagcccctccgagtgcagcacagagctttggaactgaccggcaggtggctgttatggccaatgctctttcccgttgctcctcgtgacgtgccattactgccctccgacgtgaaattaaagctgtacgatcgaagtctggaaagcaacccagagcaactgcaggcaatgcgacacatcgtgaccggaacaacaagaccagctccttatattatatttggtcctcctggaaccggaaaaaccgtgactcttgtcgaggccattaagcaggtggtgaagcacctgcccaaagcacacatccttgcttgtgcaccaagcaattctggggctgacctcctatgtcaaaggctccgcgtacaccttccaagctctatatacaggctgttggccccaagtagagacattcgtatggtaccggaggatattaagccatgttgtaactgggacgctaagaaaggtgagtatgtattccccgccaaaaaaaaacttcaggagtaccgggtattgatcactaccctcataaccgcaggacggctggtgagcgcacagttccccatagatcattttacccacatttttatcgacgaggcaggccactgcatggaacctgagagtttggtagcaatagcgggactgatggaggttaaagaaaccggagaccccggcggccaactggtgctcgccggggatccacgacaactgggccctgtgctcaggagccctctgacccaaaagcacgggctgggttacagcctgctagaacgactgctgacatacaacagcctgtataagaaggggcccgacggttacgacccgcagtttattaccaagctgttgagaaactatcgcagtcatccgaccatcctggacattccgaaccaactgtactacgaaggcgagctgcaggcctgcgcggatgtggtcgaccgggagaggttctgcagatgggccgggttgccaaggcagggtttccctatcatctttcacggcgtcatgggcaaggatgagagggaggggaactctcccagttttttcaacccagaggaggcagctacagtcacttcctacctaaagctgctcttggcacctagctcaaaaaaaggaaaggctcggttgtctcccaggtctgttggggtcatttcgccctaccggaagcaggtggaaaaaatcaggtactgcatcaccaagcttgatagagaactgcgggggcttgacgacatcaaggacctgaaagtcggctccgtggaggaattccaggggcaggagagatccgtgatcctgatcagcactgtgcggagctcacagtctttcgtccagctggacctggatttcaatctcggattcttaaaaaatccaaaaaggtttaacgtggccgtaaccagggctaaagcactacttattattgtcggcaatcccctgctgcttgggcacgaccctgattggaaagtgttcttggaattttgtaaggagaatggcggctatactggatgccctttccccgccaagttggacctccagcagggacagaacctgctgcagggcctgagcaagctctccccatcaacttccggcccacattcacatgactatctgccgcaggagcgggagggtgaaggagggctctccctgcaagtcgagccagagtggagaaatgagctctag

SEQ ID NO: 124884 - DNA, 171 bp, synthetic construct
  misc_feature 1..171: note = Description of Artificial Sequence: Synthetic coding sequence
  source 1..171: mol_type = other DNA
atgcctagtaagttttcatgccgccaattgagggaggcgggtcaatgcttcgagtcttttcttgtcgtgagagggctagacatggaaactgaccgggaaagacttcggaccatttataacagagattttaagattagcctagcttcatcaaaatccatcttacagagttag

SEQ ID NO: 124885 - DNA, 3636 bp, synthetic construct
  misc_feature 1..3636: note = Description of Artificial Sequence: Synthetic coding sequence
  source 1..3636: mol_type = other DNA
atgctcagcctcgccgctaaactggtggctttcttttggcggacggcggacacaccccgcgaggaggccggccagcttgagccagaattggccgaaggcgatactaagcttaagacagtgaggggcgtggtgactcgatactgttccgattacggaatgatcgatgatatgatctacttctcgagcgacgccgtgacatcccgtgtgttgctgaacgtggggcaggaagtcatcgcggtggtcgaagaaaataaggtttctaatgggctaaaggccatcagggtggaagctgtaagcgataaatgggaggatgacagccgcaaccatggttccccaagtgattgcggtccccgggttctgatcgggtgtgtcaccagcctcgtcgagggtgccggatgcattagccagacgacttacttttccctggaatcagtctgtgaaggatttgagccatgcaagggagattgggtcgaagccgagtaccgaatccggccaggcacatggtcaagtgaggccacttcagtgaagcctctgcgatacaagagggtggacaaagtgtgtatcagctcactgtgtggaaggaacggagtgcttgaggaaagtatcttctttacattagacagcctgaaactccccgacggatatacacccagaaggggggatgttgttaacgccgtcgtggttgaatcctcgcagagttgttatgtttggcgtgccctctgtatgacacttgtcaagagacgggatgcagctcctgtccacgaggcaacgcacttctatgggaccatcttgctgaagaataaaggggatatcgaggtgacacaggtaactcacttcggcaccctcaaggagggccgttcgaagaccatggtgatttggattgagaataagggagatattccgcaaaatctggtgagttgtaaactggccgggtgggacaaatcgaagcagtttcgtttccagatgttagataaagaccaaatgtgccccgtggtgtcttttgtatcagtcccagagaaggagaatagttcagacgagaatatcaacagccttaattctcacaccaagaataaaacatcacaaatgagcgagtctagtctcgtcaataatcgagggatctcccccggcgactgcacatgcaaaggcgagaacggcgagaaggacaacattctctcaaggaaacaaatgacagaacccgagccaggcggccttgtccctcccggcggaaaaactttcattgtcgtgatttgcgacggcaaaaatcctggccgctgtaaggagctcctgttgttgtgttttagcgattttttgatcggcagatatcttgaggttaacgttataagcggggaagagtccttgatcgccgcacgcgaacccttcagttggaagaaactgaaatcctcccaggccctcacctcagccaaaacaacggtggtcgtgacggcccaaaagaggaactctcgcaggcagttgccttctttccttccacagtaccctatcccggatcgtttacgcaaatgcgtggagcaaaaaatagatatcctaacgtttcaaccattattggcagagctgctgaatatgtccaattacaaagagaaattctccaccctgttgtggctggaggaaatttatgctgagatggaactcaaagaatataacatgtccggcataatcctcagacgtaatggcgatctattagttctcgaggtgccaggtctggccgaggggcggcccagtctctatgcgggagacaagcttatcttgaagacccaggagtataatggccacgcaattgaatacatctcctatgtaaccgagatccacgaagaagacgtgacacttaagattaacccagagtttgaacaggcctacaatttcgagcctatggacgtggaatttacgtacaatagaaccacgtcccgccgatgccactttgcactggaacacgtgatccatctgggggtgaaggtgctattcccagaggagattattttgcagtccccacaggtaactggcaactggaaccacgcacaggacacgaaatcatctggccaatctactagcaaaaagaatcgaaaaacgatgaccgaccaggcggagcatggaacggaggagagacgagtgggcgacaaggaccttccggtcttggccccattcaccgctgagatgagcgattgggtagacgaaatacagacaccaaaggctaggaaaatggaattctttaaccctgtgctgaatgagaaccagaagttggccgtgaaaaggatcttaagcggtgactgcagaccgctcccatacatcctgtttggccctcctggtactggtaagacagtgacaattatcgaggctgtgctgcaggtgcatttcgcactacccgactctcgcattttggtgtgtgccccgtcaaacagcgcagctgacttagtgtgcctcaggctgcatgaaagcaaagtgctgcaacctgcgaccatggttcgcgtaaatgcaacttgccggttcgaggagattgtcattgacgcagttaagccttattgtagagatggggaagacatttggaaggcaagtagatttcgaatcatcatcaccacctgttcctcctcaggcctcttctaccagataggggtgcgggtgggtcatttcacccacgtgtttgtggatgaggcgggacaggcgtccgagcccgagtgtctgatcccactggggctgatgtccgatattagtggccagatcgtgctggctggagatccaatgcagctcggacctgtgattaaatcccggctggcaatggcctatggattgaatgtgagcttcttggagcggctgatgtcccgcccagcctaccagcgagatgagaacgcgttcggcgcctgcggtgctcacaaccctctgctcgtcaccaaactggtcaagaactatcgatcacatgaagccctcctcatgctgccgagccggttgttctatcatcgtgaactggaagtgtgcgccgatcccacggtggtgactagcctgttaggatgggaaaagttgcccaagaagggcttccccttaatctttcacggagtacgtggtagtgaagccagagagggcaagtctccttcctggtttaaccccgcggaggcagttcaggtgctccgttactgctgtttgctagcccacagtataagctcccaagtctcggcttccgacatcggggtcatcacgccgtataggaagcaggttgagaagatccggatactgcttcgcaatgtggacctgatggacatcaaggtgggttccgttgaggaatttcaagggcaggaatacttggtcattattatttccaccgtgagatccaacgaggacagatttgaggacgatcggtacttcctgggatttctctcaaatagtaagcgtttcaatgttgcgattacccgccccaaggcattattgatcgtactgggcaaccctcatgtactcgtgcgggacccatgttttggggcgctccttgaatacagcatcacaaatggggtgtacatgggctgcgatctacccccagcgctccagtccttgcagaactgcggcgaaggggtcgccgacccctcgtacccggtggtcccagagtccaccggccccgaaaagcaccaagagccctcatag

SEQ ID NO: 124886 - DNA, 378 bp, synthetic construct
  misc_feature 1..378: note = Description of Artificial Sequence: Synthetic coding sequence
  source 1..378: mol_type = other DNA
atgagtgatatctccgggcaggttacaaaactagttaagaattatcgaagccatgaggccctgcttatgttaccgtcccgactcttctatcacagggaactcgaggtttgtgccgatcctaccgttgtgacgtctctccttgggtgggagaagctcccgaaaaagggcttccctttgatattccacggtgttaggggatctgaggcacgggagggtaagtctccctcctggttcaaccccgccgaagcagtccaggtcttacgatactgctgcctgttagcccacagtattagctctcaggtttctgccagcgacattggcgttattacaccttaccggaaacaagttcggcctgcacaggcacggctagtcctgtag

SEQ ID NO: 124887 - DNA, 378 bp, synthetic construct
  misc_feature 1..378: note = Description of Artificial Sequence: Synthetic coding sequence
  source 1..378: mol_type = other DNA
atgtctgatattagcgggcaggttaccaaactggtgaaaaattacagaagtcacgaggcccttctgatgctccccagtcggcttttctaccacagggaactagaggtttgcgcagaccctacagttgtcacgtcactgctggggtgggagaagctccccaaaaaaggctttccccttatcttccacggcgtgcgtggcagcgaagcccgggaaggaaagtcaccaagctggttcaatccagccgaagcggtccaggtgctccgttattgctgcttgctggctcacagtatctcttcccaggtttctgccagcgacatcggggtcatcacgccttaccgcaaacaggtccggcctgctcaagccaggctcgtgctgtag

SEQ ID NO: 124888 - DNA, 1017 bp, synthetic construct
  misc_feature 1..1017: note = Description of Artificial Sequence: Synthetic coding sequence
  source 1..1017: mol_type = other DNA
atgtttcgcgtgggccattttacgcacgtattcgtggacgaggcgggacaggcctctgagccagagtgtctgatccctctgggcctcatgagcgatatttccggacagattgtgctggccggggacccaatgcaactggggcctgtcattaagagtcgcctggccatggcatacgggctcaatgtcagcttcctcgagcgcctgatgtcccgccccgcttaccagcgggatgaaaatgcttttggcgcctgcggagctcataacccactccttgtgaccaaattagtaaaaaattaccgatctcacgaggccctgttgatgctgccatcacgattgttctaccatcgcgagcttgaggtgtgcgcagaccccacagtcgttacctccctccttggatgggagaaactcccgaagaaaggctttccgttgattttccacggcgtgcggggttcagaggctagagaaggcaagagccccagttggtttaacccggccgaggcagttcaggtgctgaggtactgctgcctgttggctcactctatctccagccaggttagtgcctcagacataggggttattacgccatatagaaaacaggtcgagaagatccgcatcctcctcagaaacgttgatctgatggacataaaggtaggcagtgtcgaagagtttcaagggcaggagtacttagtcataatcatctccactgtacggtccaacgaagataggttcgaggacgatcggtactttctcggtttcctaagcaactctaagcgattcaatgtggccattacccgtccaaaagcactgctgatcgtgctagggaatccacacgttctagtaagagacccctgttttggcgcccttctagagtatagtataactaacggggtgtacatgggatgtgatcttccacccgccctgcaatccctgcagaactgcggtgaaggagtcgccgatcctagctatcctgtggtgcccgagagtacgggcccagagaagcatcaggagcccagttag

SEQ ID NO: 124889 - DNA, 3498 bp, synthetic construct
  misc_feature 1..3498: note = Description of Artificial Sequence: Synthetic coding sequence
  source 1..3498: mol_type = other DNA
atgctgtctctcgcggctaagttagtcgcctttttctggagaaccgctgacacgccacgcgaagaagcgggccaattggagcctgagctggccgaaggagatactaagctaaagaccgtgcggggggttgtgacacggtattgtagtgattacggcatgattgacgacatgatttatttttctagcgatgccgtgacttcgagggtattgttgaacgtaggccaggaggtgatcgcggtggttgaggagaataaagtgagtaacggcttgaaagcgataagagtggaagcagtgagcgataagtgggaagacgatagtcgaaaccacggatcacccagcgactgcggcccccgcgtgcttattggctgcgttacaagtctggtggagggagcgggatgtatttctcagactacatatttcagcctggaatctgtgtgcgagggattcgagccatgcaaaggggactgggttgaagccgaatatcgtattagacccggcacatggagttctgaggccacctcagtgaaaccacttagatataaacgcgtagataaggtatgcataagtagcctctgcggacgaaatggtgtgcttgaagagtccatcttttttacactagactccttgaagctaccggacgggtatacacctagaagaggtgacgtagtcaatgccgtggtagttgaatcttcgcagagctgttatgtatggagagcactgtgcatgacgttggtgaagcgccgtgatgctgcaccagttcatgaggctacccacttttacggcaccattctgctgaaaaacaaaggtgacattgaggtcacacaggtaacgcactttgggacccttaaggagggtagatctaaaactatggtcatttggattgaaaacaaaggcgatattccccaaaacctcgtgagttgcaaactggctgggtgggataaatctaagcagttccggttccagatgcttgataaagatcagatgtgcccagtggtgagcttcgtttcagtgcccgagaaagagaattctagcgacgaaaacatcaactccctgaattcccacacgaagaacaaaaccagccagatgtccgagtcctcactggttaacaatcgtggtatctcacctggagactgcacatgcaaaggcgagaacggagagaaggataacatcctttctcggaagcaaatgacagagcctgaaccaggagggctggtcccaccaggaggcaaaaccttcattgtcgttatttgtgatggaaagaatcccgggcggtgcaaggagttattattactgtgcttttctgactttctaatagggagatatttggaggtaaacgtgataagtggagaagaaagccttatagcagcgcgggaaccgttctcctggaagaagttaaagtcctcccaagctcttacatctgccaagacaaccgtggtggtcaccgcccaaaagaggaattctagacgtcaactgccctccttcttgcctcagtaccccataccagaccggttgaggaagtgcgtcgagcagaagatcgacatcctcactttccagcctcttttggcggaactcctgaacatgtcaaattacaaggagaagttctctacactgctgtggttagaagagatctatgccgaaatggagctcaaggaatataatatgtccgggataattctgcgcaggaatggcgatctactcgtcctggaagtgcccgggcttgcggaaggtagaccctccttgtatgcgggcgataagctcattctcaaaactcaagaatataacgggcatgccatcgagtatatctcttatgtgaccgagattcacgaggaggacgttacactcaagattaatccagaatttgaacaggcatataacttcgagcccatggacgtggagttcacctacaataggaccacctccagaaggtgccatttcgccctcgaacacgtgatccatctgggagttaaggttctttttcccgaggaaattatcctgcagtcccctcaggtcacaggaaactggaatcacgcgcaggacaccaagtccagtggtcagtcaacgagtaaaaagaacagaaaaactatgaccgatcaggctgagcacggaacagaggaacgcagggtcggcgacaaagaccttccagtactggcccctttcaccgcagaaatgagcgattgggttgatgagatccagacccccaaagccagaaagatggagtttttcaaccccgtgctgaacgaaaaccagaagctggctgtgaaaaggatcttgagcggtgactgcaggccattgccttacatactctttggcccacctggaactggcaaaaccgtcaccattattgaggctgtgcttcaggtgcactttgcactccctgatagcagaattctcgtttgcgctcctagtaatagcgctgccgatttagtgtgtcttagacttcacgaatccaaagtgctgcagcccgccaccatggtgcgcgttaacgccacttgccgcttcgaggaaattgttattgacgccgtgaagccctactgtcgggacggcgaggacatttggaaagcttctcgcttccgcattataatcacgacgtgtagctcaagcggactcttctaccaaattggtgtgagggtgggacacttcactcacgtgttcgtcgatgaagcaggtcaggccagcgagccagaatgtcttatcccattggggttgatgtcagacatttctggccaaatagtgctggccggcgatcctatgcaattaggtccagttattaaatctagactggctatggcatacggtcttaatgtcagctttctggagaggttaatgtcccgcccagcgtatcaacgggacgagaatgcgtttggtgcttgcggggcgcataatccccttctggtgaccaaactcgtgaaaaactacaggtcccatgaggcattgttgatgctcccctcccgcctgttttaccacagagaactagaggtctgtgctgatcctacagtcgtcacctccctgctcgggtgggagaagctccccaagaagggttttccgctcattttccatggagtgcgaggatccgaagcccgggaaggtaagagtccatcatggttcaatcctgccgaggccgtccaggtgttgcggtattgttgtcttctcgctcactcaatttccagccaggtgtctgcctctgacataggagtaatcacgccatataggaaacaggtcgagaagatccgtattctgctgcggaatgtggacctaatggatatcaaagtgggcagcgtagaggaatttcaggggcaggaatacctggtaatcataatttccaccgatccatgttttggcgcgctgcttgaatacagcatcaccaacggagtttatatggggtgcgacctgccccccgctctccaatccttacagaactgtggagagggcgtcgcggacccatcctaccctgtagtccccgagtctacgggccctgagaaacaccaagagccaagctag

SEQ ID NO: 124890 - DNA, 636 bp, synthetic construct
  misc_feature 1..636: note = Description of Artificial Sequence: Synthetic coding sequence
  source 1..636: mol_type = other DNA
atgtcattcctgccggtgagaagcgtgataggagggggggacacaaaactgaagactgtgaggggggtggtgacacggtattgttctgattacggcatgatagatgatatgatctacttctccagcgatgcagtcacctcgagggtcctcttgaacgttggccaggaggtgatcgctgtcgtggaggagaacaaagtcagcaacgggctgaaggcgattcgtgtagaggctgtgtcggataagtgggaagacgacagtagaaatcacggatcacccagcgattgcggtccgagggtgctgatcggttgcgtgacctctctcgtggaaggcgcggggtgtatttcccaaactacctacttctcacttgagtccgtctgcgaagggttcgagccttgtaaaggagactgggtcgaagctgagtacagaatcagaccaggcacatggagcagtgaggccacgtccgtgaaacctttacgatataagcgggtcgataaggtggcatgtcgtctcgtggccccactctgcgccagcgggagacccgcgattagggggaacttgcacgggcccgggttcagttgtatgtgctggaaacccgggaagattaaattgtgtcatgggcaacgggaaaagaaatag

SEQ ID NO: 124891 - DNA, 3498 bp, synthetic construct
  misc_feature 1..3498: note = Description of Artificial Sequence: Synthetic coding sequence
  source 1..3498: mol_type = other DNA
atgtccttcctccccgtgcgctctgtgatcggaggcggtgataccaagctgaagaccgtccgcggcgtggtcacaagatactgctccgattatgggatgattgacgatatgatctatttctcatcagatgccgtgacttctcgggtactgcttaatgtgggacaagaggtcatcgcggtggtggaggaaaacaaggtgtccaatggcctcaaagccataagagtggaagcagtgagcgacaaatgggaggatgactcgagaaaccatggatcccccagcgactgcggccctcgggtactgatcgggtgtgttacatctctggtggagggggctggatgcataagccagactacttacttttcactggaaagcgtttgcgaggggttcgaaccgtgcaagggcgattgggttgaggccgagtaccgaattagacccggcacgtggtcgtcagaggccaccagtgtcaaacctctaagatataagcgcgtcgataaggtgtgcatttcctctctgtgcggacgcaacggagtgttggaggaatcaatatttttcactcttgactccctcaagctccccgacggatacacaccaagaaggggcgatgtcgttaacgctgtagtggtggagtcctcccagagctgttatgtctggcgagctctctgtatgacacttgttaaaagacgggatgccgcacccgtgcatgaagccactcatttctatggtacgatcctcttaaagaacaaaggagatatagaggttacccaggtcacacattttgggacactcaaggaaggacggtccaagactatggtcatttggatagagaacaagggcgacataccacagaatttagtgtcctgcaagttagctggatgggataagtccaaacagtttcggtttcaaatgctcgataaagaccagatgtgccccgtagtctcatttgtaagcgttcccgaaaaggagaattcctcagacgagaacataaatagtctaaattcccacaccaaaaacaagacctcacagatgagcgagagctccttggtgaacaatcgcggcataagtccgggagactgtacttgtaagggcgagaatggcgaaaaggataatattctgagccgcaagcaaatgaccgaaccggagcctggcgggcttgtgcctcccggagggaagaccttcattgtagtgatctgcgacggcaaaaatccaggcaggtgtaaagagttgctgttgttgtgcttcagcgatttccttataggacgatacctggaggttaatgttatatctggtgaagagagcctcatcgcagcacgagagcccttcagctggaaaaaactcaagtcctcccaggcactgactagcgctaagacaactgttgtagttactgcccagaaaagaaacagtcgtcgacaactcccctccttcctaccccagtatcccattcccgatagacttagaaaatgtgtggagcagaagatcgatattttaacttttcaaccgttgctggcagaactactgaacatgtccaattacaaggagaaattctctacactgttgtggctggaggaaatttatgccgaaatggagttgaaggaatacaatatgtcggggatcatactaaggaggaacggggatctcctggtgctggaggtgcccggcttagctgaagggaggccctcattatatgctggggacaagctgattctaaagacgcaggagtacaatggccacgcaatagagtacattagttacgttaccgaaatccacgaagaagacgtgactctaaagataaaccccgaattcgagcaagcatataacttcgaaccgatggacgtcgaatttacatacaatcgaactacttcaagaagatgccacttcgccctggaacacgtgattcatctgggtgtcaaagtgctttttccagaggagattatcctgcagtcccctcaagttacaggcaactggaaccacgcacaggacaccaaaagtagcggccagagcacatcaaagaaaaatagaaagacaatgacagaccaggccgaacatggaactgaagagaggcgcgtaggggacaaggatctgcccgttttagccccctttactgctgaaatgtcagactgggttgacgaaatccaaacacccaaagcacgaaaaatggagttttttaatccagtcctgaatgagaaccagaagctggctgtgaagagaatcctgagtggagattgtaggcctctaccttatatcctttttggcccacctggcacagggaagaccgtcactattatcgaagccgtgcttcaggtgcacttcgcgctgccggattctcgcattctggtgtgcgctccgagcaactccgctgcagacttagtgtgtctgagactgcatgagtccaaagttcttcagccagcaacaatggttcgggtgaacgctacctgccgtttcgaagaaattgtgattgacgccgtgaaaccttactgtcgggacggagaggacatttggaaagcatctaggtttcggataatcatcaccacctgctcctcgagtggcctgttctaccagatcggagtgcgtgtgggccattttacccacgtcttcgtggatgaggcaggccaagcatctgaacctgagtgcctgatccctttagggctaatgtctgacatatcaggacagatcgtcctggcaggcgaccctatgcagctcggccccgttatcaagagtagattagcaatggcttatggcctgaatgtgtctttcctggagcgcctgatgagtaggcctgcttaccagagggatgagaatgcctttggtgcttgcggcgcccacaatccgctgctggtaacaaagctggtgaagaactaccggtcccatgaggccctcctgatgcttccatcccggttattttaccacagagagctcgaggtgtgtgccgaccctaccgttgttaccagtctcttgggatgggaaaagcttcccaagaaggggttcccactgatctttcatggcgttcgagggagtgaggcgcgcgagggcaagagcccttcctggttcaacccagctgaagctgttcaagtactgaggtactgttgtctgctggcacattcgatctcttcacaggtgtccgcgtccgacattggcgtgatcacaccctacagaaagcaagtggagaaaatcagaatccttctgcgcaacgtcgacctgatggacattaaggtgggctccgtggaggaattccaggggcaagaatatttggtgatcatcatttcgaccgtgagatcaaacgaggatcgttttgaggacgatagatattttctaggttttctgagcaactcaaaaaggtttaatgttgccatcacaagaccaaaagcattgctgattgtactgggaaatccacacgtgttagtccgcttgtggcgaggtggaggaaggcctctgcttcccagcggcgcccgaatacaccgcaccagggaggcctcaggagcgcagctgatctgttcggggtag

SEQ ID NO: 124892 - DNA, 3636 bp, synthetic construct
  misc_feature 1..3636: note = Description of Artificial Sequence: Synthetic coding sequence
  source 1..3636: mol_type = other DNA
atgctctcgctcgccgcaaaactcgtggcattcttctggcggactgcagacactccccgggaggaggctggtcaactggagccagaactggctgaaggggacacaaaacttaagacagtgaggggagtggtcacccgttattgttccgattacggcatgatagatgacatgatttatttctcctccgacgctgtgacctcgagagtgctgctgaatgttggccaggaggtaatcgccgtcgtggaagaaaacaaggtctcaaacggcttaaaagcgattcgcgtggaggcggtaagcgacaagtgggaagatgactcacgaaaccatggctctccaagcgattgcggtcctcgggttctcataggatgcgtgacttctcttgtggagggagccgggtgcatctctcagacaacgtattttagcctcgaatctgtgtgtgaaggcttcgagccatgcaagggagattgggttgaagcggagtaccgtattcggcccggcacttggagtagcgaggctacgtcggtgaaaccactgcgctacaagagagttgacaaggtgtgcattagctccctttgtggcagaaatggagtgctcgaagagtctatcttttttactcttgattccctgaaactgcctgatggttacaccccacgtaggggcgatgtagtgaacgcagtggttgtggagtccagccaatcttgctatgtgtggagggccctgtgcatgacactggtcaagcgacgtgacgccgcaccagtgcatgaggccactcatttctacggtaccattttattgaagaacaaaggggatattgaggtgacgcaggtgactcatttcggaaccttaaaagaaggtagaagtaaaaccatggttatctggatcgagaataagggagatatccctcagaatttagttagttgtaagctggcaggctgggacaagtctaaacagtttagatttcagatgctggacaaggatcagatgtgccctgtcgtgtcgtttgtttctgtgcccgagaaggagaacagttcagatgaaaatataaattctctgaactcccacacaaagaataagacatcgcagatgagtgaatcctctctcgtaaacaatcggggaatttcgcccggtgactgtacgtgtaaaggtgagaatggggagaaagataacatactttccaggaagcagatgactgagcctgagccagggggcctagtcccccccggaggtaaaacttttatagttgtcatctgtgacggcaagaatccaggtcggtgtaaggaactattgttactgtgcttctcagactttctgatcggccggtacctggaggtaaatgtgatcagtggcgaggaatcactgattgctgcgagagaaccttttagctggaagaaacttaaaagctcccaggccctcacgagcgccaagactactgtggttgttactgcccagaaacggaactcccggaggcagctcccatccttcctgccacagtaccctatcccggaccggctacgaaagtgcgtggaacagaaaatcgacattctgactttccagccactgctcgccgagctgcttaatatgagtaattataaggaaaaattctctacactcttatggcttgaagagatctacgccgagatggaactgaaagagtataacatgagcgggatcattctccgccgaaacggtgatctgttagtgctcgaggtgcctggactggcagaaggaagaccttcattatatgctggggacaagctgatccttaaaactcaagaatataacgggcatgccattgaatatatttcttatgtcactgaaatccacgaagaggacgtgacactcaaaataaatccggaatttgaacaggcctacaactttgagcccatggatgtggaattcacttacaaccgcaccacgtctagaagatgtcacttcgcgctcgaacatgtgattcacctcggcgtcaaagtgctcttccctgaagaaatcattctgcaaagcccacaggtgacaggcaattggaatcacgctcaagacaccaaatcttccggccaaagtacttccaaaaagaaccgaaagacaatgactgaccaggcagaacatggaacagaggagcgacgggtcggcgataaggacctacctgtattagcccccttcactgccgaaatgtctgactgggtagacgaaatccagacccctaaagcacgaaagatggaattctttaatcctgtcctgaatgaaaaccaaaaactggcggtgaagcggattctgtcaggagactgtcggcctctgccatatatccttttcggaccacctgggacaggtaaaacagttaccattattgaggctgtgctacaggtgcattttgctttgccagattcacggatcctggtttgtgctccttccaactctgcagccgacttggtgtgcctgaggctccatgagagcaaagtcttacagccagccacgatggtccgagtcaacgccacttgtcggttcgaagaaattgtgatagatgcggtaaagccctactgtcgcgatggtgaagacatatggaaagcctcccgatttagaatcattatcaccacgtgctccagctccggactgttttatcaaattggagttcgcgtgggacactttactcatgtgtttgtcgacgaggctggacaggcgtctgaacccgagtgtctgatacccttagggctgatgtccgatatcagcgggcagattgtccttgccggcgaccctatgcagctgggccccgtgattaagagcaggcttgcgatggcatacggtctcaacgtttccttcctcgaaaggctcatgtcccggccagcttaccagcgggatgagaatgcctttggtgcatgtggagcccataacccactgttagtgacaaagctggttaaaaactaccgtagtcacgaggccctattgatgctgccaagtcggctgttttatcatagagaactggaggtttgtgccgatccaaccgttgtcacctctctgttgggctgggagaagctgccaaagaaagggtttcctctaatatttcacggggtgaggggcagcgaagctagggagggaaagtcaccgtcgtggttcaatccagcagaagccgtgcaggtcctccgttattgctgcttattagcccattcgattagttcacaggtctcagcctcagatatcggtgtaatcacaccctacaggaagcaagtggagaaaatccggatccttctgaggaacgtcgatttgatggatattaaagtgggctctgtcgaggaattccaaggccaagagtatctggtgataatcatctctacggtcaggagtaatgaagaccggttcgaggatgacagatatttcctggggtttttgagtaattccaagaggttcaatgtcgctatcacaagacccaaagcgctcttgattgtgttggggaaccctcatgtcctcgtgagagatccatgctttggtgcactactggaatattctattacaaatggcgtctacatgggctgcgaccttcccccagcactacaaagcttacagaattgcggagaaggggtggccgacccatcttaccctgtggtgcccgaatctactggccccgaaaaacaccaggagccaagctag

SEQ ID NO: 124893 - DNA, 483 bp, synthetic construct
  misc_feature 1..483: note = Description of Artificial Sequence: Synthetic coding sequence
  source 1..483: mol_type = other DNA
atggccgccgagaggaagacccggctgagtaagaacctgcttcgaatgaaattcatgcagaggggcttagatagcgagactaagaagcagctggaagaggaggaaaagaaaattatcagcgaggagcactggtacttagacttacccgagcttaaggaaaaggaatcatttatcatcgaggagcagtctttccttctgtgcgaggaccttctctacgggcgcatgagtttcagaggctttaatcctgaagtggagaagctaatgttacagatgaacgccaagcacaaagctgaggaagttgaggatgaaaccgttgagttggacgtgtccgacgaagaaatggcccggagatacgaaacactggttggcactatagggaagaagttcgctcggaagagggaccacgctaattacgaagaggacgaaaacggggatattacgccaatcaaagcgaagaagatgtttttaaaacctcaggactag

SEQ ID NO: 124894 - DNA, 627 bp, synthetic construct
  misc_feature 1..627: note = Description of Artificial Sequence: Synthetic coding sequence
  source 1..627: mol_type = other DNA
atgaaggcctgcaaacgcggcaactcagatattgtgagactggttatagaatgcggagcagattgtaacattctgagcaagcatcagaactctgcactgcactttgctaagcagtcaaataatgtgctggtgtacgacctgctgaagaaccatctcgagactctttcacgcgtggccgaagagaccattaaggactactttgaggcaagacttgcgctcctagagccagtttttcctatagcgtgccatcgactgtgtgaaggcccagatttcagcaccgactttaactataagcctccccagaacatcccggaagggtccggtattttgctgttcatcttccatgcaaatttcctagggaaggaagttatcgcccggctgtgtggcccttgtagcgtgcaagctgtcgtccttaatgataaatttcagttaccggtgttcttgaccggcagtcgttccgtagttcaggccggagtgcagtggcggggcctacagctgactggggtgctcactagtcaggcgcaggccatcctgcccccacaaccacctaattatttaggtttgaaaatgaccgttatacttttcacacacagcgccctgttgcaggtgccaatcaattcaagctag

SEQ ID NO: 124895 - DNA, 2583 bp, synthetic construct
  misc_feature 1..2583: note = Description of Artificial Sequence: Synthetic coding sequence
  source 1..2583: mol_type = other DNA
atggagcaggtggcagagggggctagggtcaccgcagtcccagttagtgctgccgactccaccgaagagctcgccgaagtcgaagagggggtgggcgtggttggcgaagataacgatgccgcagctcggggcgcagaggcctttggcgatagcgaagaagacggagaagacgtgttcgaggtggaaaaaatcctcgacatgaaaactgagggcggtaaggtgctgtataaagtgcggtggaagggctacacctctgatgatgacacctgggaacccgagattcacctggaagactgtaaggaggtgctgttggagtttcgcaaaaagatagcggaaaataaggccaaggcagtgcggaaggatatccagcggcttagcctgaacaatgatatctttgaggccaacagcgacagtgaccagcagtctgagaccaaggaagatacgtctccaaaaaaaaagaagaagaagttgcgtcaacgggaggagaagtcccccgacgacctcaaaaagaagaaagctaaagctgggaagctgaaggacaaatccaagccggacctggaatctagtcttgaatccctcgtgttcgacctgcgcacgaaaaaaaggatctcggaggctaaggaggaactgaaggaaagcaagaagcccaaaaaggatgaggtgaaggagactaaagagctgaagaaggtgaaaaaaggagagatccgggacctcaaaacaaaaacccgggaggaccccaaggaaaaccgaaaaactaagaaagaaaagtttgtcgaaagtcaggtggaaagtgaaagtagtgtgctaaacgattcaccctttcccgaggacgacagcgagggactgcattcagattccagggaggagaagcagaatactaagtcggccagagagagagcaggacaagacatggggctcgagcacgggtttgaaaagcctctcgattccgcaatgtctgctgaagaggacactgacgtgagggggcgccggaagaagaagacccctcgaaaagcagaggacacccgcgagaatagaaagttagaaaacaagaacgcctttctcgaaaaaaagacggtcccgaagaagcaacgcaaccaggatcgaagcaaatctgccgcagagctggaaaagctgatgccagtgagcgcacagacacccaaaggcagacgtctctcaggggaagaacgcgggctctggagtactgactctgcagaagaggacaaagagaccaagcgcaatgagtctaaggagaaatatcagaagaggcacgattccgataaggaagaaaagggtcggaaagaaccgaaaggcctgaagacactcaaggagatccgaaatgcgtttgatttgtttaaactgacaccagaggagaagaacgatgtgtcagagaacaatagaaaacgagaggaaattcccttggattttaaaactatcgatgatcacaagaccaaggaaaacaagcagtcgctaaaggaacgacgaaatacccgtgacgagaccgatacatgggcctacatcgccgccgaaggggaccaggaggttctggactccgtgtgccaggcagacgagaacagtgatggccgacaacagatcctctcactgggtatggatctacaactggaatggatgaaattggaggacttccagaaacatttggatggaaaggatgagaatttcgctgcaaccgatgccatccccagcaacgtactccgcgacgctgtaaaaaatggagattacattacggtaaaggtggctttgaacagcaatgaggagtacaatttagaccaggaagactccagtggtatgaccctggtaatgctggccgctgcaggaggacaggacgacttgttgaggctgctgattaccaaaggcgcaaaggtcaatggcagacagaaaaatggaacaacagcacttatccacgcagccgagaaaaattttctgactaccgttgcgatacttcttgaggcaggcgcattcgtgaatgttcagcagagtaatggcgaaaccgcccttatgaaggcctgcaagcgtggaaactcagacattgtaaggctagttatagagtgtggagccgattgcaacattcttagcaagcaccaaaatagcgcccttcatttcgccaagcagagtaataatgtgctcgtatatgacctgctgaagaaccatttggagactctgtcacgagtagctgaggagactataaaggattactttgaagcgagactggctctgctggaacccgtcttccctatagcctgccaccgtctctgcgagggcccagacttttcgaccgattttaattataagcccccccagaacattccggaggggtccggcattctgctcttcatctttcatgctaatttcctcggcaaggaagtcattgctcgtctatgtggcccctgtagcgtgcaggccgtggtgctgaacgataagtttcaactgcctgtgttcctagattctcactttgtgtacagcttctcaccagttgccggtcctaataaattgtttatccgcctgaccgaagccccatcagctaaggtgaaattactgataggtgcttacagggttcaactgcagtag

SEQ ID NO: 124896 - DNA, 2604 bp, synthetic construct
  misc_feature 1..2604: note = Description of Artificial Sequence: Synthetic coding sequence
  source 1..2604: mol_type = other DNA
atggagcaggtcgctgaaggcgctagagttactgccgtgccagtctccgctgcagacagtaccgaggaactggcagaagtagaggagggtgtcggagtagttggagaggacaacgacgcagccgcccggggggctgaagcatttggcgatagtgaggaagacggggaagacgtgttcgaagtcgagaagatactcgatatgaagaccgaagggggaaaagtgttgtacaaagtgcgctggaaaggctacacctccgacgacgacacttgggaaccagagatccatctggaggactgcaaagaggttctcttggaatttagaaaaaagattgccgaaaacaaggctaaagctgtgcggaaggatattcagagactgagtttgaacaatgacatatttgaagcaaactccgactccgatcagcagtcagagacaaaggaggacactagccccaagaaaaagaagaaaaaactgcgacaaagggaggaaaagtcaccagatgatcttaagaaaaaaaaagctaaagcaggaaaactgaaggacaagtccaagcctgacctggaatcctcactcgagtctttggttttcgaccttcgtaccaaaaagcggatctccgaagccaaggaggagctgaaagagtctaagaagccaaaaaaggatgaggtgaaggagaccaaggaattaaagaaggtaaaaaagggcgaaattagggatcttaagaccaagacccgcgaggaccctaaggagaaccgcaagaccaagaaggagaagtttgtggaatcccaggtggaaagcgaaagctccgtccttaatgactcgccatttcccgaagacgattccgagggacttcacagtgatagcagggaggagaaacaaaacacaaagagcgccagggaaagagcaggacaagatatgggactggagcatgggttcgagaagcctctggacagtgcgatgtctgccgaagaagatacagatgtgcgtggccgacgcaagaaaaagacccctcgcaaggccgaagatacccgagagaatcgcaaattggagaacaaaaacgccttcctcgagaaaaagacagtgccaaagaagcaacgaaaccaagataggagtaagtccgctgctgaactggagaagctgatgcccgtgtctgcgcagactcccaaggggaggcggctctccggggaagagcgcggtctgtggagtaccgacagtgccgaagaagacaaggagacaaagcgaaatgagagtaaagagaagtaccagaagcgacacgattcagacaaggaggagaagggtcgcaaggagcccaaaggcctgaaaacactaaaggagattcggaacgcattcgaccttttcaaactgacgcccgaagaaaagaatgacgtttcagagaacaatcggaaaagagaggagatccccctcgacttcaaaactattgacgatcacaagactaaagaaaataaacagtcacttaaagagcgccgcaatacacgcgacgagacagacacctgggcttacatagctgcagaaggagaccaagaagtgcttgactccgtgtgtcaggccgacgagaatagcgacggtcgtcagcagatcctgtccttggggatggacctccaacttgagtggatgaaactggaagatttccagaagcacctggatggcaaggacgaaaatttcgcagccactgatgccattccaagtaatgtcctgcgtgacgcagttaagaatggagattacatcacagtaaaggtagctcttaactccaatgaagagtataatttagaccaggaagacagctccggcatgacactggttatgctggccgctgcaggcgggcaggacgatttactgcgcctgctgataacaaagggtgcgaaggtgaacggtaggcagaaaaatggtactacagcgttaattcatgcagcggagaaaaatttcctcacaacagtggctatcctgctcgaggccggtgccttcgtgaatgtgcagcaatcaaatggcgaaacggcactgatgaaggcctgcaagcgaggaaacagcgacatcgtacgactggtcattgagtgcggggccgattgtaatatcctgtctaaacaccagaattctgctttacacttcgccaaacagagtaataatgtgctagtgtatgacctcctcaagaaccatcttgaaacattgtcacgggtcgcggaagagactatcaaagattacttcgaggctcggctggcactgttggagccagtgttcccaatagcctgccacaggctatgcgaaggcccggacttttctacagactttaactataaacctccccagaacatcccagagggctcaggcattcttctgtttatcttccatgcaaatttcttgggtaaggaggtgatcgcccggctctgcgggccatgctccgttcaagcggtggtcctgaatgataaattccagttaccagtgttcctcaccggtagcagatcagtggtgcaagccggtgtacagtggagaggcctccagctgacgggcgtcctgactagccaggctcaggctattttgcctccacagccacccaactacctcgggctaaagatgcatgctactacgtccgggtag

SEQ ID NO: 124897 - DNA, 1812 bp, synthetic construct
  misc_feature 1..1812: note = Description of Artificial Sequence: Synthetic coding sequence
  source 1..1812: mol_type = other DNA
atggaacaggtggctgaaggggccagggtgacagctgtaccagtgtctgctgctgacagcaccgaagagctcgcagaagtggaggagggagttggtgtggttggcgaagataacgatgcagcggctcggggggcagaggcattcggggactctgaggaagatggggaggacgttttcgaggtcgagaaaattctggatatgaaaacggagggtgggaaggttctttacaaggtgaggtggaagggctatacctctgatgatgacacatgggagcccgagatccatttagaagactgtaaggaggttttgttggaatttcggaaaaaaatagccgagaataaggctaaagccgtgagaaaagatattcagaggttgtccctcaacaatgacatcttcgaagctaacagcgattctgaccagcaatcagagacaaaggaggacacttcacctaaaaagaaaaagaagaaattacgacaaagagaagaaaaaagccccgacgacctgaagaagaagaaagccaaagcaggtaagctgaaggacaaaagtaaaccggatctggagagtagcttagagagtctcgtgtttgacctccgaaccaaaaagagaatctctgaggccaaggaggagctgaaggagtcaaagaagcctaagaaggatgaggttaaagaaacaaaagaattaaagaaggtcaaaaagggagagattagagacctgaagaccaaaacacgggaagaccccaaggagaatcgaaaaaccaagaaggagaagtttgttgaatctcaagtggagagtgagagctccgtactgaacgacagccctttccctgaggacgactctgagggactgcactcagatagcagggaagagaaacaaaatacaaaaagcgccagggagcgtgcagggcaagacatggggctggaacacggctttgagaaaccactggacagtgccatgtctgctgaggaagataccgatgtcaggggacgccggaaaaagaagactcctcgcaaggccgaggacacccgggagaaccgaaagctcgagaataaaaacgccttcctcgagaagaagaccgttcctaagaaacagcgtaatcaggataggagcaaatcagccgctgagctcgaaaaactgatgcctgtgagcgcccagactcccaagggcaggcgcctatctggggaggaacgtggcctgtggtcaaccgattcagctgaggaggacaaggagactaaacgaaacgagtcaaaagaaaagtatcaaaagaggcacgactctgacaaagaggagaaggggcggaaagagcccaaaggattgaaaacattgaaggagattcggaatgctttcgacttgttcaagctgactccagaggaaaagaatgacgtgtcggagaacaaccggaaaagggaggaaatccctctggactttaagacaattgacgaccataagaccaaggagaacaaacagagcttgaaagaaagacggaatacaagagatgagactgacacgtgggcttatattgctgcggagggtgaccaagaagtgctcgactctgtgtgccaagctgacgaaaattcagacgggagacagcagatcctgtcccttggcatggatctacagttagagtggatgaaactcgaggatttccagaagcacctggacggcaaggacgagaacttcgccgcaacggatgcaattccctctaatgtgctccgcgatgccgttaagaagaaaaaaaagaagaaattccttgggacctacaccttcttcttatttttcttcttcgaaaaacctgacctcgttcctttattctag

SEQ ID NO: 124898 - DNA, 3087 bp, synthetic construct
  misc_feature 1..3087: note = Description of Artificial Sequence: Synthetic coding sequence
  source 1..3087: mol_type = other DNA
atgggctttttcagcctgagttctgaaagaaatgagagcgttattcactaccccgaaagcaccgagccagaaatacagcaggagatgagcacatctcagcccgattgtaacgtggactcctgttcagtgtcgagcggatacggcacattctgcatttctgaactgaatttatacaagtcgaaggacccgaaggagtttatggaacatattgacgtgcctaagggtcaatatgttgcccccgctgttccagccgagagcctggtcgatggcgttaaaaatgagaatttttatattcagacccctgaagaatgtcatgtctccctgaaagaggacgtcagtatatcacccggcgagtttgaacacaacttcctgggagagaacaaggtttcagaggtttactctggtaaaaccaacagcaacgccataacaagttgggctcagaagctgaagcagaatcagccgaaaagggcgcacgtggaggacggcggcagccgctctaaacagggaaacgaacagagcaagaagacacccatagagaagtctgactttgccgccgcgactcaccccagagcattttacctatccaaacccgatgaaacacccaatgcctggatgtctgacagcggcacggggctgacatattggaaacttgaggagaaagatatgcaccactcactgcctgagactctcgagaaaacattcatatccctgagctcaaccgacgtctcaccaaaccagagcaacacgtctaatgagatgaagctcccctcgctgaaggatatttattacaaaaaacagcgggagaataagcagctccctgagcggaatttgacgtcagccagtaaccccaatcatccgcccgaggtgctgactcttgaccccacactgcacatgaagcccaaacagcagatttcaggcattcagccacatggactgccaaacgctctggacgacagaatctctttctcacctgactcagttttggaaccgagtatgtcttctccatcagatattgattcctttagccaggcctccaatgtgacctctcagttacccggctttcccaagtacccttctcataccaaggcctcgcccgtcgacagctggaaaaaccagacgtttcaaaatgagtcacgcacaagcagcaccttcccctccgtgtacacaataacatccaatgatatctcagttaacaccgtcgacgaggaaaatacagtcatggtcgcatcagccagcgtttcccagtctcagttgccaggcacggccaacagcgtacccgaatgtatttctctcacctcactcgaggatccggtgatcctgtcaaagattcgacagaacctgaaagaaaagcacgccagacacatcgctgatcttcgagcctattatgaatccgagatcaatagcctgaaacagaagctggaggccaaggaaatttctggagtggaagactggaagatcactaaccagatactagttgaccggtgtggccagctcgatagcgccctgcacgaggctacatcgcgagtgaggacactggagaataagaacaatctcttggaaatagaggttaatgaccttagggaacggttctccgccgcatcttctgcttccaaaatactgcaggaaaggattgaggaaatgcggacaagctcaaaagagaaggataacactatcataaggctgaaatcacggctccaggacctggaagaagcctttgagaacgcttataaactctccgacgacaaggaggcacagcttaaacaggagaataaaatgttccaagatctgctgggggaatacgaatctctgggcaaggaacatcggagagtgaaggacgccctgaataccacggagaataagctcttggacgcctacactcagatttctgatctcaaaagaatgataagcaagctggaggcccaggtgaaacaggttgagcatgagaatatgttatctctgcgacacaatagtaggattcacgttcgaccgtctcgagccaacacactggccacctctgatgtgtcccgcagaaagtggctcatacctggagcggagtactccattttcacaggccagcctcttgacacccaggattccaacgtagataatcagctggaggagacctgctcactggggcatagatctccgctcgagaaggacagttccccagggtcctcttctacatccctgctgatcaagaagcaacgggagacatctgacacccccatcatgagggctctcaaagagcttgacgaaggcaagatcttcaagaattgggggacacagacggagaaagaggacaccagcaatatcaaccctcgacagactgaaaccagtgtgaatgctagcagaagcccggagaaatgcgcacagcagagacagaagcggttgaatagcgcatcgcaacggagttccagccttcccccttccaacaggaagtccagcactcccaccaaaagggagattatgttaacccctgtcacagtggcctattcaccgaagaggtctccaaaagagaatctttcccccggctttagtcacctgttgagtaagaatgagtccagcccaatcagatttgacatcttgttagacgacctggacactgttcccgtgagcactctccagcggaccaacccccggaagcagctgcaattcctgcccctggatgactccgaagaaaaaacctattccgaaaaagccacagataatcacgttaatcattcttcttgccctgaacccgtccctaacggcgttaaaaaggtgtctgtgaggaccgcctgggagaaaaacaaaagcgtgtcgtatgagcagtgtaaaccagtcagtgttacgccacagggtaacgattttgagtacaccgcaaaaatccgcacactggcggagacagaacgctttttcgatgagttgactaaagagaaggatcaaatagaagccgccctatcccgcatgccatcacccggtggaaggatcacacttcagacccgactgaaccagacacctcagatttgtgaagagagttcccacaagtgcgcctttgccgggcattatgtgccgtgccatctgtacgattacaggttccagggctag

SEQ ID NO: 124899 - DNA, 3096 bp, synthetic construct
  misc_feature 1..3096: note = Description of Artificial Sequence: Synthetic coding sequence
  source 1..3096: mol_type = other DNA
atgggcttctttagcctgtcctccgaacgaaatgagagtgtgatccactatccagagagtacggaacccgaaatccagcaagagatgagcacctctcaacccgactgcaacgtggattcttgctctgtcagttccggctacggcacattttgtattagtgagctgaacctatataaaagcaaagaccccaaagaattcatggagcatatcgacgtgccaaagggccagtatgtcgccccagcggtgcctgcagaatcccttgtggatggagtaaaaaacgagaacttctacattcagaccccagaagagtgtcacgtaagcctcaaagaggacgtgtctatcagccccggtgagttcgagcataatttcctgggcgaaaacaaagtctcggaggtctactcaggtaaaaccaattcgaatgctatcacttcgtgggcccaaaagcttaagcaaaaccaacccaaaagggcccacgtggaggatggtggctccaggtctaaacagggaaacgaacagtcgaagaagactcccatcgagaaatcagatttcgctgcggccacccacccaagagcattctacttatctaagcctgacgaaacccccaacgcatggatgtccgacagtggaacggggctgacatactggaaactcgaggaaaaggatatgcatcattccctgcccgaaaccctggagaaaacgttcatctctctatcctccaccgacgtgtcgccaaaccagagcaacaccagcaatgaaatgaagctgcccagtctgaaagatatctattacaagaaacagagagagaacaaacagctgcctgagaggaatttgacaagtgcctcgaatcccaaccaccctcctgaagtccttaccctggatccaacgctacacatgaaaccaaagcagcaaataagcggaatccagccccacgggctccccaacgctctcgatgaccggatttctttttcccctgactccgtgttagagccaagcatgtcatcccccagcgatatcgacagttttagccaagcatcgaatgtgaccagccaacttcccggcttcccaaaataccctagccacaccaaagcatcccctgtggatagttggaagaaccagacatttcagaacgagagccggacgagtagtacatttccctccgtttacaccatcacatccaacgacattagcgtcaacacagtggatgaagagaacaccgtgatggtagcaagcgctagtgtgtctcagtcccagctgcctggaaccgctaacagtgttccagagtgtatatctttgacatctcttgaggaccctgtgatcctatccaagatccggcagaacctgaaagaaaagcacgctcggcatattgcggacctaagagcatactatgagagcgaaatcaactcactcaagcagaaattagaggccaaagaaatttcaggggtggaggactggaaaataaccaaccagattttggtcgatcgatgcggccagctggattcagcgctgcacgaagccacaagcagagtccgaaccttagaaaataaaaacaacctactggaaatcgaggtcaatgatctaagggaacgattcagcgcggcttcatctgccagtaagatcttacaggagaggatagaggagatgaggaccagttcaaaagaaaaggacaacaccataattcgtcttaagtcaaggctacaggacttagaagaggcgtttgagaacgcctataagttgagcgacgacaaagaggcacagctgaaacaggaaaacaagatgttccaggacctcttaggcgaatatgaaagtctggggaaggaacacaggcgcgtgaaggacgccttaaacactactgaaaacaaactgctggatgcatatactcagattagtgacctgaaaagaatgatcagcaagctagaagcacaggttaagcaggttgagcatgagaacatgctgtctctgcgtcataattcacggatccatgtccggccctctagggccaacactttggctacaagcgacgttagcaggcggaaatggctcatccccggagctgaatactctattttcacagggcagccgctggacactcaggactctaacgtggacaaccagcttgaggagacctgctcactgggtcatcggtcgcctctcgaaaaagatagctcccctggttcaagtagcaccagccttctgatcaaaaaacaacgcgagactagcgacactccaatcatgcgagccttgaaggagctcgatgagggtaagattttcaagaattgggggactcaaacagagaaagaggataccagtaacatcaatccacgccaaacggagacctccgtgaacgcctccaggagtccagagaagtgcgctcaacaaagacagaaaagactaaattccgcatcccaacgctcgtccagcttaccacccagcaataggaagagcagcactcccaccaagcgcgagatcatgcttaccccagtgaccgtcgcctatagccccaaacgcagccccaaagaaaacctctcccctgggttctctcacctcctcagcaaaaatgagtccagtcccattaggttcgacatccttttagatgaccttgataccgtgcctgtctcaaccctgcagcgcacaaatcctcggaagcagctccagttcctacctctggatgattcggaggagaaaacttacagtgaaaaagctaccgacaaccacgtgaaccactcttcttgccctgagcccgttcccaacggggtgaagaaggtgtctgtcagaaccgcctgggaaaaaaataaatccgtctcctatgaacagtgcaagccagtaagcgtcaccccccaaggcaatgattttgaatacacagcaaaaatccgcacattggcagaaacagaacggttcttcgacgagttgaccaaagaaaaggatcaaattgaggctgccctgtcaaggatgccaagccccggaggacgaattaccctccagacccgtctaaaccaagaagcccttgaggaccggttagagcggattaatagagaactgggatcagtgcggatgacgctcaagaaattccacgttttgagaactagcgctaatctgtag

SEQ ID NO: 124900 - DNA, 1167 bp, synthetic construct
  misc_feature 1..1167: note = Description of Artificial Sequence: Synthetic coding sequence
  source 1..1167: mol_type = other DNA
atggagccctcacctgccgctggaggcctggaaacaacccgactggtcagtccaagagaccgcggcggagccggcggcagtctcagactgaaatcactatttacggagccgagcgagcccctgcccgaggagtcaaaaccagtggaaatgcccttccaccattgtcatcgggatcccctgccacctccaggactcaccccagagcgcctgcatgcgcgccggcaactgtacgccgcatgcgcagtgtgctttgttttcatggccggcgaagtcgtggggggctatctggcacattcactggcaatcatgacagatgccgcccatctacttgccgatgtcggaagtatgatgggctccttgttttcgctatggctatctacgcgcccggcaaccaggactatgacctttggatggcatcgctcggaaacccttggggctctggctagcgtggtctctctttggatggttacagggattctgctctacctggcctttgtgcgcctgttgcactctgactatcatatagaaggaggcgcaatgctgctaactgcaagtatcgcagtgtgtgctaacctgcttatggcatttgtgctgcatcaagcaggacccccacacagtcacggcagtcggggggcagaatacgcccctctggaagaggggccagaagagcccctacctctcggaaatactagtgtgcgggctgcatttgtgcacgtgctgggagacctactgcagtcgtttggggtcctcgctgccagtattctgatctattttaaaccacagtacaaggctgcagaccctatttctacgttcctgttctccatttgtgccttgggatccacagcgcctactctcagagatgtcctgcgcatcctcatggaaggcacacctcgcaatgttggttttgagcctgttagggatacgctgttgtccgtccctggagtgcgcgctacgcatgagcttcatctgtgggccctgactctgacataccacgtcgcaagcgcccatctcgccatcgattcaaccgcagatcctgaagccgtgcttgcagaagcctcatccagactttattctcgattcgggttctccagctgtacactgcaggtcgaacaatatcagcccgagatggcccagtgcctgcgttgtcaggaacctccccaggcctag

SEQ ID NO: 124901 - DNA, 363 bp, synthetic construct
  misc_feature 1..363: note = Description of Artificial Sequence: Synthetic coding sequence
  source 1..363: mol_type = other DNA
atgtgccatttgtatgaggggccggtcgtgggggggtggtataaggtcttggaccggttcatccctggcactacaaaagtcgacgctctgaagaagatgttgctcgaccagggcggattcgccccatgctttctgggatgcttcctgcccctggtgggagcattgaatgggctgagcgcccaggacaattgggccaaactccagagggattatccagatgccctgatcaccaattattatctctggcctgcggtacagctggctaatttctacctggtgcccctgcactatcgcctagcagttgtccagtgtgtggcagtgatatggaacagttatctaagctggaaagcccatagattatag

SEQ ID NO: 124902 - DNA, 531 bp, synthetic construct
  misc_feature 1..531: note = Description of Artificial Sequence: Synthetic coding sequence
  source 1..531: mol_type = other DNA
atggcgctctggagagcttatcagcgtgccctggccgcccatccctggaaggtgcaggtgctcacggctggaagtctaatgggtcttggcgacataatcagtcagcagctggtcgagcgacgcgggctccaggagcatcaacgcggacgcaccttgaccatggtgagccttggttgcggattcgtgggccctgtcgtgggcggttggtataaagtgctggatagattcattccaggaaccaccaaagtcgacgctcttaagaaaatgctactggatcaaggagggtttgctccctgctttctggggtgtttcctacccctggttggcgctctcaacggtctgagtgcccaagacaattgggccaagttacagcgcgactatcctgatgcactgattacaaactactatctgtggcctgccgtccagctggctaacttctatctggtgccactccattacaggctggccgtagtccaatgcgtggcagttatctggaattcatacctaagctggaaggcgcatagactgtag

SEQ ID NO: 124903 - DNA, 513 bp, synthetic construct
  misc_feature 1..513: note = Description of Artificial Sequence: Synthetic coding sequence
  source 1..513: mol_type = other DNA
atggccctgtggcgggcctaccagcgcgcactggccgcccacccctggaaggtccaggtccttaccgccggcagcctcatggggctgggcgatattatatctcagcaactggtggagaggaggggactgcaagagcaccagcgcgggcggaccctcactatggtttccctcggttgtggtttcgtcggtcccgtcgtgggggggtggtacaaggtcctcgaccggttcattcccggcacaactaaggtcgacgctttaaagaagatgcttctggaccagggcggcttcgcgccctgcttcctgggttgcttcttaccacttgttggagccctaaacggccttagtgcccaggataattgggccaagctccagcgtgattatccggatgcacttattacaaattattatgtgggcagatgtcctatgtgttgctgctaccttgaattactaccagtgctggagggcacctcagctttgtctctgcctcatagcatcgtttcgacgctgcagtag

SEQ ID NO: 124904 - DNA, 342 bp, synthetic construct
  misc_feature 1..342: note = Description of Artificial Sequence: Synthetic coding sequence
  source 1..342: mol_type = other DNA
atggcgttgtggcgggcttatcaacgggccttggcagcacacccttggaaggtccaagtccttacagccgggtcactgatggggcttggagatatcatttcccagcagctggtagagcgacggggcctgcaggaacaccagagaggcaggaccctgacaatggtgagcttgggatgcgggttcgtcgactaccccgatgctctcattaccaactactacttgtggcctgccgtccagctcgcaaatttctatctggtgccacttcattacagactggctgttgtgcaatgcgtggccgtgatatggaattcttacctgtcctggaaagctcatcgcctgtag

SEQ ID NO: 124905 - DNA, 576 bp, synthetic construct
  misc_feature 1..576: note = Description of Artificial Sequence: Synthetic coding sequence
  source 1..576: mol_type = other DNA
atggccctctggcgggcctaccagcgagccctggctgcccacccgtggaaagtccaggttctgacagcagcccaccctcggagatgcccggataacacttgcgtgccatgtatcggatcacttatgggcctgggtgatatcatttctcaacaactggtggagagacggggactgcaggaacatcagcgtggaagaactttaactatggtttcactgggatgcggattcgtggggcccgtggtcggtggctggtataaagtgctggatcgtttcataccagggactactaaggttgatgcgctcaagaaaatgctgctggaccaggggggctttgcgccatgttttctaggctgtttccttccattggtgggtgcccttaatgggctgagtgcgcaggacaattgggcaaaactccagagggattatcccgatgcccttattactaattattatctgtggccagcagtgcagctcgcaaatttctacctggtcccactgcactaccgccttgcggtggtccagtgcgtggcagtgatatggaattcatacctgtcctggaaagcccatcgtctgtag

SEQ ID NO: 124906 - DNA, 348 bp, synthetic construct
  misc_feature 1..348: note = Description of Artificial Sequence: Synthetic coding sequence
  source 1..348: mol_type = other DNA
atggggctaggggacattatttcccagcagctggtcgagcgaaggggcctccaggagcaccagcgtggacggacactgactatggtgtctctgggctgcgggttcgttggtcctgtcgtggggggctggtataaggtgctggacaggtttatccctggaacaacaaaggttgatgccctgaaaaaaatgctgctggaccagggtggcttcgcaccatgcttcctgggatgctttctgcccttggtaggcgccttgaatggtctctccgctcaagataactgggctaaactgcagcgtgactacccggacgcgctgatcactaactactatttgtggcctgccgtttag

SEQ ID NO: 124907 - DNA, 366 bp, synthetic construct
  misc_feature 1..366: note = Description of Artificial Sequence: Synthetic coding sequence
  source 1..366: mol_type = other DNA
tagagtctcatgggtctgggtgacatcatctctcagcagttggttgagcggagggggcttcaagaacaccagcgggggcgcacactgacaatggttagcctggggtgcggctttgttgggcccgtggtcggtggatggtacaaggttctcgatagatttataccaggaacaacaaaagtcgatgctctaaaaaagatgctactcgaccaggactaccctgacgccctgattacaaattattacttgtggccagcagtacaactcgctaatttctacctggtgccattacactataggctcgccgtcgttcaatgtgtcgcggtaatttggaacagttacctgtcatggaaagctcatagactctag

SEQ ID NO: 124908 - DNA, 204 bp, synthetic construct
  misc_feature 1..204: note = Description of Artificial Sequence: Synthetic coding sequence
  source 1..204: mol_type = other DNA
tgagattcccaggggaaaaagaccggatttacaggtattaaaaaaggagactaccccgacgccctgataaccaactactatctgtggcctgcggtgcagctcgcaaatttctatctagtgccactccattaccgtctggccgtggtccaatgtgtcgccgtgatctggaactcctacttgtcttggaaagcacatcgactgtag

SEQ ID NO: 124909 - DNA, 912 bp, synthetic construct
  misc_feature 1..912: note = Description of Artificial Sequence: Synthetic coding sequence
  source 1..912: mol_type = other DNA
atggcgcccgccgcagatatgaccagtctgcccctcggcgtgaaagtggaagatagtgcctttgggaagcctgcgggaggtggtgcaggccaggccccctctgcagccgcggccaccgccgccgccatgggagccgacgaggagggagctaaacccaaagtgtccccatcccttctgcccttttcagttgaggccctgatggcggaccatcgcaagcccggggcaaaagaatccgcccttgccccctcagagggcgttcaggcagctggtggctctgctcagccactgggcgtgcctcctggcagcctcggagctccagacgcgccatcaagtccccgcccactgggtcacttttcagttggaggcctccttaagttgcccgaagacgccttagtaaaggctgagagtcccgagaaaccggaacggacgccttggatgcaatcaccgcgcttcagcccaccaccagcaagacgtctctcaccacctgcctgtaccctgcggaagcacaagaccaaccggaagccaagaaccccctttacaaccgctcagctccttgcattggaacggaagttcagacagaaacaatatcttagcattgcagagagggccgaatttagttctagcctgtcattgaccgaaacccaggttaagatctggttccagaacagacgcgccaaggctaaacggttgcaagaagctgaattggagaagctgaaaatggccgctaagcctatgcttccaccggcggccttcggcctgtcttttccactaggggggcccgctgctgtcgctgctgcagcaggggccagcctctatggagcctcaggcccattccagcgagccgccctgcccgtggcccccgtagggttatataccgcacacgtaggctactccatgtatcacctaacgtag

SEQ ID NO: 124910 - DNA, 804 bp, synthetic construct
  misc_feature 1..804: note = Description of Artificial Sequence: Synthetic coding sequence
  source 1..804: mol_type = other DNA
atggcgagcccctccaaaggtaatgacttgttctctccagacgaggagggacccgctgtggtcgccgggccaggccctggccccggcggcgccgaaggcgctgccgaagaaaggcgcgtcaaagtgagtagcctgccgttcagcgtggaggccctgatgtctgataagaagccccccaaagaggcttcccccctcccggcagaaagcgccagtgcgggtgccaccctaaggcctctactgttgtcaggtcacggtgcaagagaagctcattcaccaggtccactcgtgaaaccattcgagaccgcgagcgtgaaaagtgaaaatagtgaggacggagccgcttggatgcaggaacctggcaggtactctcccccaccccggcacatgtctccaaccacttgtacgcttcgaaagcataagaccaataggaaaccaagaacaccttttacaacatcacaactgctggccctcgagagaaagttccgacaaaagcagtacctaagcattgccgaacgagctgagttcagttcttcgcttaacctgacggagacccaagtcaagatctggttccagaacaggagagcaaaagccaaacgtctgcaggaggctgagttggagaaattgaagatggctgctaagccaatgctgccctcctcattcagcctgcccttccctatctcttctcccctgcaagctgctagcatatatggcgcctcctaccctttccaccgacctgttttgccaatcccccctgtggggttgtatgccacgcccgtgggttacggcatgtaccacctctcttag

SEQ ID NO: 124911 - DNA, 981 bp, synthetic construct
  misc_feature 1..981: note = Description of Artificial Sequence: Synthetic coding sequence
  source 1..981: mol_type = other DNA
atgaacacatcaccggggacagtaggctcggacccggtgattttagccacggccggctacgatcacaccgtgaggttttggcaggcccattccgggatctgcactaggaccgtccagcatcaagattcccaggtgaacgcactcgaagttacaccagatcgaagcatgattgcggcagccgggtatcagcatattcgcatgtacgacttgaatagtaataatcctaaccccatcatctcatacgatggcgtgaataaaaatattgcctccgtgggcttccacgaagacggaagatggatgtacactggtggagaagattgcactgcaagaatctgggacctgcggtctaggaatctacaatgtcagagaattttccaggttaacgctcccattaactgcgtctgcctgcaccccaaccaggcagagctgatcgtcggggaccagagcggagcaatccatatctgggacctgaagactgatcataacgaacagttgattccagagcctgaagtgtcaataacgagtgcccacatcgatcccgacgcgagctatatggccgccgtgaattcgacaggaaattgttacgtgtggaatctcacgggaggcatcggagacgaagtgactcagctgatccctaagaccaagatccccgcacacacccgctacgctctgcagtgtagattttcgccagattcaaccctcctggccacatgctccgcggaccagacttgtaagatctggagaacctcaaatttcagcctcatgactgagctttccatcaagagcgggaatcccggggaatctagccgtggctggatgtggggatgcgcttttagcggtgacagccagtacatagttactgcctcttccgataacctggctcgtctctggtgtgtggagaccggggagattaagcgcgaatacggcggtcatcagaaggccgtggtctgtctggcctttaatgactccgttctggggtag

SEQ ID NO: 124912 - DNA, 981 bp, synthetic construct
  misc_feature 1..981: note = Description of Artificial Sequence: Synthetic coding sequence
  source 1..981: mol_type = other DNA
atgaacacttcccccggaaccgtgggtagcgaccccgtgattctggccaccgcgggctacgatcatactgtgcggttctggcaggcccacagcggcatctgtactaggactgtgcagcaccaggactcccaagtgaacgccttggaagtgacccccgaccgctcaatgattgccgccgccggatatcaacatatcagaatgtacgacctgaattccaataaccccaaccccatcatcagttatgatggtgtgaataagaacattgcatctgtcggcttccatgaggatggccgctggatgtacacaggcggtgaggattgcaccgctagaatctgggacctgcgttctagaaacctgcaatgccaacggattttccaggttaatgcccccatcaactgcgtttgcctgcacccgaatcaggcagaactcatagtcggcgaccagtcgggtgctattcacatttgggatttgaagacggatcataatgaacaactaatccccgagcctgaggtgagcattaccagtgcccacatcgatcccgacgcctcttacatggctgccgtgaactccactggcaactgttacgtctggaacctgaccggtggcatcggcgatgaggttacccagctgatccccaaaaccaaaattcccgcccacactaggtatgctctacaatgtcgtttttcacctgacagtaccctccttgccacttgtagtgccgatcagacttgcaaaatctggagaactagtaatttcagtctgatgactgaactgagcataaagtccggcaatccaggagagagttcccgaggctggatgtggggatgcgcctttagtggagactctcaatatatcgtgaccgcttcttctgacaacctcgccaggttgtggtgcgtggagactggcgaaatcaagagggaatacggaggccatcagaaggcagtggtgtgtcttgccttcaatgattcagtgctcggatag

SEQ ID NO: 124913 - DNA, 984 bp, synthetic construct
  misc_feature 1..984: note = Description of Artificial Sequence: Synthetic coding sequence
  source 1..984: mol_type = other DNA
atgaacacaagccccggaactgtaggctcggacccagtaatcctcgccaccgccggctatgaccatacagtgcgcttttggcaggcccattcaggcatatgcacacgcacggttcagcaccaggatagtcaggtgaacgcccttgaggtgacccccgatagatcaatgattgcagctgcaggataccagcatattcgcatgtacgatctgaactcaaataatccaaaccccattatatcctatgatggggtcaacaaaaacatcgccagtgtaggttttcatgaggacggtcggtggatgtacacaggcggggaggactgtacagcgagaatttgggatctgcggtctaggaatctgcaatgccagaggatcttccaagtgaacgcaccgatcaattgtgtgtgcctgcatccaaatcaggccgagctgattgtgggggatcagagcggagccatacatatttgggacctgaaaactgaccataatgagcaattgatcccagagccggaggtatcgattacatcggcccacatcgatcctgatgctagctatatggctgctgtgaattccaccggcaattgctatgtctggaacttaactgggggtatcggagatgaggttacgcagctgattccaaagacaaagatccctgcgcacaccaggtatgcacttcaatgccgattctctccagattccactttgctggccacgtgcagcgctgaccagacttgtaaaatttggcggaccagtaacttcagtctcatgactgaactgtctattaagagcggcaatccaggcgagtcgtcgagagggtggatgtggggttgtgcatttagcggggacagccaatatattgtgaccggggaacccaggccagggctgccgcacccgtggccacccgcactcgcttcaagggctagtcctccacgactgcaacttcccctgtgctggggccgactgttggggctccatctgaggtcctag

SEQ ID NO: 124914 - DNA, 654 bp, synthetic construct
  misc_feature 1..654: note = Description of Artificial Sequence: Synthetic coding sequence
  source 1..654: mol_type = other DNA
atggagcatgcaccctggagtcctggtgctagtagtagggctcgcgcagggcacacaatgaatacaagccccgggaccgtgggatccgaccctgtgattctcgcaacggcagggtacgaccatacggtacgattctggcaggcccattccgggatctgtacaagaaccgtgcaacaccaggatagtcaggtgaatgctcttgaggtgactcctgacaggtctatgatcgcggctgccggataccaacacattagaatgtacgatctgaattctaataacccaaatcccatcatctcttatgacggggtgaacaagaacatagctagtgtcgggttccatgaagatggccgttggatgtatactgggggtgaagactgtactgctcgcatttgggatctgcgcagtcggaatctgcagtgtcagcgaatattccaggtcaacgcccctattaactgcgtttgtcttcaccccaatcaggccgaactgattgtaggggatcagtccggagccatacatatctgggatctaaagacagatcataacgagcagctcattccggagccagaagtaagcattacctccgctcacatcgaccccgatgccagctatatggccgctgtaaatagcacggccccccgccacctcctggggtag

SEQ ID NO: 124915 - DNA, 981 bp, synthetic construct
  misc_feature 1..981: note = Description of Artificial Sequence: Synthetic coding sequence
  source 1..981: mol_type = other DNA
atgaacacctcaccagggacggtgggctctgatcctgtgatcctggccactgccgggtacgaccacactgtgagattctggcaggctcacagcggaatatgtacacgtaccgttcagcaccaggactcgcaggtcaacgcactggaggtgacccctgatagatcaatgattgccgccgcggggtatcagcacatacgtatgtacgatctgaactccaataatcccaaccccatcattagctacgatggagttaacaagaacattgctagtgttgggttccatgaggatggccgctggatgtacacagggggggaggattgtactgcaagaatctgggacctcaggtccaggaatcttcagtgccagcggatttttcaggtaaatgctcccatcaactgcgtttgcctgcatcctaatcaagcagaattaattgtgggcgaccagtccggggctatacacatctgggatctcaaaacagaccacaacgagcaactgattcccgagccagaggtgagtatcaccagcgcccacatcgaccccgatgcctcttacatggctgctgtcaatagcactggaaactgctacgtctggaaccttactggtgggattggagacgaagttacccagctgatacctaagactaagattccagcccatacccggtacgccctgcagtgtaggttttctcctgatagtaccctcctggccacttgctcagccgaccagacatgcaagatctggagaaccagcaacttcagcctgatgacagagctttccattaaaagcggtaacccgggagaatcctctagagggtggatgtggggatgcgctttttccggggactcccagtatatcgttaccgcttcctcagataatctcgcccgattatggtgcgtggagacaggggagatcaagagggagtatgggggtcaccaaaaagccgtagtgtgcctggcctttaacgacagtgtcctagggtag

SEQ ID NO: 124916 - DNA, 981 bp, synthetic construct
  misc_feature 1..981: note = Description of Artificial Sequence: Synthetic coding sequence
  source 1..981: mol_type = other DNA
atgaatacgagccccggtaccgttgggagtgaccccgtgattcttgctacagctggatacgaccacactgtgagattctggcaggcacatagtgggatttgcacccgaacggtccagcatcaggactcacaagtaaacgccctcgaagtgaccccggacaggtcaatgatcgccgccgccggctaccagcacattcgaatgtatgacctcaactccaacaatccgaatccgatcatttcctatgacggggtcaataagaatatcgctagcgtgggctttcacgaggacggccgttggatgtacacaggcggcgaggactgtaccgcccggatttgggatctacggtcacgcaacctgcagtgccagagaatttttcaggttaacgctcccatcaattgcgtttgcctccaccccaaccaagctgagcttatagtgggggaccaaagcggagccatccacatctgggatctgaagaccgatcacaatgagcaattgatacccgaaccagaggtcagtatcacatccgcacacattgatccggatgcttcttacatggccgctgtgaactcaaccggcaactgctatgtctggaatctaactgggggaattggggacgaagtaacccagctcatcccaaaaacgaagatcccagcccacacaagatatgctctccagtgtcgcttttcgccagattccacgctccttgccacttgctccgcggaccaaacatgcaaaatctggagaacgtctaacttttcgttgatgactgagcttagcatcaagtcgggtaatcctggagaatcatcgcgtggctggatgtggggatgcgccttttcaggggacagtcaatacatagttactgcatctagtgataatctggctagactctggtgcgtggagacaggagagatcaaacgggagtacggcggacatcagaaggcggtggtgtgtctagcgttcaatgattccgtgctggggtag

SEQ ID NO: 124917 - DNA, 1473 bp, synthetic construct
  misc_feature 1..1473: note = Description of Artificial Sequence: Synthetic coding sequence
  source 1..1473: mol_type = other DNA
atggcacagagggctgtgtggctcatcagccacgaaccaggaacccccctgtgcggaacagttaggtttagtagaaggtaccctaccgtggagaagagagccagggtttttaacggcgcttcatacgtccccgtgccagaggacggcccctttcttaaggcactactcttcgaattaaggctgctggacgacgataaagatttcgtcgagagccgagactcttgctctcgcataaataagacatctatctacgggctactaatcgggggagaagaactgtggcccgtggtagccttcctgaagaatgatatgatttacgcttgtgtgcctctcgtagagcagaccttgtcaccaagaccgcccctaattagcgtgtctggggtttctcagggctttgaattcctattcggcatccaggactttttatattccggacagaaaaacgacagtgagttaaataccaagctctcacagctacccgatctgcttttgcaggcctgcccattcgggacccttttggacgctaatctccagaacagcctcgacaatactaattttgcctctgtcacccagccacaaaagcaacctgcctggaagactggcacatacaaaggaaaaccacaagtttcgatatcgatcactgagaaagtcaagtctatgcagtatgataagcaaggcatcgcggatacatggcaagtggtgggcaccgtgacttgtaaatgtgacctagaagggattatgcctaatgtcacgatcagccttagcctgccgacgaacggtagtcctctccaggacattctggtgcacccctgtgtgactagtctcgattccgctatcttgacttcctcctctatcgatgctatggatgacagcgccttctccggaccatacaagtttccattcacaccccccctggagtcctttaacctgtgtttttacacatcacaggtgccagttccgcccattctgggattttaccagatgaaggaagaggaagtgcagctcagaatcactatcaacttgaagctgcacgagagcgtaaagaataacttcgagttctgtgaagctcatatccctttttataacagggggcctatcactcacctcgagtataaaacttccttcggccagctggaagtctttagagagaaatcactgctcatttggataatcggacagaagttccccaaatcaatggagatctccttgtcaggtactgttacttttggagccaaatcgcacgagaagcagccgttcgaccccatctgcaccggggaaaccgcctatctgaagctgcacttccgtatcctcgactataccctcacaggctgttacgcagatcaacattcagtgcaggtgttcgcttctggcaaacccaagatttccgcccaccgcaagctgattagtagtgactattatatttggaactccaaagcccctgccccagtgacgtatggatcccttctcctctag

SEQ ID NO: 124918 - DNA, 16437 bp, synthetic construct
  misc_feature 1..16437: note = Description of Artificial Sequence: Synthetic coding sequence
  source 1..16437: mol_type = other DNA
atgcttgtgatctggattcttactttagccctaagactgtgcgccagcgtaactaccgtgacccctgagggatctgctgttcacaaagctatctcacagcagggcaccctgtggactggagaagtcctagagaagcagacggtggagcaaggcaaatcgacactgcgacgtcagaaaaaccactttcaccggtcggccggtgaacttagatgtagaaacgcccttaaggacgagggggcttctgccgggtggtccgtgatgtttgcaggtgaatccgtggtggtgcttgtgcacctttggatgactggtgcccgggtgaaaaatctcgggttggtggagttcgcttctcctggggacgacggtgatggtcgtgccgaagggtttagcctgggcctccccctgagtgagcaagcccgggccgctggggctagagagaaagagaggcaggagactgtgataaatcacagtacgttctctgggttcagccagatcactggctctactgtgaacaccagtattggtgggaacacaacgtctgcaagcacaccttctagctccgacccgttcaccacctttagcgattatggggtgagtgtcaccttcataacaggatctaccgccaccaagcattttctggatagttctactaacagcgggcatagtgaggaatcgaccgtgtctcatagtggccctggggccaccggaacaacactgttcccatctcactctgcaacatcagtgttcgtgggcgagccaaagacttccccaatcacatctgcgagcatggagacaaccgcacttcctggaagcaccacgaccgcaggcttatctgagaaatccacaaccttctactcatctccgagaagtccagatcgcacgttgagtcctgcaaggacaacatcgagcggcgtctctgaaaaatccacaacctcccacagtcgtccaggtcccacccataccattgccttccctgactccacaaccatgcccggtgtgagtcaagaatctacggcatctcactctattccaggatccactgataccacactttcccccggaacgaccacacccagctcgctgggccctgagtctactaccttccattctagcccaggctatactaagaccacacggttacccgacaataccaccacctctgggcttttagaggcctcaacacctgtacattcctccaccggaagcccccatacaaccctgtctccgtccagtagtacaactcatgagggcgaacctacaactttccaatcatggccatcgagtaaagacacaagcccggcacctagcggcaccacttctgcctttgtcaagctcagcacaacatatcatagctcccccagttccactcctaccactcacttcagtgcctcaagcaccaccctgggccattcagaagaatcaaccccggtacactcttcaccagttgctacagccacaactccaccccccgcccggagcgccacaagtggtcacgttgaagagtccaccgcctatcacagaagtcctggctccacccagaccatgcactttcccgaaagtagcaccaccagcggacatagcgaagagagtgcaacattccacgggtcgacaactcacactaaatctagcacccctagtaccactgccgcgctggcacacacctcttaccactcaagcctgggcagtaccgaaacaacgcattttagggactccagcactatttccggtcgcagcgaggaatccaaagcaagtcattcaagtccagacgctatggcgacgaccgttctgccagccgggagcaccccaagcgtactagttggagactcaacaccctctcccataagcagtggttcgatggagacaacggcattgcccggttcgaccacgaagccaggactcagtgagaaatccacgaccttctattcctctccccggagtcccgataccactcacctgcctgcctctatgactagctcaggggttagcgaggagagcacaacgagccacagccgcccgggatccactcatacgacggcattcccaggctctactaccatgcccggcctgtcgcaagagagcactgccagccactctagccctgggccaacggataccactctttctcctggttctacaaccgctagttctctggggccggaatacaccacttttcattccagaccaggcagcaccgaaactacattgttgcccgataataccaccgcttcaggtctcctggaggcgagcatgcctgtgcatagcagcacgcgcagcccccacaccaccctatcacctgcgggtagcacaacaaggcagggggagtcaaccacattccactcctggcccagctcaaaagacacaagacccgcgccgcccactacaacaagtgcattcgtggaaccaagcaccacctctcacgggtcccccagtagcattcccacaactcacattagcgcacgcagcaccacatcgggcctggttgaagagtcgacaacctaccactcttctcccggcagcacccaaaccatgcactttcccgagagtgatactactagtggtcgcggcgaggagtctacaaccagtcacagtagtaccactcatactatttcttctgcaccatccaccacaagcgcgctggtggaggagcccacttcctatcactcatcccccggctccacagcaacaacacacttccctgactcctctactaccagcggacgcagtgaggaatccaccgcaagccatagctctcaggacgctaccggaaccatcgtgctgccggctagatcaactactagcgtgttacttggcgaaagcacgacctctcccataagtagtggctctatggaaacaaccgccctgcctggcagcacgaccacacccgggctcagcgaacgatccaccacattccacagctctcctcgtagtcccgccaccaccctcagtcccgctagcactacttcaagtggcgtttcggaagaaagcaccaccagcaggagtaggcccggttctacccataccactgcctttccagactctacaaccactcccgggttgagccgccattccacgacctcccacagcagcccagggtccacagacaccaccctcctgccggcttctaccactacctcaggcccgtctcaggagtctacaaccagccactcctcttccggatctacagacacagctttaagcccaggatcgaccaccgctctgtccttcggccaagagagcaccactttccactccaaccccgggtcaactcacaccacactttttcctgactctacaacctcatcgggcatcgtggaagctagtacaagggtgcactcctcaaccggctctccaaggaccaccctttctcccgcgtcatcaacctcccctggtctgcagggagagtctaccgccttccagacacatccagctagtacacataccacacctagtcctccgtccaccgccacagcccctgtggaggaatcaactacatatcacagaagcccaggatcgaccccaactacgcacttccctgcctcgagcacgacctctggacactcggagaagtcaaccatattccacagctctcccgacgcctctggaactacccctagcagtgcccatagcaccacctctggccgcggcgaatcaactactagtcgcatttctccaggcagcacagaaattaccaccctgcctggctccacaactacccccggcctgagcgaggcgtcaacaaccttctacagttcccccagaagtccaacaactacactatcacccgccagtatgacaagtctcggtgtaggcgaggagtcgacaacaagccgctcccagcccggctcaacccattccacggtgtcccccgcatctaccactacacccgggctgagcgaagagtcaacgaccgtatattctagctcacgcggttccacggaaaccacagtgttccctcactcgactacaacttctgtgcatggagaggagcccaccacctttcactcccgcccagcctcaactcatactaccctcttcactgaggattccacaacatccgggctaactgaggaatcaactgcatttcctgggagccccgcaagtacccagactggtctgcccgctaccctcacaactgccgacctcggggaagagtccacaacgttcccctcctcctctggctctaccggaacaaagttatcccctgcaagatccactactagcggcttggtgggcgaaagtactccaagccgcttatccccctctagtacggaaaccactaccctcccgggctctcccacgacgccctccctgtcagaaaagagtaccaccttttacacatcacctagatctccagatgccactctttcccccgctactacgacctcatcaggcgttagtgaagagagctctacttcccattctcagcctggaagtacccacacgactgccttccctgacagcaccacaacttcagaccttagtcaggaaccgaccacctcgcatagctcccagggttctacagaagccaccctgagccccggctctacaacagcctcatccctgggtcagcagagcaccacctttcattcttctcccggtgatactgagactaccctcctccccgacgataccattacgtcaggcttggtggaagcctcaactcctactcactcctctaccggctcccttcatactacgttgacacccgcttcctcaactagcgccggcctccaggaagaaagtactaccttccagagctggcctagtagctctgacaccactcctagcccccctgggaccaccgctgcaccagtggaagtttccacaacctaccactctcgtccatccagtacgcccacgactcacttttccgcctcgagtactaccctggggaggtcagaagaaagcacaaccgtgcatagctcacctggcgccaccggtacagcactcttcccaacacgttcggctacctcagtgctggtgggcgagccaactacctccccgatttctagcggcagtaccgagacaaccgccttacctggaagcacaaccacagctggcttgagcgaaaaatccaccactttctatagctctcctcgatctccagacaccaccctgagccctgcgtcaaccacaagtagcggtgtaagtgaggagtcaactacaagccattcaaggccgggatctacccacacaacagctttcccaggatcaaccactatgccaggggtgtcccaagagtcaactgccagccactcgagtccaggaagcaccgacaccactctttcgccggggtcgacaacagcttctagcttaggccccgagtccacgacattccatagttcccccggttcaacagaaacaacactgctgccagataatacgacagcctcaggattgctggaagcatccaccccagtgcacagctcaactggatctccccatacgacacttagccccgccgggtcaactaccaggcagggggaatctactacatttcagagttggcctagctcgaaggatacaatgccggcccccccaacaactacttcagccttcgtggagttgtcgacaacatctcatggcagcccgagctctacaccaactactcacttcagtgcttcctccacgactttaggacgcagcgaggaatcgaccaccgttcacagttctcctgtcgctactgcaacaacaccgtcacccgcccgaagcaccacctccggacttgtggaggagtcaacagcctatcacagtagccccggcagcacccaaacaatgcatttccccgaatcatcgacggctagtggcaggagtgaagagtctcggacgagccattcttccacgacgcacactataagctctccacccagcactacttcagctttggtggaagagccgacatcctaccactcatctccaggatctaccgcaactactcacttccctgactctagcacaacaagcggtcgctcagaagagagtactgcctctcactcctcacaggacgctacgggtacaatcgttctccccgcaagaagcacgacatctgttttattaggtgaatctacaacctctccaatcagtagcggaagcatggagacaacagcgcttcccggaagtacaacaacccctgggttgtctgaaaagagcacgacctttcactcatcccctcgaagcccagcaactacactttcacccgccagcaccacatccagtggcgttagcgaagagtctactacatcacatagcaggcctggttccacccacacaacagcatttcccgatagcacaactacacctggactttctcgccacagcacaacgagtcattcctctcccggaagtactgatactacactgctgccggccagcactacaacatctgggccatcacaggagagcaccacgtcccattctagtcctggaagtaccgataccgccctttccccgggctccacaacggctctgtcgtttggacaggagtctacaacgtttcacagttctcccggcagtacccatactacactgtttcccgactccactaccagtagcggcatagtcgaggcttctactcgggtgcattcttccacaggtagcccgagaacaacgctcagccccgctagcagtacctcgcccgggcttcagggtgagtctaccgccttccaaacacaccctgcgagtactcacacaacaccatcacccccaagtaccgcaacagccccagtggaggagagcaccacttaccataggtcccccggaagcacaccaaccacacacttccccgcctctagcaccacctccggccacagcgagaagtctactatctttcacagcagccccgacgcctccggcactacaccttcatccgctcatagcacaacatcaggcaggggcgagtccacaaccagccgcattagccctgggtcgactgagataaccacattgcctgggtcaactacaactccaggtctgagcgaagcatctacaacattctattcctccccccgttcaccaacaactaccctatcccctgcttccatgacatccctcggcgtgggtgaggaaagcacgacaagtcgctcccaacctggttctacacattcaactgtgtcccctgccagcactacgacccccggcctgtccgaagaatcaacaaccgtttactcctcatcccccggaagtaccgagacaactgtctttcctcgcaccccaacaacatcagtgcgcggagaggaacctacaaccttccactctagacccgcttctacacacactaccctcttcaccgaagattcaactacatcaggtctgacagaagagtctacagcctttccaggctccccagcatctacacaaactggtctcccagcgacactaactactgcagacctgggcgaggaatccaccacatttccttcctcctcaggcagcaccggtactacactttcaccagcccgctcaactacgagcggtctcgtgggggagtcaacgcccagtaggctgtctccatctagtacagaaaccaccacacttcccggtagcccaaccacaccgtcccttagtgagaaatccacaactttttacactagccctcgatcccctgatgccacacttagccccgccacaactactagcagcggcgtctccgaggaatcaagtaccagtcactctcagcctggctccacccacaccaccgcttttcctgattcaaccacaacccccgggttgtcacgtcatagcaccacctcccactcaagccccggttctacagatacaacccttctgcctgccagtaccacaacctctggaccctcgcaagaatcaacaacctcccattccagcccaggctcaacggacaccgcattgtcaccgggaagtacaaccgccctgagcttcggtcaggagagcaccaccttccatagttctcctggctccacccatacaaccttattccccgatagtacaacatcatcaggtatagtggaagcaagtactcgggtccactcatcgaccgggtccccaaggaccacactgagccctgcctcttccaccagtcctggcctgcagggtgagagtaccacgtttcagacccaccctgctagcacacacactaccccctctccaccatcaactgccactgcccctgtggaggaatcaacaacatatcataggtcccccggatccacaccaacaacacactttcccgcgtcctccactactagcggccattccgagaaatccacgatttttcattcttctccggacgcttctggcactactccttcgtcggcccattccaccaccagtggcagaggagagtccacgacgtcaagaatctcccccggtagcacagaaatcactaccctgccaggcagcactaccactccaggcctctcagaggctagcaccactttctactcctcacccaggagccccactacaaccctttcaccagcaagtatgaccagtctcggtgtgggagaggagtcaacaacaagccgctcccaaccagggtctactcacagcaccgtaagccctgcctctaccactacccctggcttatctgaggaatccacgacagtgtattcaagttctcccggctcgaccgagactacagtgtttcctcggtccacaacaacatcagtgagaggcgaggaacccaccactttccactcccgacccgcttctacgcacacgacactgttcaccgaggacagtacgacttcgggcctcacagaagaatcaactgcctttccggggtcacctgctagcacccaaaccggcctgccagccacgctcacaactgcagacctgggagaggagagcaccacatttccctccagctcagggagcaccggcaccaccctgagccccgctagaagcactacgagcgggctggttggcgaatcaacaccatcacgactgtcaccaagcagtaccgagactacaacccttccgggtagccctactactccctccctgtctgaaaagagtaccactttctatacctccccccgctctcccgacgccactctctccccagccaccactacgagctctggagtgtcggaggaatctagtactagccattcacagcccggcagtacacacaccactgcattcccggactctaccactacttctggcctctcccaggagcctacggcgtcccactcttctcagggctctaccgaggccaccctttctccgggctctacgactgcttcctcacttggtcagcagtccactaccttccatagctcgcccggcgacacagagactaccttattgcccgacgacaccattacaagtggccttgttgaagcttctacacctacccattcttccaccggaagtctccatactacactcactccagccagctcaacctccgcaggactgcaggaggagagcacaacgtttcagtcctggccttcctcctcggacactacacctagtcccccgggcacaactgccgcacccgtggaggtaagcacaacctatcatagtcgtccctccagcaccccaaccacacattttagcgccagctcaactactttggggagatccgaagaaagtaccaccgtgcactcatcacccggggccaccggcactgccctgttccctacacgtagtgccactagcgtgcttgtgggagaaccgaccaccagccccatcagcagcgggtccaccgagaccactgccctgcctggcagcacaacaactgcaggcctgagtgagaaatccaccactttttatagttctcccaggtccccagatactaccttgtcaccagcatcaaccacatcttccggcgtaagcgaagagtcaacaacttcccacagtcgacctgggtccacgcacaccacggcttttcccggttccaccacaatgcccggagtgtctcaggagtctactgcaagtcactcatccccgggctctaccgacaccactctgagcccaggctcaactactgcctccagccttgggccagaatcaacaactttccactcaggtccaggcagtacggaaacgaccctgctgccggataatactactgcttcaggactgctggaagcttctacccccgtgcactctagcacgggctccccccacacaactcttagtccagcggggtcaactacgcgtcagggggagtctactacattccagtcgtggccgaacagtaaggacacaacacccgctcctccgaccaccacatccgcctttgtggagctctccaccacttctcatggcagtccctccagtaccccaacgacccactttagcgcttcatctacaacgctcgggagaagtgaggagtcgactaccgtacattcatccccggtggctaccgccactactccgtctcctgctcgcagtactacatcaggcctagtagaggaatcgacgacctaccattcctccccaggatccactcaaactatgcactttccagagtccgatactaccagtggacggggtgaagaatccaccacgagccattcatcaacgacccataccataagttctgcacctagcaccacatcggcactcgttgaggagcccacttcctatcattcaagtcctggctcaaccgcaactacacacttccctgatagttcgacgacgagtggacggtcagaagagtccacggcctcccactccagccaggacgctacagggacaatagttctcccagcccgctccaccacatccgttctgcttggtgaaagcaccacttctcccatctccagtggatctatggagactactgcattaccaggatctaccactacacctggactctcagagaagagtacaacttttcactctagcccacgctcgcccgccactaccctgagcccggcctccactaccagttcaggcgtgagcgaggagtccacaacaagccactctagaccaggctctacccatactaccgcattcccagactcgaccaccaccccgggtctgagtaggcattccaccaccagccatagctccccaggctccaccgacacaactctgttaccagcaagtactacgacctcggggagctcccaagagagcacaacatcacactcctcttcaggttctactgacaccgccttgtctccggggagcacgacggcattgtcttttgggcaagaatctaccacgttccatagtagccctgggagtacccacaccacactctttcctgactctactacctcttccggaattgtggaggccagcacacgggtgcactcctctacaggatctccacggacaacactgagccccgccagctcaactagtccaggcctgcagggcgaaagcacagccttccagactcaccccgcttccacccatacaactccttcccccccctcaacagcaacagccccagttgaggagtcgacgacctaccaccggagccccggctcgaccccaacaacccattttcccgccagcagcaccactagtggacactctgagaagagcaccatcttccactccagccctgatgcaagcggaaccacaccatcttccgctcatagcacaacgagcggaagaggcgagagtacaaccagcaggatctccccagggagtaccgagattacaacgctgcccgggtcaacaaccacacctggcctgagtgaggcctctaccaccttttactcctcgccacggagccccaccactaccctgagtcctgcctctatgaccagcctcggggttggagaggagagtactacatctagaagccaacccggcagcacccacagcactgtgtcccccgcctctactaccactcctgggctatctgaagagtcgaccacggtctattcaagttctcctggctctaccgagaccactgtgtttccacggtctacaaccacaagtgttcggagggaggaacccacaacgtttcattcccgcccagccagcacacacactactttattcacagaggactccaccaccagtggactcaccgaagagagcacagcgtttcccggctctccggcatctacacagaccggcctgcccgccacactgactacggcagatcttggcgaagaatcaacaacattcccatccagttccggatccacagggactaaattgtctcccgctcgcagcactacctccggattggttggcgaatctaccccttcccgtttatcacccagtagcaccgaaaccacaaccctgcccggcagccccacgacaccttctctgtcagaaaagtctacaaccttctacacatcccctagaagcccggatgcaactttgtctccagccacaacaacatcttccggtgtttctgaagagagtagtacgtctcactcccagccgggaagtacccatacgaccgctttccctgactcaaccaccacctcaggcctgtcccaagagcctactacctctcacagctcgcagggaagcaccgaagccaccctcagccccgggtctacgaccgcatcttcactgggacaacagtctaccaccttccactccagcccaggcgacacagagaccactctgcttcctgacgataccatcacatccggcctggtggaggctagcacacctactcactcgtccactggctccctgcacaccaccctcacgccagcatcgagcacctctacaggtctgcaagaggagtccaccacattccaatcctggccctcctccagtgacaccactccgtcccccccctccaccacggccgttcctgttgaggtctccactacttaccatagccgtccgtccagcacccccacaacgcacttttcagcaagctcgacaacgttgggaagaagcgaagaatccacaacagtgcattcgtcaccaggagctactggcactgccttatttccaaccagatctgccaccagcgtacttgtgggggagcctaccacttccccaatcagctcaggaagcacagaaaccactgctcttccaggcagcacaaccactgcggggctctctgaaaaatcaacgaccttctatagcagtccccgttctccggataccactctcagtcccgcctctacgacttcttctggcgtatctgaggagagcacaacatctcactctcggccgggcagcatgcacacaaccgccttcccatcttcaaccacaatgcccggggtctcgcaagaatcaactgctagccacagctctcccggctcaaccgatacaaccctgtcccccggaagtactacggcttcctccctggggcctgagtctaccacttttcatagcagccctgggtccacagagaccaccctgcttccagacaatacgaccgccagcggcctattggaagcatcgacaccagttcactccagtactggcagcccccacacaaccttgtcccccgcaggctccacgacaaggcaaggcgaatcaacgacttttcagtcctggcctaacagtaaggatacgacccctgcaccacctactaccacatctgccttcgttgaacttagcactacttcacacggatcccccagttctaccccaacgacccattttagtgctagctcgacgacgttaggtcgcagcgaagagtccacaaccgtccactcttcccccgtggcaactgccaccactccctcccccgccaggagcaccacaagtgggctagtggaagaatctacaacctaccattctagccccgggtccacacagacgatgcactttcccgagtcaaacacaacgtccgggcggggtgaggaatctactaccagccatagtagtaccacccacacaataagcagtgcaccgtctacgactagtgccttggttgaggagccaacatcataccactcctcccccgggagcactgccaccacacattttcccgactcgtcaaccacatcaggccgcagcgaggaatcaaccgcgagtcattcttcccaggacgcgactggaacgatcgtactgccagctaggtctacaaccagcgttcttctgggcgagtccacaaccagcccgatctcctccggatccatggaaaccaccgcgttacccggaagcactacaacgcctgggttgtccgaaaagtccaccacgtttcatagcagcccttcaagcacacctaccacgcacttcagcgccagctccaccacattgggacgcagcgaggagtccacaactgtgcactctagtcctgtggccacagccacaacaccatccccagcccgctcgactaccagtggcctcgtagaggaatccaccgcctatcacagctccccgggctcaacgcaaacaatgcactttcccgaaagtagcaccgcttccgggaggtcagaggagtcgaggacatcacatagcagcacaactcacaccatctctagcccccccagcaccacctccgccctggtggaggagcccacctcgtaccattcttcccctggcagtatagcaactacccacttcccagagagctccaccacgtccggcaggtccgaggagtccacagccagccacagttcgccagataccaacgggattaccccccttccagcccattttactacatctgggaggatcgctgagtctaccacattctatataagcccaggctctatggaaaccaccttggcaagcaccgcaactactccaggtctaagtgccaaatcaacgatattgtattcctcctctagaagcccagaccagacgctgtcccctgcctcaatgacaagctcatctatttcaggcgagcccactagtctgtactcccaggcagagtctactcacactacggctttccccgcctctaccaccacaagtggattatcacaggaatccacaacattccacagtaagccagggtccactgagaccactcttagtcccggcagcatcactacgtctagctttgcacaggagtttacaacccctcattctcagccaggaagtgctctgtccacagtgagtcccgccagcacaactgtacccggactgtccgaagaaagtactaccttctactcatctcctggatctactgaaaccaccgccttttctcatagcaacacaatgtcaatccattcacaacaaagcactcccttcccggattcacccgggttcacacacactgtgctgccagcgacactcactactaccgatatcggccaggagagcaccgccttccattcctctagtgatgctaccggcacgaccccattgcccgcacgctcaaccgcgtcagacctagttggagaacctaccacgttttacattagcccttcccctacatatacaacacttttcccagcttctagttctacctcagggctgactgaggagtccactaccttccacacaagccccagtttcacatccactattgttagcactgaatctctcgagactctggcccctggcctctgccaggagggccaaatctggaatggcaagcaatgcgtctgccctcagggctacgtggggtaccaatgcctctctcccctggagtcctttccagtggagacaccagagaaacttaacgctaccctgggaatgactgtcaaggttacatataggaattttacagaaaagatgaacgacgcaagctcccaagagtaccaaaacttcagtaccctgttcaaaaaccgcatggacgtggtgctgaaaggcgacaatctacctcaataccgcggcgtcaatatccggcggctgcttaacggctctatcgtagttaaaaatgacgtgatcctagaggcagactacacgcttgaatatgaggagctttttgagaacctggcagagatcgtgaaagctaaaattatgaacgagacgcgcaccactcttttggaccccgattcctgccgtaaggccattttatgttactccgaagaagatactttcgtcgattcttccgtaactcccggctttgactttcaggaacaatgtactcagaaggccgccgaaggctacactcaattctactatgtcgatgtgctggacgggaagctcgcatgcgtgaacaagtgtaccaagggaacaaaatcccagatgaattgtaacttagggacttgccaactccagcggtcaggccctaggtgcttgtgcccaaataccaacacccactggtattggggggaaacttgcgaattcaacattgcaaagtctctcgtctacggcattgtgggggcagtgatggctgtgctactcctggctttgatcattctcattattctgttctcactgagccagaggaaacgccaccgcgagcagtatgatgtcccccaggagtggagaaaagagggcacacctggcatattccagaagaccgcgatctgggaagaccagaacctgagagaaagcagatttggcctagaaaacgcctacaataattttcgcccaactcttgaaacagttgacagcgggacagaactccatatccagaggcctgagatggtggcatccaccgtgtag

SEQ ID NO: 124919 - DNA, 16008 bp, synthetic construct
  misc_feature 1..16008: note = Description of Artificial Sequence: Synthetic coding sequence
  source 1..16008: mol_type = other DNA
atgctcgtgatttggatcctgactctagccctccgactgtgtgcctctgtcacgacagttactccgggatcgaccgttaacaccagtataggtggtaacacgactagcgcgtctacaccaagtagcagtgacccgttcactacctttagtgattacggagttagtgtcacatttattaccggttcaaccgccacgaagcacttcctggacagctccaccaatagtggacactccgaggagagcacagtctcccactctggccccggggcaaccggaaccactctctttccatctcacagcgccacctcggtctttgtcggggagcctaagaccagccctataacctcagcgtccatggaaaccactgccctccccggctctacgacgactgcgggacttagcgagaaatccactaccttctactcttcgccacggagtccagaccgaactctctctcctgcccgcactacaagttccggcgtctctgagaaaagcactactagccactcgagacctggccctacacacacaattgcctttcctgactctacaacgatgcccggggtttcgcaggagtctaccgcttcacactctatcccaggttcaacagataccacactgagtccaggcacaaccactccatcttcattgggacccgagagtactaccttccactcctctccgggttacacaaagacaactcgccttccggacaacacaaccacgagtgggctgctcgaggccagcacccctgtgcacagctccaccggcagtccacacactactctgagtcctagctcctctacaacccatgagggcgaaccaaccacatttcaaagctggccttcttccaaggatacctctccagcaccctctggtactacctccgcctttgtaaagctcagtaccacctaccactcttccccttcctctacccccaccacacacttcagcgccagcagtactactctgggccactccgaggagtccactccagtccactcctcgcctgtggctactgctaccacgccaccccctgcacgatccgctacatctggccatgttgaggagtcaacagcataccataggagtcccggctccactcagacaatgcactttcctgaaagtagtacgacatccggccattctgaggaaagcgccactttccatggcagcacgactcatacaaagagctctaccccttctaccaccgcggctttagctcacacatcctaccacagcagtctgggaagtaccgaaactacccacttccgagattcttcgactatcagtgggcgctctgaagagagcaaggcctcccactccagcccagatgccatggcaactacagtgttgcccgctgggagcacaccctccgttctagtgggggacagcacaccatccccaatcagcagtggcagcatggagacaacagcgctgcccggttccacgactaaacctggcctgtctgaaaagtcgaccactttctattcatctcccagatccccggacaccacacatttacctgcgtccatgaccagcagtggcgtatcagaggagtctaccacctctcattcaagaccaggctctacccacactacagctttccccggctctacaacgatgcctgggctgagtcaagagtcaactgcttcccactccagcccgggaccgacagacaccacgcttagccccggatcaaccacagcgagcagtctgggaccagaatacaccacgtttcacagccggcctgggagcacagagaccacactcctgcctgataatacgaccgcctccggtctgctcgaggcttccatgcccgtgcacagctccactcgttccccgcatacgaccctatctccagccgggtccaccacacgacagggggaaagcaccactttccacagttggccctcttcaaaggatacccggcccgctccgccgacaaccacatctgcattcgtcgagccgtcgactactagccacggcagcccaagcagcatccctactacacatatctccgctagatccaccacgagtgggctcgtcgaggagtctactacgtatcacagcagtccaggatccacacagactatgcattttcctgagagcgatacaacatccgggaggggcgaggaaagcacaacaagccacagtagcacaactcacactatatctagcgcgccgagcaccactagtgcgcttgtagaggagcctactagctatcattcaagtccaggcagcacggcaaccacacatttccctgattcctcaaccacttccggacggagcgaggagtccaccgcgtcgcactcaagccaggacgccacagggactatcgtcctccctgccagatcaactactagcgtgctcttgggggagagcaccacctccccaatttcctctggttcgatggagacaaccgctctgccagggtcaaccacgacaccagggctcagtgaaaggagcaccacctttcactcgtcacctcgctctcccgcaactaccttgagccccgcttcaaccacttcctctggtgtatctgaggaaagcacaacttcaagatccagaccaggtagcactcatacgactgcttttccggattctacaaccactcctggactctcacgtcactctaccacatctcattcttcgccggggtccacagacactaccctcctccctgccagcaccacgacctccggcccatcccaggaatcaaccacctctcactcatctagtggcagcacagataccgccctgtccccaggaagcaccacggcgctgagctttggccaagagagtaccaccttccactccaatcccggaagtacccatacgacactgttcccggattcaaccacttctagtggtatcgttgaggcctccacgcgagtccatagttccactgggtcacctcgtaccacgctatccccagcatcttcaacatctccgggcttgcagggcgagagcactgcctttcagacccaccctgcatccacacacaccactccgagcccaccttccactgctaccgcccctgtcgaagaatctaccacgtaccaccgatctcccggatcgactccaaccacgcattttcccgcctctagcaccacaagcggccattccgagaagagtactatctttcatagctcccccgacgcttccggaaccacaccaagcagcgctcacagcacaacatcgggccgcggtgaaagcaccacctcaaggatttcgccaggaagcacggaaattactacactgcccggcagtaccacaacacccgggctgtcggaagcctccaccactttctattcctctcctcggagtcctaccaccaccctctcccccgctagcatgacctcacttggtgtgggtgaagaatccaccacctcacggagccagccaggaagcacccatagcacagtatccccagccagcactactacacccggtctgagcgaggagtcaactaccgtttattcttctagtcgtggatcgacggagaccactgtcttcccacactccacgaccacttccgttcacggagaggaacccaccacttttcattctagaccggcaagtacacatacaacgctctttacggaggactcaaccaccagtggactgaccgaggaaagcactgccttccctgggtcgcccgcctcaacgcaaaccggccttcccgcaactctcacaaccgctgacctcggcgaagaaagcactacatttcccagcagcagcgggagcacaggcactaaactcagtcctgccaggagtaccacctcaggccttgtgggcgaatcaaccccatcacggctcagtcctagcagcaccgagaccacaactctgccaggcagtccgaccaccccttcactaagcgagaagagcactaccttttatacgtccccaaggagcccagacgccaccctgagcccagccacaactaccagttcaggggtgagcgaggagagctccaccagccactcccagcctggctcgacccatacaacagcctttcccgacagcactactacctccgacctttcccaggaaccaactaccagccatagctcccaagggagcactgaggcgacgctctcacctggtagcacgactgcaagttctctgggacagcaatccaccacttttcatagctcacctggagatacagaaacaacgctgttaccagatgacaccataacgtctggtctggtcgaagccagtactccgacccactccagtacaggatccctacataccactcttactccagcgtcatctacaagtgccggactgcaggaggaaagcacaacgtttcaatcctggcccagcagcagcgatacaacaccctccccaccgggcacaacagccgcaccagtcgaggtgtctaccacgtaccattccaggccatccagcacccctaccactcacttctcagctagttccacaacactcggaagaagcgaggagtccacaacggtgcattcatctcctggggctactggcacggccctgttccccaccagatccgcgacaagtgtgctggtgggggagcccaccaccagtcccatcagctctggcagtaccgaaaccaccgctctgccagggagcactaccactgctggcctctccgagaagtccactactttttactcatccccgaggtccccagatacaacgctgagtcctgccagcactacatcatcgggggtgagcgaggaatctaccacatcgcacagtagaccaggctccactcacacgaccgcgttccccggatccacaactatgccgggcgtgagccaggagtccaccgcttcacacagctctccgggaagcacagacaccacgctgagtccaggctccacaacagcttcctccctgggacctgagagtaccacttttcacagtagcccaggcagtactgaaaccactctcttgcctgataacacaaccgcatcagggctgctcgaggcatccacacctgtccattcgtctacggggagtcctcacacaactctctcaccagccggtagtacaacccgccaaggggagtccaccaccttccagtcctggccctcctcgaaagacacaatgccagccccccccacaactacgagcgcgttcgtggaactgagcaccacatcccatggctcaccttcaagtaccccaacaacccatttctccgcatccagtacaaccctggggagaagtgaagagtctacaaccgtgcacagttcccccgtggccaccgcaaccacaccaagcccggcccgctctactacctccggattggtcgaagaatcaacagcataccatagctcccccgggagtacacagacaatgcatttccctgagtcctctacagcgagcggcagaagcgaggaaagcagaacatcccacagttccactacccacaccatttcatctcctcccagcacgacctcagccctggtggaagaaccaacaagctatcacagtagcccgggttcgactgccactacacatttcccggattcctccacgacctccgggagaagcgaggaatcgaccgcaagtcactcctcgcaggatgccactggcaccattgtgctgccggcaaggtctacaacctctgttctcctgggagaatccactacctctcctatcagtagcggtagtatggaaactactgcccttcctggctctactaccacaccgggcctgtctgagaaatcaactactttccactcctccccaagaagccctgccaccaccctatctccggccagcaccacttcttcaggcgtttccgaagaatccactacatctcattctcgaccaggatctacacacacaaccgcttttccagacagcaccactaccccaggccttagcagacacagcactacgtcgcatagctcaccaggatccaccgataccactctgctccctgcttctacaacaacttctgggcctagtcaggagtcgaccacctcccattctagtccagggtctaccgacaccgctctgagtcccgggagtacaaccgccctgtccttcggtcaggagtcaaccactttccactcgtcacctgggtcgacacacaccacgctttttcctgacagcacaacctcttccggtatcgtcgaggcatctacccgtgtccactcaagcaccggttcgccccgtacgacgctgagtccagcctcatctacctctcccgggctgcagggagaatccacagccttccagactcatccagcctccacgcacacaaccccgagccccccaagtaccgccactgcccccgttgaggaaagtacgacttatcaccgaagtcccggatccacaccgaccacccactttcctgctagcagcacaacgagcgggcacagcgaaaaatccactatatttcactccagccctgacgccagcgggacaaccccttcttccgcacactctacaacaagcggaaggggtgaatctacgacttcacggattagtcccggctccacagaaatcactacattgcccgggagcacaacaacaccaggcttgagtgaagcgtccactacattctacagcagccccaggtctccaacgacaactctcagccctgcttccatgacaagtctgggtgttggcgaggaaagcaccacatcccggtcgcagcctgggagcacccactctactgtgtctccagccagcactaccactcccggattgtctgaggaatcaaccactgtgtacagctcttccccaggatctaccgagactactgttttcccccgcacacctaccactagtgtccgcggagaagaacctacgactttccacagcaggccagcctcgacacacaccacccttttcacagaggactctaccacctccggactgacagaagaatctaccgcttttcctggcagtccagctagcacacaaaccggactccctgcaacactcaccacagcagacttaggagaagagtcaacaacatttcccagctctagtggatcaactgggaccactctctctcctgcccgctctacaacgtctggcctggtgggagagtctacccctagcaggttgagcccgagcagcacagagacaactaccctcccaggttctcctacaacaccaagcctcagcgagaaaagtacaaccttctacactagtccacggtccccagacgcgactcttagcccagcgaccacaactagttcaggggtctcggaggagtcctccacctctcatagccagccaggcagcacccatacgaccgcatttcctgactcaacgactactccaggcctgagccgtcacagcactacgagccactcctctccgggcagtactgacaccaccctcctgcccgcatcaacgaccacctccggccccagtcaagagtctacaacatctcactcgagccctggaagtacagatactgctctgtccccgggttcaactaccgcgttgagctttggtcaggaatctacaacttttcattcttctcccggctccactcacactactttgttcccggactctacaacttctagcgggatcgtggaggccagtacccgagtgcactctagtactgggtcaccccgcactactttgagccctgcttcttcgaccagccctggacttcaaggtgaatcaactacattccagacacacccagcgtctacccatacaacgccttctccacccagtacagcaacagctccagtggaggaatctacaacataccatcgatcccccgggagcactccaaccactcactttcccgctagttctacaacgagtggacatagtgaaaagagcacaatctttcatagctctcctgatgcttccggaaccacccccagctctgctcatagtaccaccagtgggcggggggagtcaaccactagtcgcatctcccctggtagcactgagataaccacactgccaggaagtaccactactcccggtctgtctgaagcgtcaacaacattttattcaagcccccgaagtccaacaactacgttgtccccagcttctatgacctctctgggcgtgggggaggagagtaccacatcacggtcacagccggggtcaacccactccaccgtgtctcccgctagtactaccaccccaggcctctcagaagaaagtacaactgtgtattcatcaagcccggggtccaccgagacaaccgtcttcccaagatcaacaactacatcggtgagaggcgaagagcccaccacgtttcactcaagaccagccagcacccatacaacactctttacagaggattcaactacctctggactgacagaagagtctaccgcatttcccggaagccctgcttccacgcagaccggcctgcccgctacattaacaaccgctgatttgggggaagaatccacaacattccccagcagttccggatcaactggcaccaccttgagcccagctaggtctaccacatccggcctggtgggagaatccacaccctctagattaagtccgtctagtaccgaaaccacgacactccctggaagcccgactacaccatccctgagtgagaagagtactacgttctacacatcaccccgctcccctgatgcaactctaagcccagcaactacgacaagctccggggtgtcagaggaaagcagcacatctcatagccaaccggggtcgacccacactactgcgttcccggattccactacaacgtcaggactctcacaggagcctacagcgtcccatagctctcagggttcaacggaggccacactgagccccggcagcaccacggcctcttccctcgggcagcagtctactacctttcatagcagccctggagacaccgagacaacgctgctccctgatgatactataaccagcgggctggtcgaagctagtactcctacgcattcatcaacaggctcgttgcatactaccttgacgcctgcttcatcgactagcgccggactgcaggaggagtcaacaaccttccaatcctggccttctagctctgacacgaccccctcgccaccgggaaccactgctgcccctgtagaagtatcgacaacctaccactctcgcccaagcagcacccccactacccacttctctgcatcctctaccactttaggcaggagcgaagagtccaccactgtgcacagtagtccaggagccaccggcacggcactgtttcccacaaggagcgccacctccgtcctggtgggagaacccacgacaagtcctataagctctggatctacagagaccaccgccctacccggcagtaccaccacagccggactcagcgagaaatccacaacattttactcatccccaaggtctcccgacaccactctaagcccagcatctactacatcatctggagtgtcggaagaatcaactacttcacactctagacccgggagcacccataccacggctttccctggatcaactaccatgcccggcgttagccaggagagcaccgcttcacattcctcccctggcagtactgatacaacactctcccctggatccaccacagcctctagcctcggtccagagtccacaaccttccacagtggaccaggatctactgaaacaaccttgttgccggacaatacaaccgcttccgggttgctagaggcttcaacacccgtgcactcatcgaccggctccccacatacgacactctcacccgccggctctacgactcggcagggggagagcaccacatttcagagctggcctaacagtaaggacactacaccagccccgcctactactacttctgcattcgtggagctgtctaccacatctcatggcagcccaagctctaccccaacaacccacttttctgccagttctaccacccttggacggagtgaggagtccaccacagtgcattcaagccccgttgcaaccgccactaccccttctccggcgcggtcaacgacttcgggcctcgttgaggaatccacaacgtatcactcaagcccgggttctacccagacaatgcacttcccagaaagcgatacgacgtcagggaggggtgaagaaagcaccacatctcacagtagcactacccataccatctcgagtgcgcccagcactacctctgccctggtagaggagccaaccagctaccatagctcccccgggtcaacagccacaacgcacttcccagatagcagcactactagtggcagatcagaagagtccaccgcctctcatagtagccaggacgccaccgggaccattgtactccccgcaaggtccaccacctcagttttgcttggcgaatcaaccaccagccctatctcttcgggaagtatggagactacggcgttgcctggttccacaacaacccccgggctgagcgagaagtctaccacattccacagctcaccaaggtccccggccacaacactgagcccggcgagcacaacatcttcaggagtttccgaggagagcaccacgtctcacagcagaccagggagcacacacactacagctttccccgactcaacgacaacacctggtctgtctagacatagcaccacctcccactcatcacctggtagcaccgacaccacgttgctccccgcttctacaaccacctctggatcctcacaggagtcaacgactagccactcaagttcggggtctaccgacaccgctttatcacccggatccacgacagccctgagttttggacaggaatctactaccttccatagttccccaggctccacccacaccaccctgttcccagattccaccaccagcagtggaattgtcgaggccagcacgcgcgtacacagctctacaggttcaccgaggacaaccctcagccccgcctcatccacatcaccggggcttcaaggagaatcgacggcattccaaactcacccagccagcacccacacaacacctagcccaccgagcacagcaacagctcctgtagaagagtccaccacctaccacaggtccccaggctcgacccccactacacactttccagcatcttctacaacaagtgggcattccgaaaaaagcacgattttccactcttccccagatgccagtggcaccactccgagttctgcgcattccaccactagtggaaggggggagagcaccacatccaggatctctccgggttccactgaaattactacccttccagggtccaccaccaccccaggattgtcagaggctagtaccaccttctattcatccccccgctcaccgactactactctttcaccagctagtatgacctcacttggcgtgggcgaggagagtaccacctcccggtcccagccaggcagcacacatagcacggtaagccctgcctccaccacgacccctgggctctccgaggaatcaaccacagtttatagctctagccctggctctaccgagacaacggtttttccacgttcaaccacaacaagcgtcagacgtgaggagcctacaacctttcacagtcgccccgcctcaactcatactaccctgtttacagaggattctaccacctctggactgacagaagagtctactgcatttccggggtcgcctgcctccactcagacaggactgcccgccacactgacaacagctgacctgggggaggagtctaccacgtttcctagcagctcaggatcaaccggtacaaagctgtcacctgcacgatctacaactagcggacttgttggtgagtcaactccctcaagactgagcccttccagcacagaaacaactaccttgcctggttcccctactaccccttctctctctgagaaaagcactaccttctacacttcaccacggtcacctgatgccacactgtcacccgccactaccacctcctccggggtgtccgaggaaagctcaacaagccatagccaaccagggtccacacataccacagcctttcctgacagcactacaacttctggactgagccaggagccaactacctcccactcctctcagggatctaccgaagctaccctgtcacccgggagcactacagccagctccctggggcaacagtcaacgactttccattcttccccaggggatactgagaccacgctgttaccagatgatacaatcacatccggcttagtggaggcttctacccctacccactcctccacaggaagcctgcacacaaccttgacccctgcctcttccacatccactggcttacaggaggaaagtacaacgttccagtcttggccgagtagttcggacaccacaccctccccaccatccacgacagctgtccctgtggaagtgtccaccacataccattctcggccgagttcaacccccactacccattttagcgcctcaagcacgacacttgggcgaagcgaggagtcaacaactgtgcatagcagcccgggtgccacagggacagcccttttccccacacggtccgctacgagcgtattggttggcgagccaactacatcccccattagctccgggagcacagaaactacagcgctgcccggctccacaacaacagccggtttatcggaaaagtcgaccactttctacagcagccctaggagccccgacaccacactcagtcctgcttccactacctcttcgggggtgagtgaagagtctacgacttcgcactctagacccggttcaatgcatacaactgcctttccttccagcaccaccatgcccggcgtatcacaggaatccacggcatcccacagttcccccgggtccaccgacacaactttgtcacctggtagcactacagcatcttcactgggacctgagtctaccacgtttcattcctcacctggatctactgaaacaaccctgcttcccgacaatactacggcctctgggctgttggaggccagtacccctgttcacagcagcaccgggtctcctcacaccacattatcgcctgccggctctactactaggcagggggaaagcactacgtttcagtcctggccaaattccaaggacactacacctgcaccccccaccaccacttcagctttcgtggagctgtctaccactagccatggctctccgtcttctacccctaccacacacttcagtgcatctagcactacattgggtcgcagcgaggagtccacgacagttcacagttccccggtcgccaccgccacaacaccctccccagccagatcaactacaagtgggctcgtggaggaatccacaacttaccatagcagtccagggtccactcagaccatgcatttcccagagtctaacactacaagcgggcgaggtgaggagtccacaacctctcacagcagcacaactcacaccatctctagtgccccttccacaaccagcgcactagtcgaagagccaacgtcctaccattcctcacccgggtccaccgcaaccacacactttccagactcaagcaccactagcggtcggtccgaggaatccacagcatcccactctagtcaggacgccactggtaccattgtgctgcccgcccggagcacgaccagtgtgttgctgggagagagcacgacgtctccaatctcctccggttctatggagacaacggccctcccggggtccaccaccactcctggattgagcgaaaagtccaccacgttccattcaagccctagtagcacacctactacgcatttctcggcttcttctacgacactgggacggagcgaagagagcactaccgtgcatagctctcccgtagcgactgcgacaacgccatcaccagcccgcagcaccacaagtggcctagtcgaggagagtaccgcctaccacagcagcccaggctcaactcagaccatgcactttcctgagtcttccactgcatctgggagatcagaggaaagccgcacctcacacagctctaccacgcatacaattagttcccctccctctaccacttccgctctcgtagaggagccaacgtcctatcattcttctcctgggtctattgccaccactcattttcctgaatcatctaccaccagcggcagatctgaggaaagcacagccagtcacagtagcccagatactaacggaattaccccactgcccgcgcatttcactacatcggggagaatagcagaatcgaccacattctacatctcccctggtagtatggagaccactcttgcttcaactgccactactcctggactttctgcgaagagtaccatactatatagctcttctcggtccccggatcaaactctgagtccggcatcaatgactagtagctctatctccggagagcctacctccctgtactcccaggctgagagtacgcatacgacagcgttcccagcctccaccactacttccgggctgtcacaggagtctacaactttccattccaagcctgggtccaccgaaacaaccctcagccctgggagcattaccacctcatcattcgcccaggagtttactaccccacatagtcagccaggctccgccttgtctaccgtgagccccgcttcaacaacagtacccgggctttctgaggaatcaacaaccttctactcgtctccgggatcaaccgagacgacagcgttttcccacagtaatacaatgagcatccactcccagcagagcacacccttccccgactccccaggattcactcatactgtgctgcctgctacgctgactaccacagatattggccaggagtctactgcttttcactcatccagcgacgcaactggcactaccccactgcccgcccggtctactgcctcagatctggtcggagagcccactactttttacattagcccaagtccgacgtacacgacacttttccccgcctcttcaagtacatccggactgactgaagaatccaccaccttccataccagtccaagcttcacttcgaccatagtctctaccgaatctctggagaccctggctcccggcctgtgtcaagaggggcagatttggaacgggaagcagtgcgtgtgcccacagggttatgtggggtatcagtgtctgtcaccgctcgaatcttttcctgtcgagacgcctgaaaagcttaacgccacattaggaatgaccgttaaggtcacttacagaaacttcacagaaaaaatgaacgacgccagctcacaggagtatcagaatttttctacactgttcaagaacaggatggacgtcgttctgaaaggagataacctacctcagtaccgcggcgtgaatatcaggagactactcaacgggtcgatcgtggtgaagaacgacgtcatacttgaagcggattacacactcgaatacgaagagctcttcgagaacctggcagagatcgtgaaagcgaaaatcatgaacgagactagaactacgttgttagacccagacagctgtagaaaagccatattgtgttactccgaggaggacacattcgtggactcctccgtaacacctggcttcgattttcaggaacaatgcacccaaaaagctgccgaagggtatactcagttttattacgtggacgtgcttgacggcaaattggcgtgtgttaacaaatgtacaaagggtaccaaaagccagatgaactgcaacttgggaacttgccagctgcagcggtctggcccaaggtgtctatgtcctaataccaatacccactggtactggggagagacatgcgagttcaacattgcaaagtctttggtgtatggcattgtgggcgcggtgatggccgttctgctcctcgccctcatcatcctcattatcctgttctccctgtcccaacggaaaagacatagggaacaatacgacgtccctcaggaatggcgtaaagagggcacacccgggattttccagaagactgcgatctgggaagaccagaatctgcgcgagtcacgctttgggcttgaaaacgcctacaacaattttcgcccaactctggaaactgtggattctggcactgagctccacatccaacgcccagaaatggtggctagtacggtgtag

SEQ ID NO: 124920 - DNA, 1536 bp, synthetic construct
  misc_feature 1..1536: note = Description of Artificial Sequence: Synthetic coding sequence
  source 1..1536: mol_type = other DNA
atgaaagcgatcatccatctgaccctgctggctctgttatcagtcaatacagcaacgaatcaagggaacagcgccgatgctgtgacgacaactgagacagccacctccggccccactgttgctgcagccgataccaccgagactaattttcccgagacggcaagtactacggccaacacacccttccctacagccacatctcccgcccccccaatcatcagcactcatagtagttctaccatcccgacgccagctccaccaattataagtacacatagtagtagcactatcccgatcccgaccgcagcggattctgagtccaccacaaatgtgaactcccttgccactagtgacatcatcacagcaagctcgcccaatgatgggctgatcacgatggtcccgtctgagacacagtctaacaatgagatgtctcccaccaccgaagacaaccagagcagtggtcccccaacaggcaccgcgttattagaaacaagcaccttgaactcaactggaccctctaacccgtgtcaggatgacccatgtgccgataacagcctctgcgtgaagctgcataatacgagtttttgcttgtgcctggaggggtattactacaatagctctacctgtaagaagggcaaagtatttccgggaaagatctcagtcacagtatctgaaacctttgatcccgaagagaaacattccatggcttaccaagatctacattctgaaatcaccagcctgttcaaagacgtcttcggcacctcagtgtacggccaaactgtcatcctcacagtttctacgagtctgtccccccggagcgaaatgcgggcagatgacaagtttgtcaatgtgaccattgttaccattctggccgagaccaccagtgataatgaaaagactgtgacagaaaaaattaataaggccatccggtccagttcctcaaatttcctcaactatgacctcactttgagatgtgattattatggatgcaatcagactgctgatgactgccttaacggcctggcctgtgattgtaaatccgacttacagcgacctaatcctcagagccccttttgcgtggcttcttcactcaaatgcccggacgcctgcaacgcacagcacaaacaatgcctcattaagaaaagcggtggcgctcccgagtgtgcctgcgtccctggctaccaagaggacgccaacgggaactgccaaaaatgcgcctttggttactctggtctcgactgcaaagataagttccaattgattctcacaatcgtcggtaccattgctgggatcgtcatactgtctatgatcatcgcgctgatagtgacagccaggagcaacaataagaccaagcatattgaggaggagaaccttatcgacgaggattttcagaatctgaagctccgctccactggcttcacgaatcttggggccgaaggcagcgtgttccccaaagtgaggatcaccgcatcgagggatagtcagatgcaaaacccttactcgcgtcactcttccatgccaaggccagactattag

SEQ ID NO: 124921 - DNA, 13482 bp, synthetic construct
  misc_feature 1..13482: note = Description of Artificial Sequence: Synthetic coding sequence
  source 1..13482: mol_type = other DNA
atgccccggcctggtactatggccctctgccttctgaccctcgtcctgagcctgctgcccccacaggccgcagcagagcaagacctgagcgtgaatcgcgccgtctgggatggcggcggatgtatttcccaaggtgatgttcttaaccgacagtgccagcagctgtcccagcacgttcggaccggttccgctgcgaacacggcaaccggcactacaagcacaaatgtcgttgaacctcggatgtacctgtcgtgctcaaccaacccagaaatgacttcgattgaaagctccgtcacgtccgacaccccaggggtcagttctacaaggatgacccctactgaaagcaggacaaccagtgagagcacctccgattctaccaccttgtttcctagctcaactgaggacacgtctagccctaccacccctgaaggcacagacgtgcctatgagtacgcctagcgaagaatctatctccagcaccatggccttcgtctccacagcgcccttaccttcctttgaggcgtatacaagtcttacttacaaggtggacatgtccacgcctcttactacctcaactcaggcctccagttcccccaccactccagagtctacaacgatacccaaaagcactaacagcgaaggatcaactccactgaccagcatgccagcgagcaccatgaaagtagcgagctctgaagctattacgcttctaaccacccccgtggagatctccactcccgtgacaatttccgcacaggcatcaagctctccaaccacagccgagggcccttcactgtccaactcagctcccagcggggggtccacgccattgacccgaatgcccctgtctgttatgttggttgtctcgagtgaggcaagcaccctgagcactacccctgcagccaccaacatccctgtcattacctccacagaagcctcctcttcaccaacaacagctgagggtacctcaatccccacaagtacatacaccgaggggagtaccccattgacctccacaccagccagcacgatgcccgtcgcaaccagcgagatgagcacattgagcatcacaccggtggacacctctaccttggtgaccactagtacagaaccatctagcctccccactacggcagaagccactagcatgttgaccagtaccttgtcggagggcagcaccccattgacaaacatgccggtgtcaacaatcttagtggcatcttcagaagctagcacaacctcaaccatccccgttgacagcaaaacatttgttacaactgcctcagaagcctcaagcagcccaacaaccgcggaagacacctctatcgccacttcaaccccctcggaaggctctaccccacttaccagtatgccagtgtctacaacccccgttgcatcctctgaggcctcaaacctcagcactacgccggtggatagtaaaacacaggtcactacgtccactgaggcttcttccagtcctccaacggctgaggtgaattccatgcctacctccacaccttctgagggttcaacacccctgactagcatgagtgtctccaccatgcccgtggccagctccgaagcctctacgttatcgacgacacctgtggatacctccacccccgtgaccacctcttctgaggcatcttcctcgtctacaacccccgagggcaccagcattcccacgagcacccctagcgaggggagtacaccactgactaacatgcccgtatccacacgacttgtcgtgtcttctgaggcttcaacaacaagcaccactccagccgactcaaacacttttgtgacaacttctagtgaagccagtagctcaagcaccaccgcagaaggaaccagcatgcccaccagtacatactcagaacgaggcactaccatcacatcaatgtcagtatctaccaccctggtggcaagtagcgaggcctctactctgagcacaacaccagtcgattccaacacacccgttaccacgagcacagaggcgacatcatcctccaccacggccgaggggactagcatgccaacatctacctatacggaaggctccaccccacttaccagcatgcccgttaatactacattggtggcatctagcgaggccagtacattgagcaccacaccagtcgatacatcaaccccggtcaccacttccaccgaggctagctcatcccccactacggctgacggtgccagcatgccgacatctactcccagcgagggttccaccccccttacctctatgcctgttagcaaaacgctcctaacctctagcgaggcaagcaccctgagcacaacaccactggacacttccacccacatcacaacatcgaccgaggccagttgtagtcccaccaccaccgaaggcactagcatgcctatatctacccctagtgaggggagcccgctcctgacgtccatccctgtgagcatcactcctgtgacatctcctgaggcgagtactcttagtactaccccagttgacagcaatagcccagttacgacatctactgaagtctcctctagtcccacaccagctgagggcacaagtatgccaacaagtacttattcagaaggtagaacccccctgacctctatgcccgtgagtaccacattggtggctacttctgctatttccacattgagtactacccccgtggacacatccactccagtaactaatagtactgaggcgcgtagttcaccaactacttctgagggcacttcaatgccaacaagtacccccggcgagggaagtacccccctcactagcatgccagatagcaccactccagtcgtgagctccgaggcccgaacgctcagcgctacccccgtagatacgtcgactccagtgaccacctcaaccgaagccactagttctcccaccaccgctgagggcacaagcatccccacaagtaccccaagcgaaggaacaaccccactgacaagcacgcctgtaagtcacacactcgttgcaaacagtgaggccagcacactatctacaacacccgtagattctaatacgccgctaactaccagcacagaggcatcctccccgcctcctactgctgagggtacttcaatgcccaccagcactccctcggagggcagcactcctctcacacggatgcccgtgagcaccactatggtggcgagcagcgagacatctacattgtcgacaacgccggccgacacctccacgcccgttaccacatacagccaggcttcatcgagctccacaaccgccgacggtacttctatgcccacttctacatattcagaaggctccacccctcttacgagcgttccagtgtccactcgactggtggtaagtagcgaggcctccacactaagcacgactccagtcgatacaagcatacccgttaccacctctaccgaagcttccagcagtcccaccacagccgaaggtaccagtatcccaacttctccaccatctgaaggcacgactccactggctagcatgcctgtgagcacaactctggtagtttcctccgaggccaacactctcagcaccacaccggtcgacagtaagacccaggtggccacttccacggaggcctcatcacctccgcctactgctgaggttacaagtatgccaacctccactcccggtgagcggagcacaccattgacaagcatgccagtccgccacacacccgtggcatcgagtgaggcttcgacgctgagtactagccctgtagacaccagcacgcccgtcaccacaagtgctgaaacttctagttctcctaccactgcagagggaacatctctccccacgagcactacaagtgaggggtccaccctcctgacatcaattcccgtgtctaccacactggtcaccagccccgaggcaagcacgctcctcacgacacccgtggacacaaaaggtcctgtcgttacctccaatgaagttagctccagccctacaccagccgagggaactagcatgcctacctccacttatagcgagggccgaacccccctgacgtctatccctgtcaacacaactctcgtagcatccagcgccatctctatcctttctactacaccagtagacaactctactccggtgacgacatccaccgaggcatgctcctcccctaccacgagtgagggcacaagcatgcctaatagtaatcccagtgaggggactacaccgctgacaagtatcccagtgagcactacgccagtcgtgagtagcgaagcatcaacattatctgctacgccagtagataccagcacgcctggcaccacctctgcggaggctaccagctctccaaccacggccgaaggtatctctatccccaccagcaccccctctgagggtaaaacccctctgaagagcataccagtgtccaatactccagtcgccaattcggaggctagcacgttaagtacaacgcccgttgactctaatagtcctgtggttacaagcaccgcagtgtcatctagcccaacccctgctgaggggacatctatcgcaattagtactccatccgagggcagcaccgcgctgacaagcatcccagtaagtaccactaccgttgccagttctgaaatcaactccctttcaacaacccccgcagttacatcaacaccggtcactacgtattcacaggctagttcgtcacccaccactgctgatgggaccagcatgcaaaccagtacatactccgagggatccaccccactgacctccttgcccgtgagcaccatgttagttgtgtcatccgaggctaacacgctgtcgacgaccccgatcgatagtaaaactcaggtgaccgcctcgacagaggcctctagcagcactactgcagaggggtcttcaatgacaattagtactccaagtgagggaagccccctgctgactagcataccggttagcacgactcctgttgcatctcctgaagcctcaaccctgtctactacaccagttgactcgaattcccccgtgattaccagcacggaagtgtcgtcaagcccgacccctgccgaaggcacttctatgcccacctctacctacaccgaaggcaggactcccctaacctctatcactgtgaggaccactccggttgctagctccgcaatttctactctctcaactacgccggtcgataactctacccccgtgaccacttctacggaagcaagatcctcaccgacaacatctgaggggacctctatgccaaactccaccccttcagaggggacgactccactgacatctatcccagtcagtactactcccgtcttaagctccgaagcgagcactcttagtgcaaccccgatcgacacatccaccccagttacaacttccactgaggcgaccagctcaccaaccaccgccgaaggcacctcgatccccacctcaaccctcagtgagggcatgacccctctgaccagcacccccgtgtcccatactctggtggcaaactccgaggccagtaccctcagcacaacaccagtggatagcaattctcccgtcgtgactagcacagcagtgtcgagcagtccaacaccagctgagggaacatcgatcgcgacatcgactccatcggagggaagtacagctctcacaagcatcccagtgagcacaacaacagtggcctcctcggagacaaatacattgagcacaacgcctgccgtaacatcaacccccgtcaccacctatgcgcaagtttcttcatctcctacaacagcggatggatcttcaatgcccacaagcacccctagggaagggcgacctcctctcacatctatcccggtttctacaactacggttgccagctcggaaataaatactctgtctacaacactcgctgatacacggacacccgttactacctacagccaggcaagttctagcccaacaacagccgacggaacctccatgcccacacctgcctactctgagggttcaacgccgctgacctccatgccactctcaacgacgcttgtcgtgtcgtccgaggccagcactctgtctaccactccggtggatacaagcacaccagccaccacatctaccgaaggatcttccagccccaccacagcgggcgggacatcaatacagacttccactccttctgagcgaacaaccccactggctgggatgcccgtgagcacaacattggtagtatcaagtgaaggaaataccctaagcacaactcccgtggatagcaaaacccaagtgactaactcaacagaggcttcttccagtgccacggctgaaggctcctcaatgacaatttccgcaccatctgagggaagcccactgctaacttctatcccccttagcaccacacccgtggcaagcccggaggcatctacgctgtctaccaccccagtcgactcaaactctccagtgattacgtcaaccgaagtgtcttcctctcccatccccactgaaggaacaagtatgcagacatctacatactccgacagaagaactccgctgaccagcatgcccgtcagcacgacagttgtcgcctctagcgccatcagtacactgtcaaccacgcctgtcgatacatcaacccctgtcactaacagtaccgaagctaggagtagcccaaccacctcagagggcacaagcatgcccacgtcaaccccatccgaagggtctaccccctttaccagtatgcctgtgtccacaatgcctgtcgtcacatccgaggccagcactctgtccgcaacccccgtagatacttctacacccgtcaccacttctaccgaggcaacatccagtccaacaacagccgagggaaccagtattcctacatctactcttagtgagggcactacaccgcttacatccatcccagtctcccacaccctcgtggccaattcggaagtgtctacattgtctactactccggtcgacagcaataccccgttcactaccagcaccgaggccagcagtcccccccctacagccgagggcacttccatgcccactagcacgagtagcgagggaaacacaccattaactaggatgcccgtcagcactacaatggtcgcttcattcgagacatccacactctccacaactcctgccgacacctccacacctgtcacaacatattcccaggcaggctcaagcccaacaaccgcagacgacacatctatgcctaccagtacctatagcgaaggatcaacaccgctcactagcgtgcccgtgtcaacaatgcccgtcgtgtctagcgaggcctcgacacatagcactacgcctgtcgataccagcacccccgtgaccaccagtacagaagccagttcatctcctaccaccgctgagggcacctctatacctacatctcccccatccgaaggtacaacaccactggcatcaatgccggtttctaccacgcctgtggtgtcaagcgaagccggtacattgagtacgacccctgtcgatacatctacccccatgactacaagcaccgaagcctcatccagtcccacaaccgcagaagatattgtggttcctattagcaccgcttcagaagggtctaccctgctgacatcaatccccgtctccacaacccccgtcgcatccccagaggcttcaacactctccacaaccccggtggattccaatagtcccgttgtgacctctacagagataagtagttccgctacttccgcggagggtacatctatgcctacttctacatatagcgaaggatccactcctctgcgttccatgcctgtaagcaccaagccactggctagttccgaggcttctaccctgtccactacaccagtggatacatcgataccagttaccactagcaccgagacctcgtctagcccaacaaccgcaaaggacacaagcatgcccattagtactccttccgaggtgtccacgtctcttacaagcatattggtcagcacgatgccggtcgcctccagcgaggcctcaaccctttctaccactcccgttgacacacggactctggtgaccaccagcaccggcaccagcagttctcctacaactgcagaaggatcctctatgccaacttctacgcccggtgaacggtcaacccctctgaccaacatcctggtctcgacaacccttttagccaattcggaagcatcaacgttgtccacgactccagtggacacaagcacccccgttacgacatccgcggaggcctcttcttctcctactacggcagagggaacgtccatgaggatttctacccctagcgacggatctactcccctgacatctattctggtgtctactttacccgttgcttcaagtgaagcgtcaacggtttccactacagcagtggatacctcgatccctgtaacaacctcaactgaggcctctagcagccccaccaccgccgaggtaacttctatgccgacaagcacccctagcgaaactagcactcccctcacaagcatgccggtgaaccatacaccggtagcctcatctgaagctggcaccctgagcacaacgccagtagacaccagtacccccgtgactaccagcacaaaagcctcgagcagcccaactaccgcagagggtatagtggtgccaataagcactgcatctgaaggatctaccttgctgacatccatcccggtctctacaacccccgtggcctcaagtgaagcttccacgctgtcgacaacgcccgtcgacaccagcatacccgtgactacatcaacggagggatcatcatctccgaccaccgccgaaggtaccagcatgccaatttctacgcctagcgaggtgagcactccactgacaagtattctggtgagcaccgtacccgtcgcagggtctgaggcaagtactctgtcgaccactcctgtcgacacaaggacgcctgtgacaaccagcgcagaggcttcctcatcccctaccactgccgagggcacttccatgcccatttcaacacctggagagcgccgaaccccactcaccagtatgagcgtctccaccatgcccgtcgcatcttctgaggcatctacactttcacgcacacccgcggacacttctacccccgtgactacatccaccgaggcttcttctagcccaaccactgccgagggaacagggatcccaatctcaacaccttccgaaggctcaacacccctaacctccattcctgttagtaccacgcccgtggccattccagaggcgagcaccctgtcaacaacaccggtggacagtaacagtcccgtggttacaagcactgaagtgtcctctagtccaacacccgccgagggcacttccatgcctatttctacctattccgaagggtctacccccctgaccggagtgcccgtctcaactacgccggtgacttcatctgctatatccacactctcaacaactcccgtggatacatctacccccgtcactacatcaactgaagcacatagctcccctactacctcagagggcacatctatgcctaccagtacacccagtgaaggaagcactcctctgacatatatgcctgtgagtacgatgttggtagtgtcctctgaagattcaaccttgagcgctacccccgtcgacacgtctacaccagtgaccacctcaaccgaagctacatcaagcaccactgctgaggggacatctatccccaccagcactccgtccgagggaatgaccccgcttacatctgtacctgtcagtaatacccctgtcgcgagcagtgaggcttccatcctgtctacaacccctgttgactccaataccccactgacaacaagtacagaagcgtcatcttccccccctactgctgagggtactagcatgccaactagtactccctccgagggatctactcctctcaccagtatgcctgtatcgacgacaaccgtcgcttcatcggagacctcaaccctgagtacaacccctgccgacacctccacgccagtcaccacctactcccaagcgagcagtagccccccaatagctgacgggacctctatgcccacctctacttatagcgaggggagcaccccactaacgaacatgagcttcagcacaacccctgtagtgagctcagaggcttcaacactcagtactacccctgtggatacatccacccccgtgaccacatctaccgaggcctctctgtctcctacgacggctgaagggacatcaattcctaccagtagtccctcagaggggaccacccctctagccagcatgccggtcagcacaacccccgtggtcagtagtgaagttaataccttgtccacgacaccagtggatagtaatacacttgttacaacctccacagaggcctctagctccccaaccatcgccgagggcaccagcctgcctacgtctaccacatctgaagggagcacgccgctcagtattatgccattaagtaccaccccagtggcctcatctgaagccagcacactgtccaccacacctgttgatacatctaccccagtgaccacgagttctcctacaaactcatcacctacgactgctgaagtaaccagtatgccaacaagcacagctggggaagggtcgacccctctcacaaacatgcccgtcagtacaactcccgtggccagttccgaggcgtcgacattgagtactacacctgttgactccaacaccttcgtaacaagtagtagccaggcctccagctcccccgcgacacttcaggtgactacgatgagaatgtcgactccaagtgaaggaagcagctctttgaccactatgttactcagcagtacatacgtgacctccagtgaggcctctacaccatccacaccaagcgttgaccggtcaacccctgttaccacatccactcagtccaactctacccccaccccacccgaggtaattacgttgcccatgagtactccctccgaggtgtctacaccccttaccatcatgccagtctccacaacaagcgttacaatcagtgaagcagggacagcgtctactctgccagttgacacttctacaccagtcatcacaagcacccaggttagcagcagccctgtcactcctgagggtaccacgatgcctatatggacgcctagtgagggttctacacccttgactaccatgcccgttagtaccacaagggtcacttcatcagaggggtctacccttagtactccctccgtagtgacatcaacccccgtgactacctcaaccgaggcaatctcttctagcgccacacttgactcgaccacaatgagcgtttccatgccaatggagatatccacgctgggaaccaccatcctcgtctcgaccacacccgtaacccgtttcccagagtccagtaccccctcaatcccgtctgtttacacatctatgagcatgactacagcgtccgaagggtcaagttctccaaccacattggaagggaccaccaccatgcccatgagcaccacctctgagagatctaccctcctgactactgtgttaattagtcctatatctgtgatgagcccctccgaagctagtaccctgtctactcctccgggggacacgtctacgcccctgctgacaagtaccaaagcagggtcatttagtatcccagcagaggtcaccacgattagaattagtatcacgtctgagcgatctaccccactcaccactcttctggtatcaacaacgttgccaacctcattccccggcgcaagcatcgccagtaccccgcccttggacactagcactacgtttactccctcaactgatacggcctcaaccccgacgattcccgtggccactactatttccgtctccgtcatcacggaagggtcaacaccaggaacgaccatatttattccatctaccccggtgaccagctcaaccgccgacgtgtttcccgccaccacaggagcagtcagcacacccgtaatcacgagcaccgagctcaatacccctagcacctcttctagtagtactaccaccagtttttctacaacaaaagagtttacaacccccgctatgacaaccgccgctcctctcacttatgtaaccatgtctacagccccgagcactcctaggaccactagtaggggttgcactacctctgcctccaccttgtcagcaacttccacaccacacacgagcacaagcgtgacaacgcggcccgtgaccccaagctccgagagcagccgcccatccaccattactagccacacgatacctccgacattcccccccgctcatagctctactccccctacaacatccgccagttcgacgaccgttaacccggaggcagtgactactatgacgactaggacaaagccaagtacccgcactactagtttccccaccgtgacgacgactgccgttcccacaaacacaactattaaatccaaccctacctctacacccaccgtgccgcgcactacgacctgctttggggacggttgtcagaataccgcaagcaggtgcaagaatggaggcacctgggacggtcttaaatgtcaatgcccaaatctgtattacggtgagctgtgtgaggaggtggtgagttccatcgatatcggacctccggagaccataagtgctcaaatggaactaacggtgactgttaccagtgtcaagtttaccgaagagctcaaaaaccactctagtcaggaatttcaggagtttaagcagacctttacggaacaaatgaacatcgtttatagcggcattcccgagtacgtgggcgtcaacataaccaagctccgactgggaagtgtggttgtggaacacgatgtcttactacgtactaaatacacacccgaatacaaaaccgtccttgacaacgccacagaggtcgtgaaggaaaagattacgaaagtcacgacgcagcagattatgataaacgatatttgcagtgatatgatgtgctttaacaccaccggcactcaagtacagaatatcactgtcacccaatatgacccagaagaggattgtcgcaagatggccaaggaatacggcgactattttgtggtagagtatcgtgaccagaaaccttattgcatcagcccatgtgaaccgggcttttcagttagtaagaactgcaatctgggtaagtgccaaatgtcattgtccgggcctcagtgcctgtgcgtgactaccgaaacccactggtactccggcgaaacttgcaaccagggaacacaaaagtcgctcgtgtatggcctagtgggcgctggcgtggtcctgatgttgataatcctggtcgccttgctgatgctggtgtttagaagcaaaagggaagtgaaacggcagaaatatagactgtcacaactctacaaatggcaggaggaagattctgggcccgcaccgggaacatttcagaacatcggtttcgacatttgtcaggacgacgacagcatacatctggaaagcatttactccaattttcagccgagcctgcgccatatcgaccctgaaacaaaaattcggatccaacgtccccaagtaatgaccacttcattttag

SEQ ID NO: 124922 - DNA, 843 bp, synthetic construct
  misc_feature 1..843: note = Description of Artificial Sequence: Synthetic coding sequence
  source 1..843: mol_type = other DNA
atgaccaccgccttgggtagtcagctcagctcgagccaaacagtgattccaggaagcagcggcacgatttcacatacaaccgtggcccctggcagtagcgtgacaggcactaccaccggagcttcagatgatcaggttactggcagtaaaaccggaaccactggagtggccttatctactactgtggcaccgggaagttcttcaacagaggcgaccacaagcacaggcgtccaccggaccactgttgtggggcagaaaactggggccacaacccgcgggtcggccaaacaaggcactcggagtactatagaagctactacgagttttagaggaacaggaactaccgggagcgggatgaacacgggtaccacgggggtagtttctgggaatactattagcccctctagcttcaataccgaagctacaagcgggacgtcggagcgccctaaccctggcagtgaaattggaacaaccgggattgtctcagggaccaccgttgcccctggcagctctaacacagaagctaccacgtccctggggaatggcggaactactgaggccgggtcaaagattgtgaccacaggcattacaaccggaaccactatcgtgccagggagctttaacacaaaagccaccactagcacagacgtgggggtggctaccggcgtggggatggccacagggattacaaacatcatttcagggagaagccagccaaccgggtccaagacaggctatactgtcactggatcaggcacaactgcgctgcctgggggcttccgcaccgattccccctcgttccccctgttcctgatctgtagctatcggggccacaacttttag

SEQ ID NO: 124923 - DNA, 837 bp, synthetic construct
  misc_feature 1..837: note = Description of Artificial Sequence: Synthetic coding sequence
  source 1..837: mol_type = other DNA
ccgacaggtacccagacccctaccccaaccccaatcagcaccaccacaaccgtaacccctacccccacaccaacgggaacacagacccctacaaccacacctataaccaccaccacaactgtgacacccactcctactccgaccgggacgcaaacccccacaaccgttctcatcacaaccacgactactatgacccctacccctactcccacctccaccaagtccacaaccgtgacgccaattacaacaacgacgactgtgacagccacacccactcccaccggtacccagacaccaacgatgattcccatcagcacgactacaaccgtcacaccaacacccacacctaccaccggatctactgggccccccactcatacaagtactgcccccattgccgagctgaccacatccaaccctcctcctgagtcctctactcctcagaccagcaggtcaaccagttctcctctgacggaatcaaccaccctattatctaccctgccacccgccatcgaaatgacgagcaccgcccctcctagcactccgactgcccccaccacaacatccggcggacacactttgagccctccaccctctacaacgacgagcccccctggcacacctacaagaggtactaccaccggcagttcttctgccccaactccctccaccgttcagaccacaaccaccagcgcatggacccctactccaacccctctctctacgccttccatcatcagaaccacaggcctccgtccgtatcctagctcagttctgatctgctgcgtgctgaatgatacttattatgctcctggggaagaagtgtacaacggctag

SEQ ID NO: 124924 - DNA, 5343 bp, synthetic construct
  misc_feature 1..5343: note = Description of Artificial Sequence: Synthetic coding sequence
  source 1..5343: mol_type = other DNA
atgggattacccctggcgcggctggccgccgtttgcctggctctgtccctggctggagggtcggagctccaaacagaagggcggacacgaaaccacgggcacaacgtctgctccacttggggcaacttccactataaaactttcgacggcgatgtctttcggtttccgggattgtgcgactataatttcgctagcgactgcaggggcagttacaaggagtttgcagtccaccttaagcgaggtcctgggcaagccgaggcccccgcaggagtggagagtatcttattaaccatcaaagatgatacgatttacctcacaagacacctcgctgtgcttaacggcgcagtcgtgtccactccccactactccccaggactcttaattgagaaatcagatgcctacaccaaggtatacagccgcgctgggctgacacttatgtggaatagagaagatgccctgatgctggaactggacactaaattcaggaaccatacctgcggactatgtggggattacaacggactgcagagctacagtgagtttctctccgatggggttctgttttcgcctctcgagtttgggaacatgcagaagattaatcaacccgacgttgtttgcgaggaccctgaagaggaagtcgctccagcgtcttgtagcgaacatagagctgagtgtgaaaggctccttacagcagaagcgttcgccgattgtcaggatctggtgccccttgagccttatctgagagcctgccagcaggatcgttgcaggtgtcctggtggcgatacatgcgtttgtagtacggtggctgagtttagcagacaatgctctcacgctggcggccgccccggaaactggaggacagccacattgtgtcccaaaacctgtcccggaaatttggtctacctcgagtccggtagcccctgcatggacacatgctcccatcttgaagtgtcctctctatgtgaggagcacagaatggacggatgcttttgccctgaagggactgtttacgatgatataggcgattccgggtgtgttcccgtgagccagtgccattgccgcctccatggccacctgtatacccccggccaggaaatcactaatgattgcgagcaatgtgtgtgtaatgccggccggtgggtgtgtaaagaccttccgtgtcccggcacttgcgcattggagggtggttcccacattacaacatttgacggaaagacatatacatttcatggtgattgttactatgtgctggccaagggggatcacaacgacagctatgccctcctgggcgagctggcgccatgtgggagtactgataagcaaacctgtcttaagacggtggtactgcttgcagataaaaaaaagaacgttgttgttttcaaaagtgacggaagcgtgcttctcaacgagttgcaagtgaatctgcctcatgtaacggccagtttcagtgtgtttcgccccagtagctaccacatcatggtcagtatggctatcggcgtgagactccaggtgcaactggcgcccgtgatgcagctgttcgtaacccttgaccaggcctcacagggtcaagtccaaggcctgtgtggcaatttcaacggactggagggggatgacttcaagacagccagtggtcttgtcgaggcgactggcgccggttttgcgaatacttggaaggcgcagtcaagttgtcacgataaacttgactggctggacgatccatgtagcctaaatatcgagtctgctaattacgcagagcactggtgtagcctgttaaagaagactgagaccccgttcggcaggtgtcacagcgcggtcgacccggctgagtactacaaacggtgcaagtacgatacatgcaactgtcagaacaacgaagattgcctgtgcgcagcattgagctcctacgctcgcgcctgcacagccaagggtgtgatgctgtggggctggcgcgagcatgtatgtaacaaagacgttggatcctgtcccaatagtcaggtattcctgtacaatctcactacctgccagcaaacctgccggtcgcttagcgaagccgattcccattgtctggaggggttcgctcctgttgacgggtgtgggtgtcccgatcacacctttttggacgagaaaggtcgctgcgtgccactggccaaatgtagttgctatcaccgaggcctttatctggaggctggagacgtcgtggtgagacaagaagagaggtgcgtctgcagggacggtcgtctgcactgccggcaaatcagactgatcggacagagctgcaccgctcctaaaattcatatggactgttctaatctgaccgccttggccaccagcaaacctcgagccctgtcctgccagactttagccgcgggatattaccatacagagtgcgtctccggttgtgtgtgcccagacggactcatggatgatgggcgaggaggttgtgttgtggagaaagagtgcccttgcgtacataacaatgatttgtactccagcggcgccaaaattaaggtcgattgtaacacatgcacatgcaagagaggccgctgggtctgtacacaagctgtctgtcatggcacttgttctatatacgggtcaggacattacattacgtttgatgggaagtactatgatttcgacgggcactgtagctatgtggctgttcaagattactgcggacagaatagctccctcggatctttcagtatcatcactgagaacgtcccttgcggtactactggagtcacgtgctccaaggcaattaaaattttcatgggcagaacagaactgaagttggaagataagcacagagtagtgattcagcgcgacgagggacatcacgtggcctatacaaccagggaggttgggcagtaccttgtggttgagtctagtactggtataatcgtgatttgggataaaaggacaaccgtttttataaaacttgccccatcctataaaggaacagtgtgtggactgtgcggtaatttcgaccataggagtaataatgatttcactactagagaccatatggtcgtgtcctccgaactcgattttggtaactcctggaaggaggccccgacctgtccagacgtaagtactaacccagaaccgtgcagtctgaatccgcatcgtagaagttgggcagaaaagcaatgctcaatcctgaagtctagcgttttcagcatttgccactccaaagttgatcctaagcccttctatgaggcatgcgttcacgactcatgctcgtgtgacactggaggtgactgtgagtgtttctgctctgctgtggcctcttatgcccaggagtgcaccaaggagggcgcttgcgtattctggcggacacccgacctatgccctatcttttgcgactactataacccccctcatgagtgcgagtggcactacgagccttgcggaaatcgatccttcgaaacctgcagaacgattaatggaatccactccaacattagcgtttcgtacctagaaggatgttatcctaggtgtccaaaggatcggcccatctatgaagaagatttaaaaaaatgcgtaaccgctgacaaatgcggctgttatgtggaggatacccattatcctcctggtgcctcggtgcctactgaggagacctgcaaatcttggtgtacctgcacacagactcacactgcataccatgtacatacccacggcaaaattcttaatcagactcaagacggagcattttgctattgggaaatctgcggacccaacggaacggttgagaagcattttaatatctgtagcatcactacacggccaagcacactgacaaccttcaccactatcaccctccccactacgcccacgacttttaccaccaccactaccaccaccacgcctactagcagcaccgtgttatctactacacccaagctgtgctgtctgtggtctgattggataaacgaagatcaccccagtagcggtagtgatgatggcgaccgtgagacgttcgatggtgtgtgcggagctccagaagatatcgagtgtcgatctgtgaaggacccacatctaagcctcgaacaactggggcagaaagtgcagtgcgacgtgagcgtgggatttatatgcaaaaatgaggaccagttcgggaacggcccatttggattgtgttatgactataagattagagtgaattgctgctggccgatggataaatgcattaccacacccagcccacccacaacaacgccttcgccacctccaacatccacaaccacccttcctcccactaccacgccgtctccacctacaaccacaactactacgcctcctcccactaccacgccaagtcctccgattactaccacaactacgccccctccaaccaccacgcccagcccaccgatatcgactacaacgaccccacctcctactacaactccatcacctcctactactactccatcacccccgaccaccaccccttccccaccaaccacaaccacaactacacctccccccaccactacaccctcacctcccacaacaacacctatcactccgcccgcatccacaaccactctgccaccaaccacaactccgtcgccgcctaccacaactacaaccactccgcctccgactacgacccccattacaactactactaccgtcactcccactcccacccctacggggacacagacccccactaccaccccaattacaaccactactactgttacccccacccctacgcccacaggcacccagactccaacttccactcctataactaccaccacaacaactcccactcccacggctatcaccactactactacggtgacccccactccaacacccaccggcacacagacacccaccaccacaccaatcaccactaccacgacagtgactccaacgcccacacctaccggaacacaatctccaacccccacagctattacaacaaccaccaccgtaactccgactcctactcccactgggacgcagactcctacctccacccccattaccacaaccactaccgtcacccctacccccacacccacggggacacagactccaacaccaacgcccatctcaacgaccacaaccgttacccccacacccaccccaacgggcacacagaccccaacgacgactcccatcaccacaacaactactgtcactcccaccccgacccctacaggtacacagacacccaccactacaccgaccccgacttccaccaaatctaccacggtcacaccaattaccaccactaccaccgttactgccacacccaccccaacaggaactcaaacgcctacaatgatccctatctctacaaccaccactgtgactccgtag

SEQ ID NO: 124925 - DNA, 1230 bp, synthetic construct
  misc_feature 1..1230: note = Description of Artificial Sequence: Synthetic coding sequence
  source 1..1230: mol_type = other DNA
gacatcgagtgcaggagtgtgaaggacccccatctgtcactggagcaattgggacaaaaagtgcaatgtgatgtctctgttggtttcatttgtaaaaatgaggaccagtttgggaacggaccttttggactgtgctacgactataagattcgagtgaattgttgctgcacccctactcgcggtaccactacagggtccagctccgcacctaccccctccacggtacagactacaacgacctccgcgtggacccccactccgactcctctgtctactccatcaataattcgtacaactgggttgcggccttacccgtctagtgtgttgatttgctgtgttctcaacgacacctactacgcacccggagaggaagtctataacgggacttatggggatacttgttatttcgtgaattgtagcctctcttgcaccctggagttctacaactggtcttgcccctctaccccttctcccactccaaccccttcaaagtcaacacctacgcctagtaaaccttcctcaacaccctctaaacctacccctgggacaaaacctcccgagtgccctgacttcgacccccccagacaggagaatgaaacctggtggctgtgtgactgttttatggcaacgtgcaagtacaacaatacggtagaaatcgtaaaagtggagtgcgagcctcctcccatgcccacgtgctctaatggcttacagcctgtgagagtggaggacccggatgggtgttgctggcattgggagtgcgattgttattgcaccggctggggagatcctcactacgtaacattcgacggcctgtattattcatatcagggaaattgcacctacgtgttggttgaggagatctccccttcagtggataactttggcgtgtacattgacaattatcattgtgacccaaacgacaaggtttcctgtcccaggacccttatcgtgagacacgaaacacaggaggtgcttattaaaaccgttcacatgatgcctatgcaggttcaggtgcaagtgaacaggcaggctgtcgctctcccatataagaagtatggcctggaggtttatcagagtggcataaactatgtggtggacattcctgagcttggcgtgttggtcagttataacggattaagttttagcgtaaggctaccctaccaccgattcggcaacaacacgaaagggcagtgtggaacctgcaccaacaccacaagcgacgattgttag

SEQ ID NO: 124926 - DNA, 8454 bp, synthetic construct
  misc_feature 1..8454: note = Description of Artificial Sequence: Synthetic coding sequence
  source 1..8454: mol_type = other DNA
atgggccttcctctggccaggttggctgccgtgtgtcttgcactctcactggcagggggctccgagttacagacagagggcagaacccgcaatcacggccacaatgtctgctcgacatgggggaacttccactataaaacatttgatggggatgttttccgctttcctggtctgtgtgactacaattttgcctctgactgccgaggatcgtacaaagagttcgctgtgcacctgaaaagaggacctgggcaggccgaggcccctgccggagtggaatccattctgctcactattaaagatgatacgatatacctcacaaggcacctggccgtgttgaatggcgccgtggtttctactccacattacagcccagggctcttaatcgagaagtctgacgcctacacgaaagtgtatagccgcgctggcctgaccctcatgtggaaccgggaggacgccctcatgctggaactcgataccaagtttcggaatcatacctgtgggttgtgtggcgactataatggtttgcagagctacagtgagtttctgtcggacggtgtgctgtttagccccctagaatttgggaatatgcagaagatcaaccagcccgacgtggtgtgcgaagaccctgaagaggaagtggcgccagcctcctgcagcgagcatagggctgagtgtgaaaggttgctcactgccgaagcattcgccgattgtcaggacttggttcccctggagccttatctgagagcttgccagcaagatagatgcagatgtcccgggggggacacctgtgtgtgcagcacggttgctgaattcagccgccagtgtagtcacgcaggaggcagacctggcaactggcgcactgcaactctgtgtcccaagacatgtccaggcaatttagtgtacctggaatccggttcaccttgcatggacacttgcagtcatctggaagtatctagcttatgcgaagagcatcgcatggatggctgcttttgtcctgaaggcacagtctacgacgatatcggtgattctggttgcgttcccgtttcgcagtgtcattgcaggctgcacggccatctgtatactcctggacaggaaataaccaatgactgcgagcagtgcgtttgtaatgcaggtcgttgggtgtgtaaggatctcccttgtccgggtacatgtgctttggaaggtgggagccacattactacattcgacggtaagacgtacacgtttcacggcgactgttattacgttctggccaaaggagatcataatgattcttacgcgcttctgggcgaattggctccctgcggatctaccgacaagcaaacgtgccttaagaccgtagtgctgctggctgataagaagaagaacgtcgtggtatttaagtctgatggctctgttctgctaaacgagctccaggtaaacctgcctcatgtaacagcttctttctccgtcttccggccatcctcctatcatatcatggtgtccatggcaataggggttagactgcaagttcagctggccccagtgatgcagctgttcgttaccctcgaccaagcctcccaggggcaggtgcaaggcctttgtggcaattttaatggcttggagggggacgacttcaagacagcttccggcctcgtggaggctaccggcgcagggtttgccaatacgtggaaagcacagtcttcctgccacgacaaactggactggctggatgatccctgttccctcaatattgaaagcgcgaactatgccgagcactggtgcagcttgctcaaaaagacagagactcctttcggcagatgccattccgccgtcgaccctgccgagtattacaagcgctgtaaatatgacacttgcaattgccaaaataacgaagactgcctctgcgccgctctgagctcctatgctagggcctgcaccgccaagggggtaatgctctggggctggagggaacacgtctgcaacaaagatgtcggctcgtgcccaaattctcaggtgttcctgtataatctgactacgtgtcaacagacttgccgaagtctaagtgaggcagactcccattgcctggagggtttcgcccccgtggacgggtgtggctgtcccgaccatacgttcctggacgagaagggacggtgcgtcccgctcgccaaatgttcatgttatcacagaggtctgtatctcgaggctggggatgtcgtcgtgagacaggaggaaaggtgcgtttgtagagatggccggcttcactgccgtcagattcggctcatcggccaaagctgtaccgcccctaagatccacatggactgtagcaatctgacagcactggcgacatcgaaaccccgcgctctatcttgtcagactttggctgcaggatactatcacaccgagtgcgtgagtggttgtgtgtgccccgatggtctgatggatgatgggcgcggcgggtgtgtcgtggaaaaggaatgtccatgcgtacacaataacgacctatacagctcaggggccaagatcaaagtcgattgcaatacctgtacttgcaaacgggggaggtgggtatgcacacaggccgtttgccacggcacatgctccatttacggtagtggacactacattacatttgatggcaaatattacgacttcgacggccattgctcatatgtcgcagtgcaggactactgtggccaaaattcttcactgggcagcttttcgattataacagagaacgtgccttgcggaactacaggagtgacatgcagtaaggcaattaaaatatttatgggaagaacagagctgaagctggaggataagcaccgagtggtgatccaacgggatgagggacaccatgttgcttatacgacacgagaggtgggccagtacctcgtggtcgaatcaagtacaggaatcatagtcatttgggataagaggaccaccgtgtttattaaactcgcaccctcttataaaggaactgtttgcggactgtgtggcaattttgatcataggtccaacaatgattttactactagagatcacatggtggtatcgtcagaactagacttcgggaattcatggaaggaggcccccacatgcccagacgtgagcacaaacccagaaccttgctctctgaacccacatcgtcggtcttgggccgaaaagcaatgctcgatactgaaatctagtgtattttccatttgtcacagcaaggtagaccccaaaccgttctacgaggcctgcgtgcacgattcatgctcgtgcgacacaggcggagactgtgaatgtttttgtagcgcggtggcctcatacgcacaggaatgcacaaaagaaggcgcatgtgtcttttggaggacgcctgatctctgtcctattttttgtgattactacaatccaccacacgagtgcgagtggcattatgaaccttgcgggaaccgcagctttgagacatgtaggacaattaatggtatccatagcaatatttccgtcagttatctggaaggttgctacccaaggtgtcccaaagataggcccatctacgaagaagacctgaaaaaatgcgtgactgccgacaagtgtggatgttatgtagaggatacacactacccacccggggcaagtgtgcctactgaggagacatgtaagtcctgtgtctgcaccaatagctcacaggtggtctgtcgacccgaagaaggaaagattctgaaccagacacaggacggcgctttttgttactgggaaatttgtggcccaaatgggactgttgagaagcactttaacatttgcagcatcacaacccgcccatctacactcactacattcacaaccattacacttcctaccacacctacaacattcaccaccacaacaactacaactacccccactagcagtaccgtcctgtccacaaccccaaagctctgttgcctatggagtgactggatcaacgaagatcatccatcaagcggaagcgacgacggtgaccgtgaaacgttcgacggggtctgcggagcccctgaggacattgagtgccgcagcgtaaaggatcctcacctaagcctggaacagctggggcagaaggtccagtgcgacgtttctgtgggattcatctgcaagaatgaggatcagtttggcaacggccccttcggcctgtgctacgattacaagatccgcgtgaattgttgctggcccatggacaagtgcattactactccctcgccacctaccaccacgccaagccctcccccgacctctaccacaactctccctccgactacaacccctagtccccctaccacaacaaccacaactccccccccaacaacaaccccttcacctccaatcacaactaccacaacaccgccaccaacaacaactcctagcccccccataagtactacaaccacacctcctcctacaaccacaccctctccacctacaacaacaccatctccgccaaccactaccccctcaccaccaacgacaactactaccacaccgcccccaacaactacaccgtccccaccaactacaaccccaattacaccacctgccagtaccaccacactgccgccaactactacaccctccccaccaaccaccaccacaacgacacctccaccgacaacaacccccatcactacaaccactacagtgacgcccactcccactcccaccggtactcagactccaacaacgacgcctatcaccactaccacaacagtgactcctacaccaaccccgaccggcacccagacgccaactagtacgcctattacaaccacgaccaccgtcactccgacccccacccccaccgggactcagacccccactaccacacccataacaactaccactacggttacgcccacaccgactcctacaggcacccagactcctacccccactgcgatcacgacaaccactaccgttactccaacccctacccctaccggtacacagactcccactaccactcctatcacaacgactactacagtgaccccgacgcccacccctacaggtacacaatcaccgactcctaccgccatcacaacaaccacaaccgttactccaactcccactcctactgggacacagacaccgaccagtactccgatcacaacgaccacaacagttactccaacgcccacgccaaccggcacccagaccccaactcccacaccgatcagtacaaccacgaccgtgacgcctacaccaactcccacaggaacacaaactcccacgaccacccctatcacaaccaccacaaccgtaaccccaacaccaacccccaccggtactcagaccccgaccacggtactgatcaccacgacaactaccatgactccgaccccaacacccacctcaacaaagtccacgactgttactcccatcaccactacaaccactgttacggcaacaccaacgcccacgggcactcagactccgactatgatccctataagcacaaccactactgtgacccctacgcccacaccgactaccgggagcacgggaccccccacccacacctccacagctcctatcgccgagttaacgacctctaaccctccccctgagagctctaccccccagacctcccgcagcacatcaagtcctctaaccgaatctactactttactctcgactttgcctcctgctattgagatgaccagtacagcgccgccttccacacccaccgctccaactacaacctcgggtgggcatacgctctccccgcccccctccacaactacatctcctccagggacaccaacaaggggcaccaccacaggttcaagctccgcccctaccccaagcacagtccaaactacgacgactagcgcctggacccctacccctactcccctgtccaccccctccatcatccgtacaactgggttacggccctatccatcaagcgtattgatatgttgcgtactaaatgacacctactatgcgcccggcgaggaagtgtacaatggcacttacggtgacacctgttattttgttaactgtagcctgagctgcacgctcgagttctacaactggagttgtccctccacacccagccctacacctacacccagtaagagtacccctacgccttcaaagccaagctctaccccttccaagcctaccccaggtaccaaacctcccgaatgcccggacttcgatcctcctcggcaagagaacgaaacatggtggctgtgtgattgtttcatggccacatgcaagtacaataatactgttgaaatcgtcaaggtggaatgcgagcccccccccatgccaacgtgctctaatggtcttcaacctgttcgagtggaggaccccgacggatgctgctggcattgggagtgcgattgctactgtaccgggtggggtgacccacattacgtgacatttgatggcttgtattattcctatcagggcaattgtacttacgtgctggtagaggagatcagtccctcggtggacaacttcggagtgtatattgacaactaccactgtgatccaaacgacaaagtcagttgtccacggacccttattgtccgtcacgagacccaggaggtgctaatcaagactgtccacatgatgccgatgcaggtgcaggtccaggtgaaccgtcaagccgtggccttgccctacaagaagtacggcctcgaagtctaccagtcagggattaactacgtggtagatattccagagttgggagtcctcgtttcatacaacgggctgagcttctccgtgcggctgccatatcatcgcttcggaaataacacaaaggggcagtgcggcacatgtactaacaccacaagcgacgattgtatcctaccatcaggcgagatcgtgagcaactgtgaggccgcagccgatcaatggctagtaaatgaccctagcaagcctcattgccctcatagctcctctactaccaagcgtcctgccgtcactgtgcccgggggtggcaagacaactccccacaaagattgtactccctctccactgtgccaattgattaaggattctctcttcgcccagtgccatgccctggtgcccccacagcattactatgatgcgtgtgtgtttgactcttgcttcatgccagggtcctccctagagtgcgcaagtttgcaagcatatgccgccctctgtgcacagcaaaacatttgtctcgactggcgcaaccatacgcacggggcctgcctggttgagtgtccctcgcatcgtgagtaccaggcttgtggtcccgctgaagaacctacctgcaaatcatctagtagccagcagaataacactgttcttgtggaagggtgcttctgccctgaaggcaccatgaattatgcaccaggtttcgacgtgtgcgttaagacctgtgggtgcgtgggccctgacaatgtgcctcgggagttcggggagcacttcgagtttgattgcaagaattgtgtgtgtttggagggcgggtctgggataatctgccaacctaaacgctgctcccagaaacctgtgactcattgcgtggaggacggaacctacctggcaaccgaagttaaccccgccgacacctgttgcaacatcacagtgtgtaagtgtaacacaagtttgtgcaaggagaagccaagtgtttgtcccctgggatttgaggtaaagtcaaaaatggttccagggcgatgttgcccgttttattggtgcgaaagtaagggcgtgtgcgtccatggaaacgccgaataccaaccaggttctcctgtgtattcgagcaaatgccaggattgcgtttgtaccgacaaggtggacaacaataccctcctcaacgtgatcgcctgcacacacgttccatgcaacactagctgtagcccagggttcgaactgatggaggcccccggagagtgttgtaagaagtgtgagcagacacactgtatcattaaaagaccagataaccaacacgtgatactgaagccaggcgactttaaatcagatcccaaaaataattgtaccttcttttcatgtgtgaagatccacaaccaactgatatcttccgtttctaatatcacctgcccaaatttcgacgctagtatctgtattcctggctcaatcacatttatgcccaatggttgctgtaagacctgcactccccgaaatgagacccgcgtcccctgtagtacggttccagtcaccaccgaggtcagctatgccgggtgtacaaagaccgtgctgatgaaccattgctcgggtagctgcggcacctttgtgatgtatagcgctaaggcacaggcgctcgaccactcttgttcatgttgcaaagaagaaaaaactagccagcgagaagttgtcctttcctgccctaacggtggatctctaacgcatacctacacccatatcgagtcatgccaatgccaggatacagtttgcggcctcccaaccgggacttcacggagggcgcgtcgttccccccgacatcttggtagtggctag

SEQ ID NO: 124927 - DNA, 2631 bp, synthetic construct
  misc_feature 1..2631: note = Description of Artificial Sequence: Synthetic coding sequence
  source 1..2631: mol_type = other DNA
atctattccactgtttctacatctactaccgctattaccagccatttcaccactagcgagacagctgttacccctactccagtgaccccaagctcactgagcactgatatcccaactaccagcctgagaacactgacacccagttctgtggggacgtccacgtccctgacaacaactaccgattttcctagcattcctaccgacatttccacccttcctacacgaacacacatcatttctagctcacctagcatccagtccaccgagactagctcgttggtggggacgaccagccccaccatgtctactgtgaggatgactttacggataacagagaacactccaatctcctcattttctaccagcatcgtggtgatcccagagacacccacgcagaccccccctgtcctgacgagtgcaacaggaacacagaccagccccgctccgacgactgtgacctttgggagcaccgacagctcaacgagcacgttacacactctgacccctagcacggcccttagcactattgtatcgacctctcaggtgcccatcccatctactcactctagcactcttcagactacccccagcacccccagcctccagacttcactcacttcgacaagcgagtttacaaccgaatccttcaccagggggtcgacttccaccaacgctatccttacgagcttttcaactatcatttggtcgagcacccccacaatcatcatgagcagctcgccctcttccgcatctatcaccccagttttcagcaccactattcacagtgtgcctagcagtccctatatctttagcacagagaatgtgggatctgcatctatcactgggttcccatccctgagcagctcagcgaccacgagtacctcgtccacttcatcctcactgacgactgcccttaccgaaattacccccttttcttacatatctctgccaagtaccacaccttgtcccggaaccattactatcaccattgtcccagcatctcctacggacccttgcgtggaaatggatccctcgaccgaggccacatccccacccaccactccacttactgtgtttccctttacgaccgagatggtgacatgccctacatccatttcaattcagacgacgctgacgacctacatggatacgtcttcaatgatgccagagagtgaaagttctatttcccctaatgctagtagcagtacaggaactgggaccgtgccaacgaatacagtattcacttcgacacggctgcccaccagcgaaacttggctgtcaaactcttcagttataccattgcccctgccgggtgtttccacaatacctctcaccatgaagccgagtagcagcttgcccactatactccgaacaagcagcaagagcacccatccctctcctccgaccacaaggacttccgagacccctgtggctactacccaaactcccactacattaacttcgaggcggacaactcggattacttctcaaatgacaacacaatcaacactcactactacagcaggcacctgtgacaacggagggacctgggagcagggacagtgcgcatgtctgccgggtttctctggcgatcggtgccagctccagaccaggtgccagaatggggggcagtgggatggcctaaaatgccaatgccccagcacattctatggctcatcatgtgaatttgcggtggaacaggtagatctggacgtggttgagacagaagtggggatggaagtctccgtggatcagcagttttctcctgacctaaacgacaatacgagccaggcttatcgggacttcaataaaactttttggaaccagatgcagaagatctttgctgacatgcaaggctttacctttaagggagtcgaaattctctctcttaggaatggctccatcgttgtggattacctggtgctcttggaaatgccattctcccctcagttagaatccgaatatgaacaggtgaagactactctgaaggagggcctgcaaaacgcaagccaggatgcgaactcttgtcaggactcacagactctctgctttaagcccgatagcatcaaagtgaataacaatagcaagacagaattaacaccggaagcgatctgtcgacgggctgccccaacaggatacgaggagttctactttcctctggtcgaggccacacgactaaggtgtgtcacaaaatgcacttcaggagtcgacaacgccatcgattgtcaccagggccagtgcgtgttagagacctcagggccagcttgtcgatgttactctacggatactcattggttctctgggccccggtgtgaggtggccgtgcactggagggcccttgtgggcggtctaaccgccggcgccgccctgttagtactgctgcttttagctctaggcgtcagagcggtcagaagtgggtggtggggaggccagcgtagaggacggtcgtgggatcaggatcgcaagtggtttgagacttgggacgaagaggtggtcggtacattcagcaattggggcttcgaggatgatggaactgacaaggacaccaatttccacgtggctttagaaaacgtcgataccacaatgaaggtgcacatcaagcgcccagaaatgaccagttccagtgtttag

SEQ ID NO: 124928 - DNA, 927 bp, synthetic construct
  misc_feature 1..927: note = Description of Artificial Sequence: Synthetic coding sequence
  source 1..927: mol_type = other DNA
tgtgataacggcggcacttgggagcagggtcagtgtgcatgcctgcccgggtttagtggcgatcgttgccagctgcagacacgctgccagaatggagggcaatgggacggattgaaatgccagtgcccgtcaactttctatggatcctcctgcgaattcgccgtggagcaggtggacctcgacgtagtagaaacagaggtgggcatggaggtttccgtggatcaacagttctcccctgatttgaacgacaatacatcccaagcatatcgggactttaataaaacattttggaaccagatgcagaaaattttcgccgacatgcagggtttcacattcaaaggggtggagattttgagcctacgcaatggtagtattgttgtcgattaccttgtactcctggaaatgcctttttcaccgcagctggaatcggaatatgagcaggtgaagacaaccctgaaagagggtcttcaaaatgcctcacaggatgccaattcctgtcaggattctcagaccctgtgcttcaagccagattccatcaaagtgaataacaactctaaaaccgaacttacccctgaagctatttgtagacgagccgctcctaccggatacgaagaattctactttcctttagtcgaggccacaaggttgcgctgtgtgacgaagtgtaccagcggtgtggataatgctattgactgtcaccagggccaatgcgtcttagagacaagcgggcctgcatgccgcagctgggaccaagacaggaaatggttcgagacctgggatgaggaggtggtaggaacgttctcgaactgggggtttgaagacgatggcaccgacaaggatacaaacttccatgtggcactcgagaatgtggatacaactatgaaggtccacatcaagcgcccagaaatgaccagctcttcagtgtag

SEQ ID NO: 124929 - DNA, 3531 bp, synthetic construct
  misc_feature 1..3531: note = Description of Artificial Sequence: Synthetic coding sequence
  source 1..3531: mol_type = other DNA
atgaaaggtgctcgttggcgaagagtgccctgggttagtctcagttgtctttgcctatgtctcctcccccatgtcgtaccgggcatgaccactccctccctgaagacggacgggggccggcggactgctacgagccctcctccgacaacctctcagactattatctccacaattccaagcactgctatgcataccaggtcaactgccgcgccgattcccatattaccggagcggggagtgagtctgtttccttatggggcaggcgcgggtgatctggaattcgtcaggcgtacagtagatttcactagccccttgttcaagcctgctacgggattccctctcggaagtagtttgcgcgactcactctattttacggacaatgggcagatcatctttcccgagagtgactatcaaatctttagttaccctaatccactccccaccggatttacaggaagagacccggtggctttagtggcacccttctgggatgacgctgatttcagtaccgggcggggaacaacgttttatcaggagtacgagactttctatggcgagcacagcctgctggtgcagcaggccgagtcctggattaggaagatgaccaacaatgggggttataaagccagatgggccctcaaagtgacctgggtgaacgcccacgcataccccgctcagtggacacttggctcgaatacctaccaggcgattttgagcaccgatggctcgagatcttatgcgctgtttctttaccagtccgggggcatgcagtgggatgtggctcaaaggtcaggcaacccggtgcttatgggattctctagtggcgatggatatttcgaaaatagcccattgatgtctcagccagtctgggaaaggtatagaccggatcgatttctaaacagcaatagtggcttacagggactgcagttttatcgtcttcatcgggaagagcggcctaactatcgtcttgaatgcctgcaatggttgaaatcccagcccaggtggccgagctggggctggaatcaggtgtcttgcccttgctcttggcaacagggtcggagagacttaagattccagccagtgagtataggcagatggggtctgggctctcgccagttatgcagctttacttcctggagagggggcgtttgttgcagctatggaccctggggagagtttagggagggctggcatgtgcagcgcccctggcaattggcccaagagctcgagccgcaatcctggtgttgccgatggaatgacaagccctacctgtgtgccctgtaccagcagagaaggcctcacgtggggtgcgctacatatcggcccccccaacctgcttggatgtttggagatcctcatatcacgactctggacggtgtgagttatacctttaacggtttgggcgattttctcctggtgggggcccaggatggaaattctagcttccttctccagggccgaaccgcacaaactgggtctgcccaggctactaattttatagcatttgccgcccagtaccggtcttcatccctgggtccagttaccgtccagtggctcctggagcctcacgatgctatccgtgtgcttctagacaatcagacggtaacattccagcccgaccacgaggatggcggcggccaggagacatttaacgctaccggcgtgctgctttcccgaaacgggtcggaggtctcggcttcatttgacggctgggcaaccgtgagtgtgatcgcactcagcaacattctccatgcgtcggcctcattaccacccgaataccagaacagaaccgagggacttcttggcgtgtggaacaacaacccggaggacgatttccgcatgccaaacggaagcactattcctcctgggagcccggaggagatgctcttccactttgggatgacatggcaaatcaacggtacaggtctcctcgggaaacggaatgaccaactcccttctaactttactcccgtgttctactcccagttgcaaaagaactcgagttgggctgaacacttgattagtaactgtgatggagactcaagctgtatttacgataccctggcacttaggaatgctagtatcggactccataccagggaggtgtctaagaattacgagcaggcaaatgctacactcaatcaataccccccatccattaatgggggcagggtcatcgaagcctacaaaggacagactactttgatccagtatacctccaatgcagaggacgccaacttcactttgagagatagttgtaccgatcttgagttgttcgagaacgggacactgctctggacacccaaaagtctagagccctttactcttgagatcctggcaagaagcgctaagatcggcctcgcttccgccttgcagccaagaactgtcgtttgccattgtaatgccgagtctcagtgcctgtataaccaaacctctagagtaggcaatagttctctcgaagtcgcaggctgtaagtgtgatggaggaacatttggtcggtactgcgagggttccgaggatgcctgcgaggaaccatgctttccttcggtacattgtgtgcctgggaaagggtgcgaagcgtgtcccccaaatctgaccggcgacggccgacattgtgctgcactgggttctagcttcctgtgtcagaatcaatcttgcccggtgaattattgttataaccaaggacactgttatatcagccagactctcggctgtcaacccatgtgtacatgtccgcccgccttcacggatagtagatgcttcctcgccgggaataacttcagccctaccgtgaacctggagttgccactgagggtgatccagttacttctgtctgaggaggagaatgcttccatggcggaggtcaatgctagcgtggcatacaggctggggaccctggatatgcgggctttcttgcgcaatagccaagtagaacgaattgattctgctgcccccgcaagcggtagccccattcagcactggatggtgatcagcgaatttcagtaccgcccacgaggccctgttatagacttccttaacaatcaacttctggcagccgtggtggaggcatttctgtaccacgtgcctagacgcagcgaagagccaaggaatgatgtggtgttccagcccatcagcggagaggatgttcgggatgtgacagcccttaatgtgtcaactctgaaagcttatttccgctgcgacggttataagggttatgatctggtgtattccccccaatccggcttcacctgcgtgtccccctgcagccgaggttactgtgaccatggtggccagtgccagcacctcccttccgggccccggtgtagctgcgttagttttagtatctacacagcttggggggagcactgcgagcacttgtctatgaagctggacgcctttttcggcatcttcttcggggccctgggtgggcttctgctgcttggcgtcggaacatttgtggttttgcgcttctggggctgcagcggggcgcgcttttcctacttcctgaattccgcagaggcacttccctag

SEQ ID NO: 124930 - DNA, 3378 bp, synthetic construct
  misc_feature 1..3378: note = Description of Artificial Sequence: Synthetic coding sequence
  source 1..3378: mol_type = other DNA
atgaaaggcgcacggtggcggcgcgttccatgggtgagtctgagttgtttgtgtctgtgtctgttaccgcacgtggtgcccggagtcagtctgttcccatacggcgccggcgccggagacctggaattcgtgaggaggacagtcgacttcacatccccattattcaagccggcgaccggtttccccctgggctccagtctccgggattctctgtatttcacagacaacggacagatcatttttcctgaatcagactatcagatcttctcatatcccaatcccctgcctacaggctttacgggccgagatccggttgccctggttgcaccgttctgggatgacgctgatttcagtactggcagggggacaacattttaccaggagtacgaaacattttatggcgagcacagcctcctcgttcagcaggccgagagttggattcggaagatgaccaacaacggcggttacaaggcccggtgggcgctaaaagtaacatgggtgaatgcacacgcctaccccgcccagtggacgctcggatctaacacgtatcaggccattctgtctaccgacggttctcgaagttacgcgttattcttatatcagagtggtggcatgcaatgggacgtggctcaacgctctgggaaccctgtgctcatgggtttctcaagtggcgatggttactttgaaaactctcctttgatgtctcaaccggtgtgggagagataccggcccgatcgcttcctaaactcaaacagcggactgcaagggctgcagttttaccggctgcaccgtgaggagcggcccaactaccggctcgagtgcctgcagtggcttaaatctcaacctcgttggccatcttggggctggaatcaagtatcctgtccctgcagttggcagcagggccgccgcgacctacggtttcagcccgtgtcaattggtcgatggggacttggttcgcgccagctgtgctctttcaccagctggagggggggggtatgttgtagctacgggccctggggcgagtttcgcgagggctggcacgtccaaaggccgtggcaactcgcccaggaactcgaacctcaatcctggtgttgcaggtggaatgacaaaccctacctgtgcgcgctgtaccagcagcgccgccctcatgttggctgcgccacctacaggcccccgcaaccagcttggatgttcggggaccctcatatcaccaccctggacggcgtgtcatataccttcaatggcctaggcgacttcttgcttgtaggagctcaggacgggaatagctcctttctgctgcaggggcgcacagctcagaccggctctgctcaggctacaaactttattgcttttgcagcccagtaccggtctagctcactcgggcccgtgacggtgcagtggctactcgagcctcatgatgccatcagagtacttctggacaaccagacagtaaccttccaacccgatcatgaagacgggggaggtcaggagacgttcaatgccaccggagtgctactatcccgcaatggctcggaagtgtctgcgagcttcgacggctgggctaccgtgtccgttatcgctctctctaatattcttcatgcctcagcctcgcttccccccgaataccagaacaggaccgaggggctcctaggagtttggaataacaatccagaagatgactttcgcatgccgaacggttcaactataccccctgggtctccagaggagatgctatttcacttcgggatgacatggcaaataaatggaaccggcctgctaggtaaacgaaatgatcaactcccgtctaattttacccccgtgttctacagtcaactgcaaaagaacagctcctgggccgagcacctgatctccaattgcgatggggactccagctgcatctatgataccttagccttgaggaacgcaagcattggcctgcacacacgagaagtgagcaagaactacgaacaggctaacgcgactctaaaccaatatcctcccagcattaatgggggccgggtgatcgaggcttacaaagggcagacaactctgattcaatacacgtctaacgcggaggacgccaacttcacattgagggactcttgcaccgatctcgagctgttcgagaacggaactctgctctggacccctaagagtctggaaccatttaccctggagatactcgctcgcagcgcaaagatcgggttggcatcagcactgcaacctcggacggtcgtctgccactgcaacgctgaatctcaatgtctgtataatcagactagtcgagttggaaactcatccctggaggtagccgggtgcaagtgcgatggcggtaccttcggtcgctattgtgaaggatctgaagatgcatgcgaagagccatgctttcccagcgttcattgtgtgcccgggaaggggtgcgaggcctgtccccctaacctgacaggagacggacgacattgtgctgcattaggaagctcattcctttgccagaatcaatcgtgtcctgtgaactattgctataatcagggacactgttatatctcacagacactcggctgtcagcccatgtgtacatgtccccccgcatttacagactccagatgttttctcgctgggaacaattttagtcctacagtgaatctggagcttcctctgagggttattcaactgttgctttccgaggaagaaaatgccagtatggcggaagtaaacgcttcagtggcttaccggctcggcaccctggatatgcgagcctttctccgaaattctcaggtggagcggatcgattctgcagctcctgccagcggaagtcctatccagcactggatggtgattagcgagttccagtataggccaagggggcctgtgattgactttctcaataaccagcttcttgctgcagtggttgaagcgtttctctaccatgtgccgcgacgaagcgaggaaccccggaatgacgtcgtttttcagcccatcagtggcgaggatgtgagggacgttactgccctgaacgtgtccactcttaaagcttatttccgttgcgacggctacaagggatacgatctggtctactcacctcagtctggtttcacgtgcgtgtccccttgctccaggggctactgcgaccacggtgggcaatgccaacacttgccctctggccctcgatgctcttgtgtaagtttttcaatctacacagcctggggcgagcactgcgaacatctcagcatgaaattggatgcgttcttcggaatcttctttggcgcactgggagggttgctccttctgggagtgggcacatttgtggtgctgaggttctggggatgctcgggtgcgagattcagctacttcctgaattcagctgaggccttaccatag

SEQ ID NO: 124931 - DNA, 5739 bp, synthetic construct
  misc_feature 1..5739: note = Description of Artificial Sequence: Synthetic coding sequence
  source 1..5739: mol_type = other DNA
cctgggaccacagaggacaccctgatcaccggaagcaaaaccgcagccccggtgacctccactgggagcaccacagccactctggagggccaaagcacagccgcctcaagtcgaactagtaatcaagacatctctgcaagctcacagaatcatcagactaagagtacagaaaccacatctaaagcacagacagacaccctcactcagatgatgacgagcacgctgttctccagcccatctgttcacaatgtgatggagaccgctcctcctgacgaaatgaccacctcctttcccagttccgttaccaataccctgatgatgacgtccaagacgatcactatgactacctctaccgatagtacgctgggtaataccgaggagacctctaccgctggcaccgaaagtagtactccggtgactagcgccgtgtctattaccgccggacaggaggggcagtcacgcactacttcctggagaacttcaattcaggacacgtctgcctcctcgcagaatcactggacaaggtctacgcagacgacccgggaatctcaaacaagcaccctgacccaccgaaccacatctactcctagctttagcccttccgttcataatgtaacagggacagtgagtcagaagacgtccccctctggggagaccgccacttccagcctgtgcagcgttacaaacacatcaatgatgacttcagagaagattacagtcacaacctctactggttcgacactgggtaatcccggagagactagctctgtacccgtcacagggtccctcatgcctgtgacctccgccgcactcgtaaccttcgacccggaaggacagtcaccagctaccttctccagaactagcacacaggataccacagccttctctaaaaaccaccagactcagagcgtggagaccactagagtcagtcagattaacaccctgaacacactcacacctgtcacaacgtctactgtcctgtcgtcaccgtcaggcttcaatccttctggtacagtctcccaggagacttttcccagcggcgagacgacaacatccagcccctcttctgtttcgaatacattcttagttacatccaaagtattccgcatgcctacgtcgagggacagtacactagggaataccgaggagaccagcctgagcgtgtctggtacaatctcagcgataacatccaaggttagtacaatctggtggtctgacacactttctaccgcactctcgccctcatcccttccaccgaagattagtaccgcatttcacacccagcagagcgaaggtgctgaaaccaccggccggccccatgaacgttcctctttttcccccggcgtcagccaggaaatatttacactgcacgagacaactacctggccaagttctttttcttctaagggccacacgacgtggagccagactgagcttccaagtacttctacaggagccgctactaggctggtgaccggcaacccttccacaggaacagctggaactattcctcgcgtgcctagtaaggtatccgcaataggtgaaccgggggaacccactacctatagctctcactcaaccactctcccaaaaaccaccggcgccggagcacagacccagtggacccaggaaacaggcactaccggcgaggctctgctgagctcccccagctactcggttacacaaatgattaaaaccgccacaagcccatcttcatcaccaatgttggacagacacacctctcagcaaattacaactgccccctcgaccaaccattccaccatccattctacttctacttccccccaggagagcccagccgtgagtcagcggggacacacacaggcgcctcagacaacacaggaaagccagacgacacgatctgtaagccccatgacagatactaagaccgtgacgacacctggctcctcatttaccgcatccggacattctccttctgagatcgtcccccaggatgcgccaactatttctgccgcaaccaccttcgctcccgctccgaccggtgatggtcacaccacacaagcccctactaccgctttacaagcggcaccaagtagtcacgacgcgaccctgggaccaagcggtggcactagcctgagcaaaaccggcgctctgacactagccaactccgtggtcagcacccccggtggccccgagggccagtggacttcagctagcgccagcactagtcctgatacggccgccgcaatgacgcatacacatcaagccgagtctaccgaggcaagcggccaaacacaaacatcggagccggcatcgtctgggagcaggactacttcagctggcacagctacgccaagctcctctggggcaagcggtacgacgcctagcggatcagagggaatctctaccagtggagaaaccacccgcttttcatctaacccctcacgcgatagccataccactcagtcaactaccgagcttctttctgccagtgcaagccatggcgctatcccggtctccactgggatggccagctcgatcgtgcctggaacctttcatccaacactgtcggaagcatctactgctggaagacccaccggtcaatcatctcctacatccccatccgcctcaccacaggagacagccgccatctccagaatggctcaaacccagaggaccagaacctcccggggttctgacaccattagcctcgcctctcaggccactgatacattctctacagtgccccccacaccacctagcatcacctctacaggattaacaagtccacagacagagacccacactctgagcccatcaggaagcggaaagaccttcacaacggctctgattagcaacgcaactccactccctgtgacctacgcatccagcgcctccaccggacacgcaactccactggctgtgagcagcgccaccagcgccagcaccgtgagcagcgatagcccccttaagatggagacgcccggaatgaccactccttctctcaaaacagacggtgggcggagaactgcaacctctccacctccaaccacgagccagacaattattagcaccatacccagtaccgcaatgcatacgaggtctactgcggccccaatcccaatcctgcccgaacgcggggtctcccttttcccatacggcgccggggcgggagatctcgaatttgtgcgccggactgtggattttactagccctttgttcaaaccagcaaccggttttcccctcgggtctagcctgcgggactcactttattttaccgataacggccagataatcttcccggagagcgattaccagatttttagctacccgaatcccctgcccactgggttcaccggtagggaccccgtcgcactggtggcccctttctgggacgatgctgatttcagtactggcagaggcaccacattctaccaagagtacgaaaccttctatggggaacacagtctgctcgttcagcaggctgagtcctggatcagaaaaatgacgaacaacggcggctacaaggccaggtgggctttaaaagtaacgtgggtgaatgcacatgcgtatcccgcacagtggacactggggagcaacacataccaggcaatcctatctacagatggcagtagaagctacgcactgtttctgtaccagagcggcggtatgcaatgggatgttgcccaacggagcggaaatccagtcctcatgggcttttccagtggagacggttatttcgaaaattctccactaatgtctcagcctgtgtgggagaggtacagaccagataggttcctgaattcaaattcaggtctacaaggcctgcagttttatagactgcatagagaagaaagacctaactacagattagagtgtctgcagtggctgaaatcccagcctcggtggccatcttggggctggaatcaggttagctgcccctgctcctggcaacagggccgcagagacctgagattccagcccgcaagcttgccacccgagtatcagaaccggaccgaaggcctgctgggggtgtggaacaataaccccgaggacgactttcgaatgccaaatgggtccaccattccgccgggctctcctgaggagatgctgttccattttggcatgacctggcagattaacggcaccgggctactgggcaagagaaacgaccagctgccgtcaaactttacccccgtcttttattctcagctccagaaaaacagctcctgggctgagcacttaataagtaactgtgatggtgactcctcatgtatttacgacacgctagctctgagaaacgcgtctatcggcctccatacccgagaggttagcaaaaattacgaacaggctaatgctacattgaaccagtacccacctagtataaacggcggacgggtgatagaagcctacaaagggcagaccaccctcattcaatacacctccaatgcagaggacgcaaacttcacacttcgagactcatgtacggatctggagctcttcgagaacgggaccctgctatggaccccgaagtcactggagccatttacactggagatactcgccaggagtgccaagattggccttgcttccgcactgcagccaaggactgtggtttgtcattgcaatgccgagagccagtgcctgtacaaccagaccagtcgagtcgggaattccagtctggaagtagccggctgcaaatgcgatggaggaacttttggcaggtactgcgagggctccgaagacgcctgcgaagaaccctgcttccctagcgtgcactgcgtgcccggtaagggctgtgaggcatgccccccaaacctgacaggcgatggacgacactgcgcagctcttggatcctcgtttctttgtcaaaatcagagctgccccgtcaactactgctacaatcagggacattgctatatctctcagaccctcggttgccagcctatgtgcacctgcccaccagcctttacagatagtagatgcttcttagctggaaacaatttttctcctaccgtgaatcttgaactgcccttaagagtcattcagttgctgctgtctgaggaagaaaacgccagcatggcagaggtgaacgctagcgtggcttacagattggggactctggatatgagggccttcctccgcaatagccaggtagagcgcattgactcggctgcccctgcatcagggtcccctatacaacactggatggtcattagcgagtttcagtataggccgaggggccctgtgatcgactttctaaacaatcaactgctcgctgcggttgtcgaggcctttctgtatcacgtgcctcggaggtccgaggaaccccgtaatgacgtagtcttccagcctatatctggtgaagacgtccgggatgtaaccgccttgaacgttagcactctgaaggcctactttcgatgcgatggctataagggctatgacctggtctacagcccgcagtctgggtttacttgtgtgtctccttgttcgagggggtactgcgaccacggggggcaatgtcagcatctgcccagtgggccgagatgttcttgtgtgagtttttcaatctatactgcctggggggagcattgtgagcatttgtctatgaagttagacgccttctttggcattttctttggggccctgggtggcctgttactgctcggggtggggacatttgtggtcctgcgcttctggggatgctccggagcccgcttttcttattttctgaatagcgctgaggccttgccttag

SEQ ID NO: 124932 - DNA, 16239 bp, synthetic construct
  misc_feature 1..16239: note = Description of Artificial Sequence: Synthetic coding sequence
  source 1..16239: mol_type = other DNA
atgaagggcgcccgctggaggagggtcccttgggtctccctgtcctgcctttgcctgtgcctgctccctcatgtagtccccggaaccacggaggacacactgatcaccgggtcgaaaaccgctgccccagttacttcgacaggatccaccacggccaccctggagggtcagtcaactgcagccagttccagaacctccaatcaggatatctctgccagctcgcagaatcatcagacgaagagcacagaaactacatcaaaggctcaaacagacaccctgacccaaatgatgaccagcacactattcagctcccctagtgtccacaatgtaatggagacagcccctcccgatgaaatgacaacctcattccccagcagcgtcaccaatactctgatgatgacctctaagactatcacgatgacgacatctacagactctaccctcggaaacactgaagaaacctctaccgccgggaccgagtcttcaactcccgtgacatctgccgtgtctattacggccggccaggaggggcagtcaagaactacttcatggcgaaccagcatccaggatactagtgcatcctcacagaatcactggacaagatccactcagaccacgcgtgaaagccagacaagcactttgactcaccggaccacatccacaccttctttttctccctccgtgcacaacgtgacaggaaccgtcagtcagaaaactagtccatcaggagagacagctacctcatccttgtgctccgtgaccaacacttctatgatgacctcagagaaaatcaccgtgaccacttctaccgggagcacgcttggaaatcccggggagacatcatccgtccccgttacaggctcactgatgcctgtgacctcggcggctcttgtaacgtttgatccagaggggcagagcccagccacattctcaaggaccagcacccaggacaccactgcgttctccaagaaccaccaaactcagagtgtggagacaacgagggtgtcacagataaataccttaaacacactgacacccgtcactactagcaccgtcttaagcagtccttctggcttcaatccatctggaacggtgagccaggagacgttccccagcggcgagactactacctctagtccatcatccgtgtccaatacttttcttgtgactagcaaagtctttcggatgcccacatcgcgggatagtaccttggggaacactgaggagacctccctctccgtctccggcacaatctcggcaattactagtaaggtgtccaccatttggtggtcggatacactctcaacagctctaagccccagttctctacctcctaagatttcaaccgctttccatactcagcagagcgagggagccgaaactaccggtcgccctcacgaacgttctagtttctcccccggcgtgtcccaggaaatctttactctacacgagaccactacatggccatcttcattcagttccaagggacatacaacctggtcgcagactgagttgccttctacgagcacgggagccgccacacggctcgtgactggtaatcctagcacaggaacagctggcacaatccccagggtgccctcaaaggtctccgccataggcgaacccggagagcccaccacctattctagtcactctactacgcttccaaaaaccacaggtgcaggggcacagacacaatggacacaggagaccgggacaaccggggaggcactcctgtcgtctccgagctactcggtaacgcagatgattaaaacggccaccagcccctcatcctcacccatgttggaccgccatacctcccaacagatcaccactgcgccaagtaccaaccactcaacaattcactcaacatctactagcccccaggaaagtcccgcagtgtcacagcgtggccatacacaggctcctcagactactcaagagagccaaacaactagatctgtctctcctatgaccgacaccaagacggtgaccacaccaggttcttccttcacggcctcaggccattctccttccgagatcgtcccccaggacgcccctactatctctgcggcgaccactttcgcccctgcccccacgggggacggccataccacgcaggcccctacgactgcgctgcaggccgccccttcttcacatgatgcgaccttgggtccatcagggggcacctcacttagcaaaaccggagccctaacgctcgccaacagtgtggtatcgactccaggcggccccgagggtcagtggaccagcgcatcagcgtctacctctccagacacggctgcagcaatgacccatacccatcaggctgagtccaccgaagctagtggacagacacagacaagcgaaccagccagtagcggatcgagaacgacctctgcaggtaccgccacacctagctcctctggagcaagcggtacaaccccaagtggcagtgagggcatttccacatctggtgaaaccactcgtttcagtagcaaccccagcagagacagccatactactcagagtacaaccgaactactatctgctagtgcaagtcacggggccatccctgtctccaccggcatggccagtagcatcgtgcccggcacttttcacccaacactgtcagaagccagcacggcgggccgccctaccggccagtcaagtccaacttcaccatcagcaagcccacaggaaaccgctgcaatctccaggatggcccaaactcagagaacaaggactagccggggatccgacaccatctccctcgcctcacaagccacagataccttcagcaccgtacccccaacacccccgtcgattacatctacggggctgacatctccacagacggagacacacactttgtctccctctggcagcggcaagacattcactacagccctcatctccaacgccacacccctccccgtgacctatgcttcgagtgcttccacaggtcacacaacccctttgcacgtcacagatgcatcgtcagtttctactggacacgctactcccttaccagtgacatcaccctcctccgtgagcacaggccacaccacgccattgcctgtgactgatacctcctcagagagtacgggacatgtgacgcctctccctgttacctccttcagcagtgcctcaacaggtgattccaccccactacctgtgacagacacgtcgtctgcatccaccggacatgtaaccccgttgccagtgaccagcctgtcctccgcgtcaacgggagatacgacaccattgccagtgaccgacacctctagcgcgagcaccggccatgccacgtccttacctgtgactgacacctcctccgtctccactgggcacaccacccccctgcccgtcacagatacgtcctcagcctccactggacatgccacctctctgcccgtgaccgatacttcttcagtgagcactggacatactacgccgctgcatgtgactgatgcttcttctgcttcaaccggtcaggccacccctctgcccgtcacttcattgtctagcgtctcaactggtgataccaccccactcccggttacttcgccttcctcagctagcaccggccacgccacaccattgcttgtgaccgatacatcctccgcctccacgggacacgctactccgctccctgtgactgatgcctcttccgttagcacggatcatgctaccagcctgcctgttaccatccctagtgccgccagtacgggccacactacccccctcccagtcacggacacatcgtcggcgtcaacaggccaggcaacaagcttacttgtaactgacaccagctcagtgtccacaggcgatacgacccccctccctgttacatcaacttcctccgccagtactggccatgtgacacccctccacgtgaccagcccctcttccgcatccactggacatgctacgcccctccccgtcacttcactgtcgtccgccagtacaggcgacaccatgccactgccagtgacttcaccatcctccgctagcactggagataccacaccgctccccgttactgatgcctcaagtgtttccaccggacataccacgcccctgcacgtcactgacgcatccagcgcttcaacaggccaggccacgcccctacctgtaacctccctgtcatcagtgtcgacgggagacacgacccccttaccggtcaccagcccttccagcgctagtaccggacatgcaaccccactcttggtgacggacacttctagtgcgagtaccggacacgccacgccgctgcccgtcaccgacgcaagttcagtaagcaccgaccacgctaccagcttgcccgtgacaattccatctgcggctagcacagggcacacgactccactccctgtcaccgacacctcctctgcctcgacaggccaggccacatccctgctggtgactgatacctctagcgtgtccaccggcgatactaccccgctgccagtgacctccacatcttctgcttcaacggggcacgtaacacctctccacgttacgtccccgtctagcgcgtccacaggacacgccactcccctcccagtcacctccctgagttctgcctctactggcgataccatgcccctgcccgtcacatctccgtcttccgcctctacaggggatacaaccccgttgccagtcaccgacgccagttcagtgtcgaccgggcatacaacacccctccccgttacaagcccttcaagcgccagtaccggacacaccacaccactgcctgtaacggatacgagctcagcctctaaaggggacactacacctctccccgtcacctctccatcctcagctagtactggtcacacgacgccactcccagttaccgacactagttctgcatccacaggcgacaccacccctctccctgttactaacgcatcatccttaagcactggacacgccaccccactccatgttacatctcccagctctgccagcaccgggcacgcgacaccacttccagtgactagcacaagttcggcatctacaggccacgctaccccacttcctgtgactggccttagtagcgccacgacagatgacacgacccgattgccagtcacagacgtaagtagcgcctccactgggcaggccacccctctgcccgttacatccctgtcctccgtttcaactggagatacaactccactgcctgtgaccagtcctagctccgctagcaccggccacgcaagccccttactggttacagacgcttcatccgcctcgactggccaggctactcccctacccgtgacagatacatcctctgtgagcacggctcacgccaccccattgcctgtgacggggctctctagtgccagcactgatgataccactagactgccagttaccgacgtctcttcagcatctaccggccaggccattcctctaccggtcacctccccctcatcagctagcaccggggacaccacaccccttccggtgactgacgcctcttctgctagcaccggagacactacctcattgccagtgaccattccatcatccgcttccagcgggcacaccaccagtttgccagttaccgacgccagctctgtcagtacagggcatgccacttcactgctcgttactgacgcctcatcagtttccacgggcgacactacccccctgccagttacagacaccaattctgccagcacaggggacaccaccccgctgcacgtgaccgatgcctcttctgtgtccacgggccacgctacctctctccccgtgacaagtctgtctagtgcgagcaccggagacaccactcctctgcccgtgacatcccctagcagcgcttcaagcggacataccaccccactgccagtcacagacgcgtcgagtgtaccaactgggcatgccacatccctacctgttactgatgcctcttcggtctccaccgggcatgccaccccactcccagtcaccgatgcaagtagcgtttccacaggtcatgccactcccttgcctgtcactgacacaagcagcgtctctaccggtcaggccacaccgctcccagttacatcactgagctccgcctccacaggcgatacaactccacttcctgtaactgacacttctagcgcctccactggccaggatacacccctgccagtgacatccctgagtagtgtctcaactggcgatactacacccctgcccgtcaccaaccccagctcggcatcgacggggcacgcaacacccctattagtgacagacgcatccagcatcagtaccggccacgcaaccagcttgctagtaactgatgcctcctccgttagtactggccatgccactgcgcttcatgacactgatgcttcgtctctgtccacgggagataccactcctctgccagttacctctcctagcagcacctcaacaggcgacactacgccattgccagtaaccgaaaccagtagcgtaagcaccggacatgctaccagcctccctgtgaccgatactagcagtgctagtaccgggcacgccactagcctccctgtgacagatacgagctccgcgagcaccggacatgctacccctctccctgttactgatacctcctccgcttcgacgggccaggccacgccactccccgtgacaagtcctagctctgcctctacaggccatgccatacccctgctggtgaccgacacatcctccgcttctacagggcaggccacaccacttcctgtcacaagtttgagctctgcatctaccggagacactacccccctgccggtaactgatgcctccagcgtgagcaccggccacgcaacgtccctacctgtgacctcactgtccagcgtttctactggtgacaccaccccacttcctgtgacaagccctagctctgcctccaccggacatgccactcccttacatgttacagatgcctcctccgcctccaccgggcatgcaactcctctgcccgtgaccagcttatccagcgcatccacaggcgataccacccccctcccggtgacatcaccctcatctgcaagcaccggacacgccacaccactgcatgtcaccgacgcctcctcagtgtctacgggcgataccacccccctgcccgtgacctctagctcctcggcaagctcaggccataccacgccactgccagtgactgatgcgtcaagcgcgagtaccggcgacaccacccccctccctgtcacagacacatcctctgccagtaccggtcatgcgacacacttgccagttaccggactgagttctgcctcgactggagacacaactcgcctcccagtgacgaacgtgtcatctgcaagcaccgggcatgcaactccccttcctgttacgagcaccagctctgcttccacaggagatactacacccttacccggaactgatacatcttcggtcagtaccggccacacaacccccctgcttgttaccgacgcaagctccgtttcaactggagatacaacccgactacccgttacgtctccctcctctgcttccacggggcacaccactcctctgcctgtcacagacactccctcagcttctacaggcgacacaacccccctgcctgtgactaacgccagctcactttcaactcggcacgcaacgtccttacacgtgactagtcctagttctgcatcaacaggccatgccacgtcactgcctgtaaccgatacttccgctgcaagtactggacatgccactcccctgcccgtcactagcacatcatcggcaagtactggagacactaccccgcttcccgtgacagacacctactcggcctctaccggccaggccacccctcttcccgtgaccagtctgagctctgttagcaccggagataccacaccactgccagttacttccccatcaagtgcctccacagggcacgcaacccccctgctggttacagacgcttccagcgcctcaacagggcaggctacccctttaccggttacatctctttccagtgttagcactggcgataccacccccttacctgttacttcaccctcgagcgcttctacagggcacgctacaagtctgcctgttaccgatacatcctccgcctctactggcgacactacatcactccccgtgacggacacaagcagcgcgtacactggggatactacaagtctcccagtgaccgatacttcttctagcagtaccggtgacactacaccattactagtaacagaaacgagttccgtgtccacaggcgacaccaccccattgccagtgacagacacgtcaagtgcctccactggtcacgctacacccttaccagtcaccaacacatcatctgtatcaactgggcacgccacacccttgcatgtcacgagcccaagcagtgcatctacaggacatacaacacctctgccagtgacggacgcttcaagcgtgtccactggccatgccactagcttaccggtgacagacgcatcgtcagtctttacaggacatgcaactagcttacctgtgactattccttccagcgctagctccggacatacgacccccctccccgtaaccgacgcaagctccgtcagcactgggcacgctacatccctgccagtgacagatgcttcaagtgtaagcaccgggcatgctacccccttgccggtgaccgacgcctcatctgtctctaccggccacgcgaccccgcttcctctaacatcactctcctctgtctccaccggagacaccacacccctgcctgtcaccgatacatcaagtgcttccacaggacaagcaactccgctccctgtgacctctctctcgtccgtaagcactggtgacactacccctctcccggtaacagacacatcctctgcttccaccgggcacgctaccagcttgcccgtgacagatacatccagcgcctctacagggcacgctactccactgcccgacacagacacaagctcagctagcaccggccatgcaacgctgttgcctgtgacagatacgtcatccgctagcattggccacgctactagtctccccgtcaccgatacctccagcataagcacaggccatgcaactccactccatgtgacgagcccttctagcgcaagcaccggacacgccacacctctgccagtgaccgacaccagctcagcctccactggccatgcaaaccctcttcacgtgaccagccccagcagtgccagtactgggcacgccacaccccttcctgtaacagatacttcctcagcctcgacggggcacgctactcctctgcccgtcacatctctctcaagcgtgagcacaggtgacacaaccccactacccgtaacttctccgtctagcgcttcaacgggacatacaactccactgcccgtgacagacactagtagtgcttccactggacaggcaacagcactgccagtgacctcaacctccagcgcgtctacaggggatacgacccctcttcctgtgaccgacacgtcatccgccagtaccggccaggcaacgcctctccctgtcaccagtctctcctccgtctccacaggagatacaaccccattgcctgtgacttctccctcctccgcctccaccggccatgcgactccattgttggtcaccgatgcatcctccgcctccacaggtcaggctacacccctcccagttacatctttatcctcggtgagcactggggatacaacacctctgccagtgacatcaccatcctccgccagcactgggcacgcaacaagtttgcctgtgacggatacatccagcgccagcactggcgataccacatcccttcctgtgaccgatacttcgagcgcctacactggcgacacgacatccctgccggtgacagacacatcatcttcttccacaggtgacacaacacccttgctggtcaccgagacctcctcagtgtcaacaggccatgccacccctcttttggtgaccgacgccagtagcgcctcgacgggtcatgccaccccactacacgtgactagccctagctctgccagtaccggggatacaactccagtaccggtgacagacaccagcagcgtgtccacagggcacgcgacccccctgcccgtgacagggctgtctagtgccagtacaggcgatacaacccgcctgccggtcactgacatctcctctgcatcaaccgggcaagctacgcccttgccagttactaatacaagctcagtgtccacgggggataccatgcctttacccgtgacttccccttccagcgcctcaactggtcatgcgactcctttacccgtgacttccacgagtagcgcttcaaccgggcatgcaacccccgttccagtgacatcaacatcgtcggccagcaccggccacactacacctctgcccgtgacagacacaagttccgcctccacaggagacacgaccccacttccagtgacaagtccctcctcagcctcaacagggcacacgaccccacttcacgtgacaattccgtcatcagcctccaccggggacacatcaaccctgccagtgaccggcgccagttccgcgtctacgggacatgcaactccactaccagtgactgacactagttccgtatctaccggacatgcaactcccctccctgtcacctcgttgtcctcagtgtcgacgggcgatactactccacttccagtaacagacgcttctagcgcatcaactggccaggccaccccattgcctgtgacaagcctgagcagcgtcagcacaggagacaccacccctctgctcgtgacagacgcctctagcgtcagtacaggacacgccacacccttacccgtgacagacaccagttccgcctcaactggcgataccacaagattgccagtgacagacacttcaagcgccagcacaggccaagcgacgccattgccggttacctccctgagcagcgttagcactggcgacacgactcctctgctcgtaacagacgcgagtagtgtgtccacgggccacgccaccccattacccgtgaccgataccagcagcgcaagcacaggcgatacaactcgactacccgtgaccgacacaagctccgcctctaccggccaggcaactccacttcctgttacaatccccagcagtagcagtagtggccatacaactcccctgcccgtgacgtctacgtccagcgtgtccaccggccatgtaacacccctgcacgtcacatctccaagcagtgcttctactggccatgttacccctctgccagtgacgtctaccagctcagcgtctacaggacatgcaacacccctcctcgtcaccgatgcttcttctgtcagtacaggtcacgctactccactgcctgttactgacgcctctagtgctagcaccggcgacactactccgctgcctgtgacagacacatccagtgccagcacaggtcaagctacccccctccctgtcacctctctgagtagcgtcagcaccggagacacaacacccctccctgttaccgacgccagctctgctagcacaggtcatgccacgcctctccccgtgacgattcctagctcagtctcaaccggagatacaatgccgctgccagtcacgagtccaagtagtgcatctactggtcatgccaccccgttaccggtgaccggcttatcctcggcctccacaggggacaccacaccacttcctgtcaccgatactagctccgcaagtacccgtcatgctacaccattacccgtgactgatacctcttcagccagtaccgatgacaccacccgattacctgtgactgacgtgtcttccgcgtcaactggccatgccacccctctgcctgttacatccacatcctcagcctctaccggggataccacacctttaccagtcaccgacaccagtagcgtcagtactggacacgctactagtctccctgtgacttcacgatctagcgcctcaacaggccatgctacacccctgccggtgacagacacaagttccgttagtacagggcatgccactcctctgcccgtgacctccacctctagcgtgtccaccggccatgccacccccttgccagtgacaagcccctcctccgccagcaccggacatgctacaccagtgccagtgacatccacaagttccgcaagcactggggacaccacaccattaccagtcactaatgccagttcactgagtacaggccatgccacacccctacatgtgacaagcccctcatctgcgtccagaggggacacctctactctccctgtgactgacgctagctccgcgtccacgggtcacgctactcccctgcctctgaccagcctgtcgagcgtatctaccggcgacactacgccattgcctgtgacagacacaagctctgcatctaccggccaggccacacccctgcctgtgaccagcctgtcttccgtgagtacaggcgataccacgcccctgccagtgacaattccctccagcgccagcagcggccataccacatcacttccagtaacggatgcctcctccgtcagcactggccatgggactcctcttcctgttacatcaactagcagtgcaagcaccggagataccacccccctgccagtgaccgatactagctcggcaagtacaggccacgccacacccctgcccgtcacagacactagttctgcttcgaccgggcacgctacccctcttccagtgacttcactgtcctctgtctccacaggccacgcgacaccactcgctgttagctcagccacatctgcatctaccgtgtccagcgattctccactgaagatggagaccccaggcatgactacaccctccctgaaaactgatggtggccgtagaacagctacatccccgcctcccactactagccaaactatcatatctacaattccctccactgctatgcacaccaggtccacagctgcacctattcccattctgccagagcgaggtgtgagcctctttccatatggggccggagcgggggatctcgagttcgttcgacgcaccgttgacttcacttcccccctgttcaagcccgcaactgggttccccctcggctctagtctacgtgactccctgtacttcaccgacaatggtcagataatttttcccgagagcgattaccagattttttcctacccaaaccccctccccacaggctttaccggcagagacccagtcgccctggtcgcgcccttctgggatgatgctgattttagtacaggccgaggcactactttctaccaggagtacgaaactttctacggggaacactccttacttgttcaacaggccgaatcttggatcaggaagatgacaaataatgggggatacaaggcacgttgggcattgaaggttacttgggtgaatgcccacgcatacccagcccagtggacattggggtccaatacctaccaagcgattctgtcaaccgacggcagccggtcttacgccttgttcttgtaccagagtggaggcatgcagtgggacgtggcccaaaggtccggaaaccccgtactgatggggttttcatccggcgacggttacttcgagaactccccattgatgagtcaacctgtgtgggaacggtacaggcctgatagatttcttaatagtaatagtggactgcaaggcctgcagttttaccggctgcaccgagaggaacgccctaattatcggctggagtgcctgcagtggctcaaatctcagccccggtggcccagttggggctggaaccaagtgtcctgcccttgttcttggcagcaggggagaagggacttgcgattccaacccgtgagtatcgggcgatggggtttaggtagcagacagctgtgcagtttcactagctggaggggcggagtgtgttgcagctacggtccatggggggagttcagagaaggatggcatgtccagcgcccctggcaactggcccaggagctcgagccccaaagctggtgttgtcgctggaacgataagccatatttatgcgctctgtaccagcagagacggccacacgtggggtgtgccacctatcgccctccccaacccgcctggatgtttggggaccctcacattacgacattagatggtgtctcctatacctttaatgggttaggcgactttcttctggtgggagctcaggacgggaattcttccttccttctgcaggggcgtactgcccagacggggagtgctcaggcgactaacttcatcgccttcgctgcacagtaccgttcctcatctctgggcccggtgaccgtgcagtggctcctggaaccccacgatgccattagggttctgctggataaccagaccgtgactttccaaccagatcacgaagacggtgggggtcaggagacatttaatgccacaggtgtccttctgagtcgaaacggcagcgaagtgtctgcttcatttgacgggtgggccactgtctctgttatagcgctgtctaacattctccacgcctccgcgagcctgcccccagaatatcagaacaggaccgaggggttactgggcgtttggaacaataaccccgaggatgactttaggatgccaaatggttcaaccattccaccgggatctccggaggaaatgttattccatttcggtatgacttggcagattaacggcacgggcctcctcggcaagaggaacgaccaattgcccagtaactttacacctgtgttttactcgcagctccagaaaaactcttcctgggccgaacatctcatttctaactgtgatggggattcaagttgcatctatgacaccctcgcactgcgcaatgctagcatcgggctgcacaccagggaagtgtctaaaaattacgaacaagcaaacgcgaccctcaaccaatacccaccatccatcaatgggggaagagttatcgaggcttataagggccagacgaccctgatccagtacactagcaacgcagaggacgcaaatttcaccctgcgtgatagctgcacagacctggagctgttcgaaaatgggacgctcctttggacacctaagagcctcgagccatttacactggaaatcttagcccgctctgctaagattggattagcttccgcactacagccccgaacagtggtgtgccattgtaacgccgagtcccagtgcttgtataatcagacgtcacgtgtggggaattccagtttagaagtagctgggtgcaagtgtgacggcgggacttttggcaggtactgcgaagggtctgaggacgcctgcgaggaaccctgtttcccaagcgtgcactgcgttcccggcaagggctgtgaggcttgtcccccaaacctgactggagacgggaggcactgcgccgcccttgggtcttcttttctctgccagaaccagagctgtccggtgaattactgttataatcagggccactgctacatatcccagacactggggtgccagccaatgtgtacgtgcccaccagcctttacagattcgcgttgttttctggctggcaataatttcagccccacagtcaacctcgaactgcctctccgtgtaatccagctcctgttatccgaggaggagaatgcttctatggctgaagttaatgctagcgttgcctatcggctcggtactctggatatgagagccttcctgaggaattctcaggtcgagcgtatcgactccgcagctccagcaagcggctctccaatccagcactggatggtgatttctgaatttcaatatagacctcgtggccctgttatagacttccttaataaccagctgcttgcggccgtcgttgaggcgtttctttatcacgtaccacgacggagtgaggagccccgcaacgacgttgtattccagcctatcagtggcgaggacgtgagagacgttaccgcgttaaatgtgtcaaccctaaaggcatatttccgatgtgacggctataagggctacgacttagtgtactctccgcagagtggcttcacctgcgtgtccccatgtagtagagggtactgtgatcatggaggacagtgccaacatctgccttcaggtccgcgctgctcttgcgtcagcttctccatctacacagcctggggcgagcattgcgagcatttgtcaatgaagctggacgcattctttggtatcttcttcggggctctcggcggcctcctcctgctcggcgtggggacctttgtagtgttgcggttctggggctgctctggagcccggtttagttattttctgaacagcgctgaagcactgccatag

SEQ ID NO: 124933 - DNA, 16083 bp, synthetic construct
  misc_feature 1..16083: note = Description of Artificial Sequence: Synthetic coding sequence
  source 1..16083: mol_type = other DNA
atgaagggtgcccggtggaggagggtaccatgggttagtctttcctgtttatgcctgtgtctgcttccacatgttgtgcccgggaccacagaagacactctgatcaccggatccaagacagccgctccagtgacaagtaccggcagcacaacggccacattagaagggcagtccacagcagccagtagcaggacctcaaaccaagacatcagcgcctcctcccagaatcaccagaccaaaagtaccgaaaccaccagtaaagctcagacagataccctgacccagatgatgacctccaccctgtttagtagcccaagtgtgcataacgtcatggagactgctccgccagacgagatgacaaccagcttcccatccagtgtcacaaacacccttatgatgactagtaagaccataaccatgacaacctctacggactctacactgggcaacactgaagagacatctacggcgggcactgagagttccacaccagtaacttcagccgtcagcattacggctgggcaggaagggcagagccgcacaacttcctggcgaaccagcattcaggacacaagtgcgtcaagccagaatcattggacccgctccacccaaacgacgcgtgagtctcaaaccagtacactgacccaccgtacaacttctacaccctctttttccccttcggtacataacgtcactgggaccgtaagtcagaaaacctcaccttccggggaaacagccacgtcgtccctctgttcagtgacgaacacatcaatgatgacctccgaaaaaattactgtgacaacctctactggctctacgctcgggaatcctggtgagacttccagtgtcccagtcacagggtccctgatgcccgtgacaagcgccgccctggttaccttcgaccccgaggggcaatccccggctaccttttctcgcaccagcactcaggatactaccgccttttctaaaaaccaccagacacaatctgtggagaccacgagagtgtctcagatcaacaccctcaacaccctgacgccagtgaccacaagtacagtgttaagtagcccgtcaggcttcaacccttccgggactgtatcccaggaaaccttcccatccggagaaactaccactagcagcccaagtagtgtgtcaaacacgtttctggtcacgtcaaaggtgtttcgtatgcccacaagccgagactcgaccctcggcaacaccgaagagacctctctgagcgtgagcgggacgatctccgctattacttctaaggtcagtactatatggtggtccgatacgctgtcaacagccctgtcaccttcgagtttaccccccaaaatcagtactgcattccatacacaacaatcggagggcgctgagaccacaggccgtccacacgagcgatcctcctttagcccaggggtttctcaggaaattttcaccttgcacgagactacgacctggcctagctcgttctcttctaagggccacactacgtggagccaaaccgagctcccctccaccagtactggggccgctactcgcttagtgaccggcaacccaagcacaggcacggccggtactataccacgagtgccctcaaaagtttcggctatcggggaaccaggagagccgaccacatacagcagccacagcacaacccttcctaagacgaccggggcaggagcacagacccagtggacccaagagacagggaccaccggggaggctctgctgtcatccccgtcgtattctgtgacccagatgattaaaacggccacgagcccatctagcagtcctatgctcgacaggcatacttcccagcaaataacaactgcccctagcactaaccactccaccatccatagcacgtctacttccccccaggaaagccctgccgtctcccaacggggacacacccaggctcctcaaacaacacaagagagccagactacgaggagcgtgtcaccaatgaccgataccaaaaccgtcactactcctggtagttcattcaccgcttccggacattccccatcagaaattgtaccccaggacgccccgaccatttccgcggccaccactttcgcccctgcaccaacaggtgacgggcatacgactcaggcccctaccacagcgttgcaagccgctccaagctcacatgacgctaccctaggccccagtggcggaacatcactgagtaaaaccggggccctgaccctcgctaatagcgtggtaagcacacccggagggccagagggtcagtggacctctgctagcgcctccacaagtccagacacagccgctgccatgacccacactcatcaggccgagtccaccgaggccagcgggcagacccagaccagtgaacccgcttcctccggttctcgaacgaccagcgcgggaacagctacccctagctcatcaggggcatcaggcactactcctagcggctccgagggaatctccacttctggtgagacaaccaggttttcttcaaatccatcccgagatagccataccacgcagagcaccaccgaactgctgagtgccagcgccagccacggggccatcccagtttctaccggaatggccagttcaattgtgcccggaaccttccatccaactctctctgaagccagtactgctggacggcccaccggacaatcctcccctaccagtccgtccgcttcacctcaggagacagccgccataagtcgcatggcccagacgcagaggacgagaaccagccgcggatcggacacgatttccctcgcaagccaggcaacagacacattctctacagtcccccccactccccccagcatcacaagtacaggactgactagtccacagaccgagacacatactctgagtccgtcaggcagcgggaagaccttcactacagccctcatttcgaatgcaaccccactccccgttacatacgctagctcggcctccacagggcacacaacacccctccacgtcaccgacgccagctcagtttcaaccggtcacgccacccccctgcccgttacttcccccagttccgtcagcacaggccataccacccctttacccgtaactgatacctccagcgagagcaccgggcacgttacacctctgcccgtcactagttttagcagcgccagcacaggtgactccacccccctgcctgtgacggacacctcctccgcctctaccggccacgtgacacctttgcctgtcacctcccttagtagtgcctccaccggagatacaaccccgctgcccgttacggataccagcagcgcatctaccggccacgcaacctctctccccgtcaccgacacctcctcagtgtccacaggccacaccacccccctccccgtgaccgatacgtcttccgctagtaccggccatgctacaagtcttccggtgaccgacacatcatccgtgtccactggccataccaccccccttcacgtgaccgacgcatcttcagcatcaaccggtcaagctacccctttgcccgtaacctccctgtcgtcagtgtcaacaggggacacaaccccactaccagtaacgagcccaagcagcgctagcacaggccacgcaaccccccttctcgtcacggacacaagctcagctagcacaggccatgcaacccccctgcctgtcacagatgcctctagcgtctcaaccgatcatgctactagcctccccgttaccattccttctgccgccagcaccgggcacactaccccactgcctgtcaccgacaccagctccgcttctaccggccaagcgacatcccttctagtgacggacacttccagcgtgtccacaggcgacactacccctctgcccgtgacaagcacatctagtgctagcactggccacgtgacacctcttcacgttacatctcctagtagtgcctccacaggacatgcaacacctttacccgttacctctctgagtagcgcttccaccggagacactatgccacttcctgttacgtcaccctcgtcggccagcaccggcgataccaccccattaccagtcaccgatgccagtagcgtgtccacgggccacacgacaccactgcacgtcacagacgcctcttccgcttctaccggacaggccaccccgttaccagtgacatcgctgtcttcagtgtcgacgggagacacaacccccctcccggtgactagtccttcctctgcgtcaactggccatgccaccccattactggtgacagatacatcaagcgcttcgaccgggcatgccactccactccctgttacagatgcctcatccgtcagcaccgaccacgccacttcccttcctgtaacgatcccttctgcggcgtcgaccggacatacaactccactgcctgtgaccgacacttctagcgcaagcaccggtcaggctacatccctcctggtgacggacacgtccagcgtttctacaggagacacaacgccacttcccgtcacttccacatcaagcgccagcaccggtcacgtcacccctctgcatgtgacctcgccaagctctgcctcgacagggcacgcaacgcccctccccgtgacatctctgtcatccgcctctaccggcgatactatgccactccccgtcacttcgcccagcagcgcctctactggagatacaacccccctgccagtgaccgacgccagctccgtgagcaccggtcacaccacacctctgcctgtaacttccccgagcagcgcctccaccgggcatacaacccccttacccgttacggacaccagttccgccagtaagggggacacgacccccctcccggtgacttcaccctcgtccgcttccaccgggcacacgacccctctgccggtgacagatacctcttcggcatcaaccggcgacaccacccctctgcctgtcacgaacgcctcaagtctgagcaccggtcacgctacccccctgcacgtcacaagcccatcgtccgcctccacaggacatgcgacaccactgcccgtgacatcaacgtcctctgcttccaccggccacgcaacacctctgcctgttacaggcctgtcatccgcaacaacggacgataccacccgcctcccagtaacggacgtatcctcagcgtcaactgggcaggccacacctctgcccgtgacgtctttgtcctcagtgagcactggtgataccactcctctcccagtcaccagtccttcttctgcatcaaccggccatgccagtcctctgttagttaccgacgccagttccgcatccaccgggcaggcgactccattgcctgtcacagacacttcttctgtgagcaccgcacacgcaacccctcttccagttacggggctgagctcagcctctaccgatgatactacaagattaccagtgaccgacgtgtctagcgccagcacgggacaggcaataccactgcccgtaaccagtccctcgtcagctagtacgggcgatactaccccactgcccgtcacggacgccagcagcgccagcaccggggacactactagtctccccgtaaccatcccgagctccgcatcatctggacacactacctcgctgccagtgacagatgctagttccgtatccactggccatgctacctcacttttagtcaccgatgcaagttcagtgagcaccggggatacaactccacttcccgttaccgacacgaacagcgcaagcaccggggacaccacgccacttcacgtgacagatgcctcgtcagtatcaacaggtcacgccacctctcttccggtgactagtctgagcagtgcatccacaggggatactaccccattgccagttactagtcccagctccgcatcttcggggcacaccactccactgccagtgacagacgcgtctagcgtcccaaccgggcacgccacttcgctccccgttactgatgcatcctcagtgtcgaccggacatgccaccccgctgcccgtcacagatgcttcatctgttagtaccggacacgcaacaccactgcccgtgactgacacaagctctgtgagcaccggccaagcgaccccactaccagtgacgtccctctccagtgcaagtactggagatacgacacccctgcctgtgacagacacctcatctgcctccaccggtcaggatacgcccctgcccgttacctccctgagttctgtctctacgggtgacaccactccccttcctgtaacaaatccatcctccgcgagtacaggccatgcaactcccctgctggtgactgatgctagctcgatcagtacaggacacgcaacgagcctgctggtcacagatgcgagctccgtaagcactgggcacgcaacagcactgcacgacactgacgcctccagcttgagcactggcgacacaacacctttgccggtgacctcgcctagtagcactagcactggcgatacaactcctttgcccgtcacagagaccagctctgtctccactgggcatgcgacatcattgcctgtcaccgacacatcttctgccagcactggacacgccaccagccttcccgtcactgatacctcatccgcctccaccggacacgctacgccactccccgtaaccgatacatcttctgccagtaccggacaggcaactcccctgcccgtcacatctccttctagtgcttccacaggtcatgctatcccgctgctggtgactgatacctcctcagcctcgaccggacaggctactcccctgcccgtcaccagtctgtccagtgcctctaccggagatacgactcctctgcctgtgacggacgcaagttcagtctctactggacacgcaacatcactgccagttacctcacttagttcagtctcgacaggggacaccacgccgttgcctgtcaccagcccatcttccgcatcgaccggccacgccacacccctccacgtcactgacgcctctagcgcgtctacaggacatgccacacctctaccagtaacttcactgtcttcagcaagcaccggcgataccacaccactgccggttacttccccctcatccgccagcactggccacgcaacaccgctccacgtaactgatgcgagctcagtgagcactggagacactacccctctgccggtgacttcaagtagctcagccagctctggccacactacgccacttcccgtaacagatgccagttccgctagtacgggggatacaactccgttaccagtgaccgataccagtagtgctagcacaggtcatgctacgcatttacccgtaacgggactgagctctgcaagcaccggcgacacaacccggcttccagtaactaacgtaagctctgcttccactggacatgccacccctctgcccgtaacttcaacgagttccgcctctactggggacaccacaccactccctggaacagataccagcagtgtaagcacaggccacaccactcccctcctcgtaaccgacgcctcgagcgtgagcacgggagatactacgagacttccagtgacgtcaccttccagcgcttcaacaggccatacaaccccactgcccgttaccgatacaccaagtgcaagcacaggggatactactcctttgcctgttacaaacgcttcctccttgtcaactaggcacgctaccagccttcatgtcacaagcccctcaagcgcaagcactgggcatgccacgtccttaccggttacggatacatccgccgcctcaacaggccatgccactccattgcctgtaaccagtacaagcagcgcctctactggcgatacaacccctctgcctgtaaccgatacatatagcgcgagtaccggtcaggcaaccccacttcctgtgacgtctctgtcaagtgtctcaacaggcgatactaccccgttacctgttacaagcccatccagtgcttcaacgggtcacgccacgccccttctcgtcacggacgcctcgagcgcttccaccgggcaagcaacaccactgcccgtgacttccctcagtagcgtgtctaccggcgataccactccactgccagtaacttccccttcatcagccagcacaggccatgcaactagtctacctgtgactgatacctcaagcgcctccactggcgatacaacctctctaccggtcacagatacatccagcgcctacaccggcgatacaactagtctccctgtcacagacacttcaagctcatctaccggagatacaacacccctgctcgtgactgagacttccagcgtgagtactggcgatactacacctctaccggtgaccgatacaagctcagcctccaccggccatgctaccccattacccgtaactaataccagtagtgtgtccactggccacgccacaccactgcacgtaacgagtccttcctccgcctccacgggacacacaacacctctccccgtgacagacgcatcttcagtgtccacgggccatgcaacttcactgccggtaaccgatgcttcttctgtctttaccgggcatgccacaagtttgcccgtgaccattccaagtagtgcatcatcggggcacaccacaccactgcctgtgaccgatgcctcaagcgtgtctactggacacgcaacttcattgcctgtgaccgatgcatcaagcgtgagcactgggcatgccacccccctacctgtgacagatgcaagctctgttagcaccggccacgccacccccttgcctttgaccagcttatcctctgtgagtactggggacacgactcctttgcccgtgacagatacgagttcagcgtccactgggcaggccacgccactgccggtcacctccctgtccagcgtaagtacgggagatacaacacctctcccagtcactgacacatctagtgcatctactggccatgccacatcgctccctgtgactgacacatcttctgctagcactggccatgccacaccattgccggacaccgacacctccagcgcttctaccggccacgcgacattgttacctgtaactgataccagcagcgcatccatcgggcatgccacatctctgcctgtgaccgacacgagctccatcagtacagggcatgctacgcctttacatgtgacatcacctagttctgcatcaactggtcacgccaccccactacccgtcactgacacctcatcagcgtcaaccggccatgccaaccccctgcacgttaccagcccttccagcgcttcaaccggccacgcaacgcccctgccagtgactgacacctctagtgcgtcaaccggtcacgccaccccattacctgtcacgtcactaagctcagtttcaactggagatacaactccgctgccagttacatcacccagctctgcaagcaccggtcacactaccccccttcccgttaccgatacttctagcgctagtacaggtcaggccacggcacttcccgtcacatccacaagcagtgcctctacgggtgatacaacacccctaccagtgacagatacgtcgtccgccagcacgggacaggctacgcctctgcccgtgacttctttaagcagcgtgtccacaggagacaccactcccctccccgtgacctctccatcatccgcctcaacagggcacgcgaccccgttgctggtgaccgatgcaagttccgctagtaccggtcaggctacccctctgccagtcacatccctgtcttcagtcagcacaggcgacacaaccccattgcccgttaccagtccatcttccgcctcaactgggcacgccacaagtctgcccgtcaccgacacctcctcggcgtctaccggagatacaacaagtctgcctgttacagatacgtcgtctgcttacaccggtgataccacgagcctgccagtcacagacacctccagctccagcacaggagacaccactcctctgctggtcaccgaaacctctagcgtgtcaacaggccacgcgacacccctccttgtgacagatgccagctccgcgtcaaccggccacgcaacccccctgcacgttacgtctccatcttccgcttcaaccggagacaccacaccagtaccagtgaccgatacttcgagtgtgtcaacaggtcatgctacaccgctgccagtgacagggctatcatcagcttctaccggcgacacaacaagactcccagtaaccgacatctcaagcgccagcacgggccaggccactcccctgcctgttaccaatactagctcagtatccaccggtgacactatgcccctccctgtcacttcgccttcatctgcgagtactggccatgccacccctctccccgtgacctccacatcatctgcatccaccggtcacgcaaccccggtccctgtgacttctactagttcagcaagcacaggccatacaactcccctgcctgtcactgacacgtccagtgcgtcgaccggtgatactacacccctgcccgttacgtctccaagtagcgcatctacaggacacaccacaccccttcacgttacaatccccagcagtgcctccaccggggacacaagcaccctgccagtcacgggcgctagcagtgccagcaccggccacgccacaccactgcctgtaacagacactagtagcgtcagcaccggacatgccacaccattgccggtcacttcactgagcagcgttagcaccggggacaccaccccacttcccgtgaccgatgctagcagtgcctctacgggccaggcaacaccccttccagtcacaagcctctcatccgtttcaacaggcgacacgacaccactgctggtcaccgatgccagtagcgtgtctaccggccatgccacgcccctgcctgtaacggataccagcagtgcgtctactggagacactacccgccttcccgtgacggacactagcagcgcatcgacaggccaagcaactcccctcccggtgacctctctatcctctgtgtcaactggcgacacaactcctctgcttgtgacagatgcgagctcagtgagcaccggccatgccacaccactccctgtcactgatacgagcagcgcctccaccggcgataccacccgactgcccgtgactgacacatcgtctgccagcacgggacaagctacccctttacctgtgaccattcctagcagctctagttcaggccacactacaccactccccgtgacaagtaccagctccgttagcactggacacgtcacaccgctgcatgtgacctctccgagctctgcgtcaacgggccacgtcacccccttacccgttactagcactagctccgcctcaactggacacgccactcctctgcttgttacagacgcttctagcgttagtaccggacacgccactcctctcccggtgaccgacgcttcatcagcctcaacaggagataccaccccgcttcctgtcaccgacacttcctcagcctccacaggacaagccacgccccttccggtgacttctctgagttccgtgagtaccggcgacacaactccgcttcccgtcactgatgcttcctcggcatcaacaggacacgccacccccctgcctgtgacgattccaagctcagtgtctacaggggacaccatgcctctacccgtgacctctccctctagcgcaagcactggtcacgcgactccattgcccgtcaccggtctgtccagcgcaagcaccggcgacaccaccccacttccagtgactgataccagtagcgccagcacccgccacgccacacctctgccagtcaccgatactagttctgcatctaccgacgacacaacccggcttccagtgaccgacgtgagtagcgcgagcactggccatgccactcccctacccgtcacaagcaccagctctgcatccaccggcgacactacccccttgcctgttaccgatacatcttccgtgtcaacgggacacgcgacctccctgcctgtcacctctcgttcctctgcctctactggtcatgccacccctctgcccgtgacagatacgtcgagcgtcagcaccggacacgcaactcccctaccagtcacttctacgtcaagcgttagtacagggcacgcgaccccactcccagtcacatcaccgtcatccgccagtacaggtcacgccacccctgtgccagtgacctcaactagtagcgcctcaaccggagataccacccctctgcccgtaaccaatgcatcttcgctctctacaggccacgcgacacctttacacgtgacttctcctagtagcgcttcccgaggtgacacaagcacgttacccgtgactgacgcaagctccgcatcaacaggacacgcgacccctctcccacttacaagcctttcttcagtgagcactggagataccacgccgcttccggtaacagatactagttccgccagcaccgggcaggccacacccctgccagttacgagcctctcatcggtgagtacgggcgatactacacctctgcccgtgacaatccctagcagcgcgagctcaggccatacaacctctttgcccgtgactgacgcgtccagtgttagcactggacatggcactcctctgccagtgacgtctacctcttctgcctctacaggcgacacgactccgctgcccgtgaccgatacctccagcgcctccaccggccacgccacaccactacctgtcacagacactagctccgccagtacgggtcatgccactcctctgcccgtgacatcgctgtccagcgtgagcacaggacacgctacacccctagcagtgagcagcgctacttctgccagcaccgtgtctagtgatagcccactgaagatggagacccctggaatgacaacgccctcgctgaaaacagatggtggccgcaggactgcgacctccccgccgcctaccacgtcccagaccattattagcaccataccctctacagcaatgcacaccagaagcacagctgccccgattcctatccttccagagagaggagtgagcctgttcccttacggagctggagcaggagacctggagttcgttagacggacagttgactttacatcacccctgttcaagcccgcaaccggattcccactaggaagctccttaagggactcactctattttacagacaacggacaaatcatattccctgaatccgactatcagattttttcgtaccctaatcccctgcccacaggatttactgggagagatccagtcgccctggtggcccctttttgggacgatgccgacttctccacaggccgtgggacaaccttttaccagagtaatacttaccaggccattcttagcacagatgggagtcgcagctatgccttgttcctctaccagagcggtggaatgcagtgggatgtcgctcaacgcagtggaaatcccgtgctaatggggttcagcagtggagacggttactttgaaaacagtccgcttatgtctcagcctgtctgggagagatacaggcctgaccggtttctcaattcaaattcggggcttcagggactgcagttttaccggctccaccgtgaggagcggcctaactacaggctcgagtgtttgcagtggttgaagtcgcagccgcggtggccttcctggggatggaatcaagtctcgtgcccttgctcttggcagcagggccgcagggacctgaggtttcagccagttagtatcgggcgatgggggctgggcagtcggcagctttgtagctttacaagctggagggggggggtgtgctgctcctacggaccttggggggaattcagagaggggtggcacgtgcagcgtccctggcaactggcccaagaactggaaccccagtcatggtgctgtaggtggaatgacaagccctacctgtgcgctctgtatcagcagcggcgccctcacgtgggctgcgctacttatcgccctccacagcccgcctggatgtttggagaccctcacatcaccactttggatggcgtgagttatacttttaacgggctcggggactttctcttggtgggagctcaggatggcaactcttcctttttgctgcaaggaagaaccgctcagaccgggtcggcccaggcaactaacttcattgcctttgcggctcagtacaggagttccagcctgggcccggtcactgtgcagtggctgcttgagccccacgacgcaataagggttctcctggacaatcaaaccgtgaccttccagcctgatcacgaagacggagggggacaggaaactttcaacgcgactggggtgctgctcagtcgtaatggctctgaagtgagcgcatcttttgacggctgggctacagtgtccgttattgctctttcaaatattctgcatgcttccgccagcctgcctcctgaatatcagaaccgcaccgaaggccttctgggggtctggaacaacaaccctgaggacgactttcgcatgcctaatggctctacaattcctccaggctctcctgaggagatgttatttcactttgggatgacttggcagattaacgggaccggactcctgggtaaacggaacgaccaattgccgtctaacttcacacctgtgttctatagccaactccagaaaaattcctcgtgggcagagcacctgattagcaattgcgatggtgattcaagctgtatctacgacaccctggcattacgcaatgccagtattggtttgcacactcgtgaggtgagtaagaactacgagcaagccaatgcgacgttaaatcagtatcctccaagcattaacggcggcagggtgattgaagcttataagggacagacaacccttatccagtatacaagcaacgccgaggatgctaactttacgctgagagacagttgcacagacctggaactgtttgaaaacggcacattgctttggacgccaaagtctctggaaccgtttacccttgagatcctcgcccgtagtgccaagataggacttgcgagtgcactgcaaccgcgaacagtggtgtgccactgtaatgccgagagtcagtgcctgtataaccagacctcacgggtggggaacagcagcctcgaggttgcgggatgtaagtgcgacggcgggacatttggacgatattgtgaaggctcggaggacgcatgcgaggagccttgtttccctagcgtacattgcgtgccaggaaaaggatgtgaggcctgtcctcccaatctcacaggagatggtaggcattgcgccgcactgggttcaagcttcctctgtcagaaccagagctgccccgtcaattactgctacaatcagggccactgctacatctctcagaccctgggatgtcaacccatgtgcacatgtcctccggctttcactgactccagatgcttcctggcggggaataacttttcaccaactgtgaatctagagttgcccctgagagtgattcagctgttgctgtctgaggaagaaaacgccagcatggcagaagtgaacgctagtgtggcatacagattgggtacgctggacatgagagcctttctacgcaacagtcaggtggagcggatcgactccgccgctcctgcgtcgggatcaccaatccagcactggatggtcatctctgaatttcaatacagaccgcgggggcctgtgattgactttttaaataatcaactccttgccgccgtggtcgaggcctttttgtatcatgtgcccagacggtcagaagaacctcgcaacgatgttgttttccaaccaatatccggagaggatgtccgcgacgtgactgctctcaatgtgtctacacttaaggcatatttccgctgtgacggatacaaaggatatgacctggtgtacagccctcagagtgggtttacatgtgtgtccccctgttctaggggatattgcgatcacggtggtcagtgtcaacatttgccatcagggcctcgatgctcgtgtgtttcattcagcatctacacagcatggggtgagcattgtgagcacttgagcatgaaactagacgcgttcttcgggatttttttcggagccctaggcgggttacttctcctcggcgtggggacattcgttgtacttcgcttttggggatgtagtggcgctaggttctcttattttttgaactcagcagaagcgctgccctag

SEQ ID NO: 124934 - DNA, 1863 bp, synthetic construct
  misc_feature 1..1863: note = Description of Artificial Sequence: Synthetic coding sequence
  source 1..1863: mol_type = other DNA
atgagcgttggcagaaggaaactcgccctgctctgggccctcgctctggccctagcatgtacaaggcacacaggccatgcacaggacggaagcagtgaaagtagctacaaacaccaccccgccctatccccgattgcccgaggcccatctggcgtccctcttcgaggggccacagtttttccatctctccgcaccatccctgtcgtaagggcgtctaacccagcccacaatgggagggtctgtagtacctgggggagcttccactacaaaactttcgacggggatgtctttaggttcccgggcctttgtaactatgtgttcagtgaacattgcggggcagcctatgaggactttaatccagccaccccacaacccggagtcagtggccctcatgccgagcagggcccacacgaggggggttggagaggccatcccgcagatcaggggctccgacctggtcagcgcccacccggaccagcagcccttcagccggtgtgggggccgcacagcagagcggctgccacacctagatggaggccggggtgggccctgagctcttgcggtactactatgacggcttgctgttggctggacaccaaatatgccaacaagttgtgggcattgtggggtctccagagggacgcaagaggacagcgggcaccattgccgcaacaccaggcagatacgcatggtattagggaacccgctagatggacaactcctaggtcttctgtgcgaaccctcagcctaaatccccggggaactgcacctctggcgttgggtatatgcgaagagttactgcatggtcagctattcagcgggtgcgtggctttagtagatgtgggttcctatttggaagcctgcaggcaagacctatgcttctgtgaggacacagacctcctctcatgcgtgtgccacacccttgctgagtacagcagacagtgtacccacgcaggagggctcccacaggactggagaggtccggacttttgtccccagaaatgccctaataatatgcagtaccatgagtgtagatcaccctgtgctgacacatgttcgaatcaggagcacagtagggcctgcgaagaccactgcgtcgccggctgcttctgccccgaaggaaccgtcctggacgacattggccagacaggctgtgttcccgtgagtaagtgcgcctgcgtgtataacggagcagcctatgcgcctggggctacttactcaacagactgcacaaactgcacctgttctggcgggaggtggtcatgccaggaagtgccgtgtccgggcacttgtagcgtattgggaggtgcccacttcagtacctttgatggcaagcagtacaccgttcatggcgactgttcttatgtgcttacaaagccctgcgactcctcagccttcaccgtgctggcagagctgcgtcggtgcggcctcactgacagcgagacttgcctgaagtctgtgactctctccctggatggagtccagacagtagtggtgattaaggctagtggcgaggtgtttcttaaccagatttatacacagttaccaatctcggccgccaacgtcacaattttcaggccgagcaccttctttatcatcgcgcaaaccagtctcggtctccaattaaatctgcagcttgtgcctactatgcagctctttatgcagctggccccaaagctgcgcggccaaacctgtggcctttgcgggaacttcaactcgatccaggctgacgattttcggactctgtcaggagtcgttgaggccactgccgctgcttttttcaacaccttcaagactcaggcagcctgccccaacatccggaactcctttgaagatccgtgcagcctttcagtggaaaattag

SEQ ID NO: 124935 - DNA, 1872 bp, synthetic construct
  misc_feature 1..1872: note = Description of Artificial Sequence: Synthetic coding sequence
  source 1..1872: mol_type = other DNA
atgagcgtcggccggcggaagctggccctgctttgggcactcgccctcgcactagcttgtacaaggcacacaggacacgcacaggacggcagtagcgaaagctcatataagcaccatcccgccttgagtcccatcgctcggggtccctccggcgttcccctgcgaggagccaccgtgtttcctagcttgcgcactatcccagtggtcagagcctcaaaccccgcacataacggccgcgtgtgcagtacctggggttctttccactacaagacctttgacggcgatgtctttagattccctggactgtgcaactatgtctttagtgagcactgcggggcagcctatgaggactttaacattcaattacgaaggtcacaggagagcgcggctcccaccctgtcacgggttctgatgaaggtagacggcgtagtcattcagttgaccaagggttccgtacttgtgaacggacatcctgtactactgccatttagccaatctggagttctcatccagcagtcctcgagctacacaaaagtggaggcccggctgggactggtgctcatgtggaaccacgacgactcactcttgcttgagctagacaccaaatatgccaacaaaacctgtggcctgtgcggtgacttcaatggtatgcctgtcgtatctgaactgctttcacacaacactaagcttacgccgatggagttcggcaatctccagaaaatggacgaccccacagagcagtgccaagatcctgtgcctgaaccaccacgtaattgttcgacagggtttgggatttgcgaagagcttctgcatgggcagctgtttagcggctgcgttgcactcgttgacgtgggttcttacctcgaggcatgcaggcaagacctttgcttttgtgaggacaccgacctgttgagctgcgtgtgtcacactctcgcagaatacagtaggcagtgtacacatgcaggtggactgccccaggattggcgaggccccgatttctgtccacaaaaatgtcccaacaacatgcagtatcatgagtgtcgttctccttgtgccgatacatgtagcaaccaggagcattctagagcctgcgaagatcattgtgtggccggctgcttttgtcctgaaggcaccgtgcttgacgatattggccagactggttgtgtgcccgtgtcaaagtgtgcatgtgtctacaacggggccgcctatgcacctggagccacctactccactgactgcaccaactgtacgtgctcaggcggtagatggtcctgccaggaagttccctgcccggggacatgctccgtgttagggggcgcccatttctcaacctttgacggcaagcaatatactgtgcacggggactgctcatacgtcctgactaagccctgcgacagttccgccttcacagtgttagctgagttgagacgttgcgggttaactgattcagaaacgtgtctcaagtccgtgacactgtcactggacggcgtgcagacagtggttgtcatcaaggcgtcaggtgaggtgttcctgaaccagatctacacccagctccctatctccgctgctaacgtgaccatattcagacccagcacgttcttcataattgctcagacatcacttggcttacagctgaatctacagctggtccctaccatgcagctgttcatgcagctcgctccaaagctcagaggccaaacatgtggcctttgcgggaacttcaattctatccaggccgatgatttccgtacacttagcggtgtcgtagaagctaccgcggctgccttttttaatacgttcaagacccaggctgcgtgcccgaacatcagaaattcgtttgaggatccctgttccctgtcagtcgaaaattag

SEQ ID NO: 124936 - DNA, 17121 bp, synthetic construct
  misc_feature 1..17121: note = Description of Artificial Sequence: Synthetic coding sequence
  source 1..17121: mol_type = other DNA
atgggtgccccttcagcctgcagaactttagtcctcgccttggcagccatgctcgttgtccctcaagcggaaacgcagggccctgttgaaccctcctgggaaaatgctggccacaccatggacgggggtgcgccgacaagttccccaacaaggcgggtgagcttcgtcccgcccgtgacagtgttcccttccctttctcctctgaaccccgcccacaatggacgtgtttgtagcacatggggtgactttcactacaagacctttgatggtgatgtgtttagattccccgggctttgtaattatgtgttttccgagcactgtcgtgcggcttatgaggacttcaatgtacaactccgccgagggcttgtcggaagtaggcccgtggtcacacgggtggtgatcaaggcccagggtctggtgctggaggcatcgaacggatcggtgttgatcaatgggcagcgggaagagctgccctacagccggacaggactcttggtcgaacagtctggagattacatcaaggtgagtatacggttggtgctcactttcctatggaatggtgaagacagcgcccttctcgaactggacccaaaatacgccaatcagacatgtgggctatgcggggactttaatggcctgcccgcattcaacgagttttacgcccataacgcacgtctaacacccttacagttcggcaacctgcagaagttggacgggcctaccgaacagtgccccgaccctctgccgttgcctgcaggaaattgcaccgatgaggaaggcatttgccataggacactgcttggtccagcgttcgctgagtgtcacgcacttgtcgattctacagcataccttgctgcttgcgcccaagacctttgtagatgtcccacttgcccctgtgcgacctttgtggaatatagtcgccaatgtgcacacgccggcggacagcctcggaattggagatgcccagaactctgcccccgcacctgtcctctgaatatgcaacaccaagaatgtggatccccttgtaccgatacgtgctctaacccccagcgcgcccagctgtgcgaggatcattgtgttgacggctgcttttgtccgcctgggtcaaccgttttggacgacatcacccatagcgggtgtctacccctcggtcagtgcccctgtacacacggtggcagaacatattctccgggaacctcctttaacaccacatgttcttcgtgcacttgcagtggtggactgtggcagtgtcaggacctgccatgtcctgggacttgtagcgtgcagggcggagcacacatctctacctatgacgagaagctctatgacctccacggggactgctcctatgtgctatctaaaaagtgcgcagattcttccttcaccgtcctagctgagctccgcaagtgtggcctgacagacaacgagaattgcctcaaagccgtgactctgtcgctggacggcggcgatactgccattcgggtccaagctgatgggggcgtatttctgaatagtatttatacacagctgcctctgtcagccgccaacatcaccctcttcaccccttcaagctttttcattgttgttcagacaggactgggtttacagttgctcgtccagctcgttcctctgatgcaagttttcgtacgcttggacccggcccaccagggccaaatgtgcggcctgtgcggcaatttcaatcagaaccaagccgatgacttcaccgccctcagtggagtggtcgaggccacaggggccgcctttgctaatacttggaaagctcaagcagcatgcgccaatgcaaggaacagcttcgaggacccttgcagccttagtgtcgagaacgagaactacgctcggcattggtgttctcggcttacagacccaaacagcgctttctcccggtgtcattcgattataaacccgaagccttttcattctaactgcatgtttgatacatgcaattgtgagcggtccgaagactgtctgtgcgccgccctatcgagttacgtccatgcctgcgccgcaaaaggcgttcaactgagtgattggcgggatggcgtctgtaccaagtacatgcagaactgccccaagtcacagaggtacgcctatgttgtggatgcctgccagccgacttgtagaggcttgtccgaggccgatgtgacctgtagcgtatccttcgtccccgtggacggttgcacttgccccgccggcactttcctcaacgacgctggcgcctgcgtgccagcgcaggaatgcccttgttatgcgcacggcaccgtgcttgcgcccggcgaagttgttcatgatgaaggagctgtttgctcctgcacgggcggcaaactgagctgccttggcgcgtctctccagaagtccacaggatgtgccgcgcccatggtatatctggactgtagtaattcgtcagccggtacccctggggctgaatgcctgagaagttgtcataccctagacgtgggttgtttcagtactcactgcgtgtctgggtgcgtctgtcccccagggcttgtcagcgacggcagcggaggatgcattgccgaagaggattgtccctgtgtccacaacgaggctacttacaaaccaggagagactataagagttgactgcaatacgtgtacatgccggaataggcgatgggagtgcagtcataggctttgcctgggaacgtgcgtggcatacggagatgggcattttattacttttgacggggatcgttacagcttcgaaggcagctgcgaatacatcctggcgcaggattactgcggcgacaataccactcacggcacttttcgcatcgtgaccgaaaatatcccttgcggaacaaccgggaccacatgcagcaaagcgatcaaacttttcgtggagtcttatgagttaattctgcaggaggggacatttaaagcagttgcccgtggccccggcggggacccaccctacaaaatcaggtacatgggtatttttctggttatcgagacccatggcatggccgtgtcttgggaccggaaaacctccgtgttcattcgactgcaccaggactataaaggcagggtgtgcgggttgtgcgggaattttgacgataatgcgatcaacgatttcgctaccagatctcgtagtgttgtgggcgatgctttggaattcggtaacagctggaaactgagcccaagctgtcctgatgcactagctccaaaggacccctgtacagccaatccttttcgaaagagctgggcccaaaaacagtgctccattctgcatggcccaacatttgcagcatgcagatcccaggtcgactctaccaaatattatgaagcttgcgttaatgacgcttgcgcgtgtgattcaggtggtgattgtgaatgtttttgtaccgccgtggctgcctacgcacaggcttgccatgatgctgggctctgcgtgtcatggaggactcctgatacttgtcctctgttctgcgacttttacaacccccacggagggtgtgaatggcattaccaaccatgtggtgctccctgcctaaagacttgtcggaatccctctggtcactgtcttgtggacctgcctgggctggaaggttgttacccaaagtgtccgccatcacagccattctttaacgaggaccagatgaagtgcgtcgcccagtgtggttgttatgacaaagatggcaattactacgacgtgggcgctcgcgtgcctacggccgagaactgccagagttgtaactgcacaccttctggtatacagtgcgcacacagcctcgaagcttgcacctgcacgtatgaagacaggacctatagctaccaggatgtgatttacaatactactgatggactgggtgcctgtctgatcgccatttgcggctcaaatggtacaattattcgtaaggccgttgcctgccctggtacccctgcaacgaccccattcacattcacaaccgcgtgggtgccacactctacaacatcaccagctctccccgtgagcaccgtgtgcgtgcgcgaggtatgtcggtggagcagctggtacaatgggcaccgtcccgaaccagggctcggaggaggggactttgagacttttgaaaacctccgccaaagggggtatcaggtgtgtccagtgcttgccgacattgagtgtcgggccgcccagttgccagatatgcccctggaagaactgggacaacaggttgattgtgaccgaatgcggggcctgatgtgcgccaatagccagcagagcccaccactctgccacgactacgagcttagagtcctgtgctgtgagtatgtcccgtgtgggccttcccccgctccagggactagtcctcaacctagtctgagcgctagtacagaacctgccgttcccacgcctacacagacaacggcaaccgagaagacaacgctgtgggtcaccccaagtatacgctcaaccgcagcccttacttcacaaaccggttcctcatccggacccgtcaccgttaccccctcagcacccggaacaactacctgccagcctcggtgccaatggactgaatggttcgacgaagactaccctaaatccgaacagctgggaggagacgtggagagctacgataagatccgcgctgccggcggtcacttatgtcaacaacctaaggatatcgaatgtcaggccgaaagcttcccaaactggactcttgcccaagtcggacagaaagtgcactgcgacgtacacttcggcctggtgtgccggaattgggagcaggaaggggttttcaagatgtgttacaattatcgcatacgagttctgtgctgctccgatgaccactgccggggacgggccaccactccacctcccaccacagagctggagaccgctactaccaccaccacccaggctctgttcagtaccccccagcctacatcaagtcccgggctgactcgtgcgcccccagcttcaaccacagcggtgcctacactgagcgagggactgaccagtcctagatatacgtcaacattgggaacagccacaaccggaggcccaaccacaccagcaggatcgacagagcccaccgtccccggcgtcgcaacaagtaccctaccaactcggtcagccctccccggcacaaccggctctttgggtacttggagaccttcgcagccacccaccttggctcccaccacgatggccacctctcgtgctagacccacaggcactgccagcaccgccagcaaggaacccctgactacttctctggcaccaactctgacgagcgagctcagtacgagccaagctgagacctctactccgcgaacagaaacaaccatgtctccactgacgaatactacaacctcccagggcactaccagatgccagccaaaatgtgagtggacggagtggttcgacgttgacttcccaacatcaggtgtcgctggcggcgacatggagaccttcgaaaatattagggctgctggaggaaagatgtgctgggctcctaagtctatagaatgccgcgccgagaattaccctgaggtgtcaatcgaccaagtgggacaggttctcacgtgctctctggaaacaggcctcacttgcaagaacgaggaccagactggacgattcaacatgtgtttcaactacaacgttcgtgtgctgtgctgtgacgattactcacattgtccctctacacctgcaacatcaagcaccgcaaccccctctagtacccccggaactacatggatcttaacaaaacccacaactactgcgaccactactgcatccactggctctacggcaaccccaacatctactctaaggaccgctccaccccccaaggtacttacaaccaccgcgactactccgaccgttacatcctctaaggccacccccagtagcagccctggcacggcaaccgccctgcccgccctccgctccaccgctacaacaccaacagctacaagcgtgacccctatcccatccagtagtctgggaacaacctggactagactctctcagaccacaacgccaactgctacaatgagcactgccaccccgagttctacgcctgagacagcccacacatccacagtcttgaccgccaccgctacaaccacgggagcgaccggttccgtagcgaccccttcttcaacgcccggaacagcccacacaacaaaagtgcccaccactaccaccacgggcttcaccgccactccttcttcatcaccgggcacagcactgacccctcccgtatggataagcacaactaccacaccgactactaggggttctacagtcacccccagttcaatccccggtaccacccataccgccactgtgcttacaaccacgacgactaccgtcgccacaggcagtatggccactccctcttccagtacgcagacctctggaactcccccttcccttacaaccacagccactacgataactgctacaggatctacaaccaatccttcttcaacccctgggacaaccccaattcctcccgtgctgaccacaaccgcgaccacccccgccgcaacttccaatacggtgactccaagctctgccttaggtaccactcatactcctcctgtaccgaatacaatggctaccacccacgggcggtctttgccgcctagtagccctcacacagtgcggaccgcatggacatctgccacaagtggcatcctgggcactacgcatataaccgaaccatctacagtcacatctcataccctggcggccaccacaggcacaacccaacatagtaccccagcactgtcctctccacaccctagttctcggaccacggagagccctcccagccctggtactaccactccaggccacaccaccgctacgtcacgtactacggccacggctaccccatctaaaacacgcacctcaactctgctgccgtcctcccccacatcagctccgatcaccacagtggtgacaatgggttgcgaaccccaatgcgcctggtcagagtggctcgactacagctatcccatgccagggccgtctgggggcgacttcgacacatacagtaatattcgcgcagccgggggtgctgtgtgtgaacagccactcggtcttgagtgtagggcacaggcccaacccggggtgccacttagagagctgggccaggtagtagagtgttctctggactttggcctggtctgcagaaatcgggaacaggtgggaaaatttaaaatgtgcttcaattatgagataagagtcttctgttgcaactacgggcactgccctagtactccagccacttcctctacggcgatgcccagctctacacctggcaccacctggatcctgaccgagttaacaacaactgcaaccactacagagtctacgggctccaccgccacaccttcttccacaccagccaccgccggtacccctcacgttagcactactgctactacacctactgtgacctcaagtaaggccaccccatttagctcgcccggcaccgcaacagcccttccagctctgaggtcaactgcaacaacaccgactgctacctctttcactgccattccgtctagctccctgggaactacatggacaagactttctcagacaaccactccaaccgctaccatgtctactgcaactccaagttcgactcccgagaccgtgcatacatctacagtgttgaccacgacagccaccaccactggcgccactgggtccgtggccacaccctccagtacacccggaacagcccacactaccaaagttttgacgacaacaaccactggctttaccgccacgccttctagcagcccaggaaccgcccgcactttacccgtctggataagcacaaccacaacacccactacaaggggcagcacggtgactccatccagcatacctggcactacccatactcctaccgtattgaccaccacaaccaccacagtggccacaggctcgatggccaccccctccagctccacccagacgagcggcactccaccatcccttaccactactgctactacaatcaccgcaacagggtcaactacaaacccttccagcacccctggaaccacccccattcccccagtgcttactacgacggccaccacacccgccgccacgagctctaccgtcacaccgagctcagcactggggactacccatactccccccgtacccaatactactgccacaacgcacggccgatccctgtctccttcttccccacataccgtgcggacagcttggacctcagccaccagcggaacacttgggaccactcatatcaccgaacccagtactggcacctcccatacaccagctgcaacaactggaaccactcaacatagcaccccagctctgagcagtccccatccttcaagccggaccacagagagtccacctagccccggcactacaactcccggacacactcgagccacctccagaaccacagccacggcgacacctagcaagactcggacaagcactctcctgccttcttcaccaacaagtgcaccaataacaacagtggtcacgatgggatgcgagccccagtgcgcttggagcgagtggttggactacagctaccccatgcctggtccctctgggggggatttcgatacttactctaatatccgagccgcaggcggggccgtgtgcgagcagcccctgggactcgaatgcagggcacaggcccagcctggggtgccacttagggagctcggacaggttgtggagtgcagcctggatttcggcctcgtatgtaggaaccgagaacaggttggtaagttcaagatgtgttttaactatgaaattcgtgtattctgctgcaactatgggcactgtcctagcacccctgctacttcttcgaccgcaactccctccagcacacccggaacaacctggatcctgacagaacagacgaccgccgcgaccacgaccgcgaccactggttccactgccattcccagttccacaccaggaacggcgcccccacccaaggtcctgacttccacggctaccacaccaaccgcaacgagcagcaaggcgacgtctagttcctctccacggaccgcaactaccctgccagtactaacttcgacggctaccaaatctaccgccacaagttttacacccattccaagctttacactaggaacgactgggaccttgccggaacagactaccactcccatggccaccatgtcaacaatccacccttcctctacaccagaaaccacccacacttccactgtcctcacaaccaaggccacgacgacccgggctacctcatcgatgagtacgccaagtagtacacccggcacgacctggatcttaaccgagctgaccaccgcggcaactaccaccgccgctactggacccacagctaccccatctagcactcctggcactacatggatcctgacagagcctagtactaccgcaacggtgaccgttcctaccggcagcaccgcaactgcctcctccaccagggcgaccgccggcacgctcaaagtgttgacctccacggccaccacccccaccgttatcagtagtcgggccactccctcatcatcaccaggtaccgcaactgcattgcccgccctgcgctcgacagccacgacacccaccgccacctcagtgaccgctatcccgtcctcttccctgggcaccgcttggacacggctatctcagacgaccacccctaccgccaccatgagtaccgcaacaccttcctccactccggaaacagttcacacctctactgtgctgacaacgacaacaaccaccactcgagccaccggcagcgtggctactcctagctccaccccaggaacggcacacaccactaaggtccctactaccaccacgacaggcttcaccgcgacaccgtcgtcctccccgggcactgccctcacaccccccgtatggatttctaccaccaccacaccgactaccaggggaagcaccgttaccccatcttctattcccgggaccactcacactgctacagttttgaccactacgactacaactgtggccaccgggtcaatggccaccccaagttcttctactcagacaagtggcacgcctcctagtttgaccacaaccgccacaacaatcactgcaacaggctcaaccaccaacccatcctcgactcctggaactaccccaatcccaccggtgttgaccactacagccactacccctgcagctacatcctcaactgtcaccccctcttctgctctgggcaccacccatacacctcctgtgcctaacaccactgcgaccacacacggccgtagcctgcctcccagcagcccccataccgttagaaccgcgtggacatcagcgacttccgggatacttggaactacacacatcacggagccctcaactgtaacgagtcacactccagccgcgaccacaagcactacacaacacagcaccccggccctgagttcgccacatcccagctctcgcaccactgagagtccaccctcgccaggcactacaacgccagggcacaccagaggcaccagtcgcaccactgccactgctactcccagcaagacccgaaccagcacgctcctgccctcttctccaacgtcagcacccattaccacagtagtcaccactggatgtgagccacagtgtgcctggtccgagtggctggactacagctatcctatgcccgggcccagcggcggcgactttgacacctattccaacatccgcgccgccggtggagctgtctgcgagcagccattaggtctggagtgtcgtgcgcaggctcagccgggtgtgcccctccgcgaactgggccaggtggtagagtgttcccttgactttgggctggtgtgtcggaaccgagaacaggtgggtaagtttaagatgtgttttaactatgagatccgcgtcttttgctgtaactatggccattgcccctccacccctgccaccagttcaacagctactccttcctcaaccccaggcacaacttggattctgacaaagctgacaacaaccgcaactacaacagagagtacggggagtacagcaaccccctcatctacgcctggagcaaccgcaggcactccgcatgttagtacaaccgccaccacacctacggtcacaagctccaaggctacgccgttcagtagccccggcacagctaccgctctgcccgccttacggagtacagcgacgaccccaaccgccacgtcttttacagccattccttctagtagcctggggaccacctggactaggctgtcccagacaaccaccccaaccgccaccatgtcaactgcaaccccgagctcgacaccagagacagcacatactagtacagtgctgaccacaacagccacgaccactcgggccacaggatcagtggctaccccttcttcaacacccgggacggcgcacaccaccaaagtccccacaacaacgactacgggtttcactgtgacgccctcctcttcaccgggcactgcacgcacccccccagtgtggatctccaccaccactacgccaaccacatccggcagcacagtgactccctcatctgttcctggaacaacgcacacaccaacggttcttaccactaccaccacaacagtagccaccggttctatggccactcctagtagtagcactcaaacaagcggtacgccaccaagcctcattacaacggccaccacaatcacagctacagggtccaccactaacccttcttccacgcccgggaccacaccaatacctccagtcttgacgaccaccgctacaacacccgcggccacctcaagcacggtcactccgagctcagcacttggcacaacccacactccacccgtacctaatactacagcgacgactcacggccgaagcctgtcgccctcaagcccgcatacagtgcgcacggcctggacatctgcaacatccggaacactgggcaccacccatataactgaaccatcgaccggaacatcccacacgccagctgcgacaacaggaacaactcagcacagcacgccagcactttcctcaccccatcccagctcaagaactacagagagccctccaagccccgggaccacgacaccgggtcatactaccgcaacaagccggacaactgccacagccactccgtctaaaacccgcaccagtacacttcttccatctagtcccacctctgcacctataacaacagtggtcacaactggatgcgagccacagtgcgcctggagcgaatggctcgattactcatacccgatgcccggaccatcagggggagatttcgatacctattctaacatcagggctgccggcggtgccgtgtgcgagcagccactggggctagagtgtagagcccaggctcagccaggcgtgcccctgggtgagctgggccaggttgtggagtgcagcctcgactttggcctggtctgccgcaaccgcgaacaggttggcaagttcaagatgtgtttcaattacgaaattagggtcttctgctgtaattatggccactgtccctcaacacctgcaactagctccactgcaatgccatcctcaacccccggcaccacctggattctgaccgaactgactacaactgcaacgacgactgcctcaaccggttcgaccgcgacacccagcagcactcccggaactgctcccccacccaaggtgctcacttcacctgcgacaacccctacagccacttcttccaaggcaacgagctcgtcctcacctcggaccgccacaaccctacctgtgcttaccagcaccgccactaaatccaccgctaccagcgtcaccccaatcccaagcagcacactggggacaactgggaccctcccggagcagaccacaaccccagtcgctactatgagcactattcaccccagctctaccccagagaccacgcacacatccactgtcctgaccactaaggctaccacaacccgcgcaactagctccactagcactccgagcagtacccccggtacgacatggattttgacagagctgacgactgccgccacaacaacagctgccacagggcccaccgcaaccccgagctctactcccggtactacatggattttgaccgagctgacaactactgccaccactactgcttcaaccggctcaaccgctacaccgtcaagtactcccggaacaacctggattctgacagaaccctctacaaccgcgaccgtgacggttcctacaggttctacagcaaccgcatcttccacacaggccacagctggtacaccgcatgtttctactacagccaccacccctaccgtgacatcttccaaggcaacaccttcctcctcaccaggcacggcgaccgccctgcccgccctgagatccaccgccactacccctactgccacctcctttactgccattccatcctcgtccttgggcactacgtggactcggctgtcacagactacgacccctacggccacgatgtccacagcaaccccctccagtacaccagaaaccgtccacacgagtactgtgctgaccgccaccgccaccactacaggcgccaccgggagtgtggcaacaccatcatcaacccccggaaccgcgcacactactaaggtacccaccacgacgaccacaggtttcaccgccacaccatcaagcagtcctggtaccgccttgacaccccccgtctggatctcgacgacgacaaccccaacaacgaccacacccacgacctctggtagcacagtgactccttcatctatccctggaactacccacacggcccgcgtgcttactaccacaacgacaactgtggctactggaagcatggctactcccagctcctctacacagacctccggcacacctccttctctgaccaccaccgccacaacgatcaccgctacgggctccacaacaaacccctccagcacgcccggcacgactcccattacccccgtgctgacatctacggcaacaaccccagcagccacatcaagcaaagcaacttcatcgagttctcccagaactgcgacaaccctgcccgttctcacttcgactgcaacaaagagcactgccacctcctttacaccgattcccagcagcacactttggaccacatggactgtccccgcccaaaccacaactcccatgtctaccatgtctacgatccatacttccagcacacctgaaaccacacacactagcaccgtgcttaccactacggcaaccatgactcgggccactaacagtacagccacccctagctccactctgggaaccactcgcatcttgacagagttaactaccacggcaaccacaaccgcagcaacgggttcaaccgcaacactgtcatctactccaggcaccacatggatcctgactgaaccctccactattgctacggtcatggtgccaactggaagtacagctaccgcctcatccaccctcggaacagcacatacccccaaggtcgtaactaccatggccactatgcccaccgccacggcttctacggtcccttcaagcagcactgtggggaccaccagaacccccgcagtgctcccatcttcgctgcccacttttagcgtgagcaccgtgtcttcctcagtgctgacaacgctgcggcccacaggttttccttcttctcactttagcacgccgtgcttttgtcgtgccttcggccagttcttctcacccggcgaagtgatatacaataaaacagaccgagccggctgtcatttctacgctgtgtgcaatcagcactgtgatattgaccgatttcagggggcgtgtcctaccagcccaccacccgtctccagcgcacctttatctagtccgtccccagcacccgggtgtgacaatgctataccccttcggcaagttaatgaaacatggaccctcgaaaactgcactgtggctcgttgtgtgggggacaatcgcgtggtgttattagaccccaaaccagtcgccaatgttacatgcgtgaataagcacctacctatcaaagtttctgaccctagtcagccatgtgactttcactatgaatgcgaatgcatttgctctatgtgggggggcagtcactatagcacatttgacggcaccagttataccttcaggggcaactgtacatatgtccttatgcgggaaattcacgccaggttcggcaacctatctctctatttggacaaccactactgtacagcaagcgctaccgccgccgcagctcgatgtccccgagccctgagcatccattacaaatcgatggatattgtgctgacagtgaccatggtgcacggtaaagaggagggcctgatcttgtttgaccagatacccgtgagtagcggattttccaaaaacggtgtgcttgtctcggtactcggtaccacaacgatgcgcgtggacatacctgcgttgggcgtttctgttacatttaacgggcaggtgttccaagctagactgccttattctttgttccacaacaacaccgaggggcagtgcgggacgtgcacaaataaccagagagatgattgtttgcaacgagatggaacaaccgccgccagttgcaaggacatggctaaaacctggctggtgcctgattctcgtaaagatggctgttgggctccgactggtacccctcctaccgcttccccggcagcaccggtcagcagcacccccaccccgacgccatgtccacctcagccactgtgtgatctcatgcttagccaggtattcgccgaatgtcacaatctcgtccccccaggacccttcttcaacgcttgtatatctgaccattgtcggggccggctggaggtcccatgccagtctctagaggcatacgcggaactgtgccgagcacgaggcgtgtgctccgactggcggggcgcaacaggcggactgtgcgacctcacctgcccccccacgaaagtgtataaaccttgcggcccaatccagcctgcaacgtgcaactcccgcaaccaatccccccaactggaggggatggcagaggggtgcttttgccccgaggaccaaattcttttcaacgcccatatggggatctgcgtgcaagcgtgtccctgcgtgggcccagatgggtttccgaagtttccgggagagcggtgggtctccaactgccagtcatgcgtatgtgatgagggaagcgtctcagtgcagtgtaagcctctcccgtgcgacgcacaaggccagccccctccgtgcaaccgacccggcttcgtgacagtcacccggccacgggcggagaatccatgctgtccagaaactgtgtgcgtctgcaacaccactacatgcccgcagagcctgcccgtctgcccccctggccaagaaagtatttgcacccaggaggagggggactgttgtcccacatttcgctgtagaccgcagttatgctcttacaatggaactttttatggagtcggggccactttcccgggggccctgccatgtcatatgtgtacctgtctttccggagacacccaggatcccacggttcagtgccaggaagatgcctgcaacaacaccacctgtccccaaggtttcgaatataagagagtggctggacaatgctgtggagagtgcgtccagaccgcatgcttgactcccgatggtcagcctgtgcaattgaatgaaacatgggtaaactcccacgtggacaattgtacggtgtacctctgtgaggctgaggggggcgtacatctactcaccccacagcctgcctcttgtcccgatgtgagttcatgtcggggctcgctaagaaagaccggatgctgctacagctgtgaagaggactcctgccaagtgcgaattaacacaactattctttggcaccaggggtgcgagaccgaagtgaatataacattctgcgaaggttcttgccccggagccagtaaatacagcgctgaggcacaagcaatgcagcatcagtgcacctgctgccaggagagaagagtgcatgaagaaaccgtgccactgcattgtcccaacggcagcgctattctgcatacctatacccatgtcgacgaatgtgggtgcacccctttctgcgtaccagctccgatggcaccacctcacaccaggggttttccagcccaggaggccaccgccgtctag

SEQ ID NO: 124937 - DNA, 16587 bp, synthetic construct
  misc_feature 1..16587: note = Description of Artificial Sequence: Synthetic coding sequence
  source 1..16587: mol_type = other DNA
gcgcccaggatgggtgctccatccgcatgccgcactctagtcttggctcttgccgctatgcttgttgttccgcaggctggcaagtccccacctcttagacctctcagtcggaattctggggctggactcgatggaggagcgccaacctcctcaccaacccgcagagtcagctttgttccacctgtaacagtgtttcctagtctatcacgaaaacaaatgctcccccttcccgcgggcaaaggcgtcttcgcttccccgaaaggaggagggccagatctgggagtacaattgcccccagctctgaatccagctcacaacggtcgcgtgtgtagtacatggggagatttccactacaaaacttttgacggtgatgtgttcagatttccaggactgtgtaactacgtgttttccgaacattgccgagcggcctatgaggacttcaacgtccagctgcgtaggggcctcgtggggagccgtcctgtagtgacaagggtggttatcaaagcgcagggactagtgcttgaggcttcgaatggcagtgtcctaatcaacgggcagcgcgaggagctgccttactcacgaaccggcttactcgtagagcagagcggcgactatatcaaggtcagcattagactggtgttgactttcctctggaatggggaagactctgccttgcttgagctggaccctaagtatgctaatcagacctgcggactttgcggagacttcaacggtcttccggccttcaacgagttctacgcccacaacgctcgcttgaccccccttcagtttggcaacctgcagaaactggatggccccactgaacaatgccctgatcctctgccactgcctgctggtaactgtactgatgaagagggtatctgccatagaaccctcctaggccccgcttttgctgaatgccacgctctagtggactcgacagcctatctggccgcttgtgcacaggatctatgccggtgtcccacctgcccttgcgccaccttcgtggaatatagtcggcaatgcgcgcacgctggtggtcagccacgcaattggcgttgtccagagttgtgcccccgcacttgccctttaaacatgcagcatcaagaatgcgggagcccctgtactgatacttgcagtaacccccaaagggcgcagctgtgtgaggatcattgcgtcgacggatgtttttgcccgccggggcggtcatgtaccgttttggacgatattacgcacagtggatgcctgcctctaggacagtgtccttgtacccacggaggtaggacgtactcccctggaactagtttcaacacgacctgtagcagctgcacctgctcgggcgggctttggcagtgtcaggatctcccttgtccaggcacctgtagcgtgcaggggggggcgcatatctcaacgtatgacgagaagctgtacgaccttcatggggactgtagctatgtgttgagcaagaagtgcgccgattcatctttcacagtactggcagagctacgcaaatgtggactgaccgataacgagaactgtttgaaagctgtcactctgtctttggatggcggagacaccgccatccgggtacaggccgacgggggcgtgttccttaatagtatttacacacaactgcccctgtccgccgccaatattactttgttcacgccttcgagtttctttattgtcgttcagacaggcctgggtctgcagttacttgtgcagctggttcccctgatgcaggtttttgtgcgactggatcctgcccatcagggccagatgtgcggactgtgtggcaatttcaaccaaaaccaggccgacgatttcacagccctgtccggcgtggtcgaggccaccggcgctgcatttgcaaatacatggaaagcccaagccgcctgtgcgaatgctcgcaattctttcgaggacccttgttctctgagcgtcgaaaatgaaaattacgctcgccattggtgcagtcgtttgactgaccctaactccgcattttccaggtgccactccatcatcaatccaaaaccttttcatagtaactgtatgttcgatacttgtaattgcgagaggtcagaagactgtctctgtgctgccctgtcctcctacgtgcatgcttgcgctgccaagggggtccaactgtctgattggcgcgatggagtgtgtaccaagtatatgcaaaactgccctaagtcccaacgctacgcctatgtagtggacgcctgtcagccgacctgtcggggcttgagtgaagccgatgtgacttgtagcgtctctttcgttcctgtggatggctgtacttgccctgcaggtacgttcctcaacgacgccggggcatgcgtgccggcccaggagtgtccttgttacgcccatggcaccgtgctggctcccggcgaggtcgtgcacgacgaaggtgccgtctgctcctgcactgggggaaagctttcctgtctgggggcttctcttcaaaaatccactggctgcgcagcacccatggtgtacctggactgctcaaatagcagtgctggcacacccggtgccgagtgccttagaagttgccacaccctggatgtcgggtgtttctctactcattgtgtatccggttgcgtgtgtccgcccggattggtgtccgatggctcaggaggatgcattgcagaggaggactgcccctgtgttcataatgaggctacttacaaaccaggcgagactatcagggttgactgcaacacttgtacttgtaggaaccgacgctgggaatgttctcacaggctctgcctggggacctgtgtcgcctacggcgatggacatttcattacgttcgatggagaccggtacagcttcgaaggctcctgcgagtatatcctggcgcaggactactgtggagacaacaccacccatgggacattccgaattgttacagagaatattccatgtgggacaactggaactacctgttctaaggccattaaactttttgtggaggtgaggaccgcccccgccgtctctacccctgacccagccgcaaatgagccagctccccgcgaggcttccgtgggtttccgacagagactgccaccccttcagtcctacgagctaatcttacaagaagggacgttcaaagccgtcgctcgcggaccagggggtgaccctccctataaaatcagatatatggggatctttctggttattgaaacacacggtatggcggtaagctgggacagaaaaacttctgtcttcattcgacttcatcaggattacaagggaagagtttgcggcctctgcggcaattttgacgacaacgctatcaacgattttgctaccagaagccgatcagtggttggtgatgccctggagtttgggaacagctggaaactttcaccctcctgtcctgatgccctcgcccctaaggacccctgtactgccaatccattcagaaagtcatgggctcagaagcaatgttcaatccttcacggacccaccttcgcggcctgtagatctcaggtggacagcaccaagtactacgaagcgtgcgtcaacgacgcctgcgcatgtgactcagggggagactgcgaatgcttctgtacggctgtagccgcctatgcccaggcgtgccacgacgccggcctttgcgtgagctggagaacaccagacacttgtcctctgttttgtgatttctataatcctcacggaggctgtgagtggcattatcaaccgtgcggagccccatgtctgaagacttgcaggaaccctagcggtcactgcctagtcgatcttcctggtctggagggatgttacccaaaatgccctccgtcacagccattcttcaacgaggaccaaatgaaatgtgtcgcccagtgtggctgctatgacaaagatggcaactactacgacgtaggagctcgggtgcccacagccgagaattgccaatcatgtaattgtacaccgtccgggatccagtgcgcacacagcctcgaggcttgcacgtgcacctatgaggataggacatattcctaccaggacgtgatttacaacacgactgatggccttggtgcatgtctgatcgcaatttgtggaagcaacggtactattatcaggaaggccgtggcatgtcccggcactcccgccaccactccctttaccttcaccacagcctgggtgccacactctaccactagtcccgctctccccgtctcaactgtctgtgtgagggaagtgtgtaggtggtcttcttggtacaacggccacaggcctgagccaggactcggaggtggagacttcgagacctttgaaaacctccggcagcggggctaccaggtctgtccagtccttgcagatattgagtgtcgagcagcacagctcccggatatgcccctcgaggaattaggacagcaggtcgactgtgatcggatgcgcgggctgatgtgcgccaacagtcagcagagcccgccattgtgccatgattacgagcttagggtgctgtgttgtgagtacgtgccctgcggcccctcccctgcacccggtacaagccctcagccatctttatccgcttccactgaacccgccgtgcccacccccactcaaaccaccgctaccgagaaaaccacactgtgggttactccttcaatcaggagcactgccgctctgacctcgcagaccggaagttcaagcggtccggttaccgtaacaccttccgcccctgggactacgacctgtcaacctcgctgtcagtggaccgagtggtttgatgaagattaccctaagagtgaacagctgggaggagatgtggaaagctatgacaaaattagggctgccggaggacacctgtgtcagcagcctaaggacattgaatgtcaagcggagtccttccctaactggacccttgctcaggtgggacaaaaggtgcactgtgacgtgcatttcggactggtgtgtcggaattgggagcaggagggcgtcttcaaaatgtgttataactacagaatccgcgtcctgtgctgttcagatgaccactgcagaggccgggccacaacccctccccctaccaccgaactagaaacagctacaacgactacgacacaagccttgtttagtaccccccagcctacgtcttccccaggcctcacaagagcaccacctgccagcacgaccgctgtaccaacactatctgaaggactgacctcccctaggtatacttcaacacttggcaccgcgacaacaggcggtccaacaaccccagccggtagcacggagccaacggtgccaggcgtggcaacatccactctccccacaagaagtgctctgcccggtacaactggctctttgggcacatggagaccatctcagcccccaaccctggccccgacaactatggcaacctcacgggcacgccccactggaacagcatcaaccgcatccaaagagcccctcacaacctccctggcacctacgctaacctccgagttatctacatcccaagctgagacatctacaccacgtactgaaacaactatgtctcctcttacaaacacaacgacttcacaggggactacgcgatgccagccaaagtgtgagtggaccgagtggttcgatgtggacttccctacatccggggtggccggaggagacatggagaccttcgagaacatacgcgcggccgggggcaagatgtgctgggcaccaaagagcatcgaatgtcgcgccgagaattaccccgaagtgagtatagaccaagtgggacaggttctgacttgcagcctggagacagggctgacttgcaagaacgaggaccagacagggaggttcaacatgtgcttcaactataacgtgcgggtgctgtgctgcgacgattattcacactgcccgtccacaccagccaccagtagtactgccactcccagttcaacgcctgggaccacctggattctgactaaacccacaacgacagcgaccacgacagcctccaccggctcaacagccacgccaacttccaccttacgcacagcccccccaccaaaggttctgacgacaactgccactactccaacagtcacatcgagtaaagcaactccatcgtcgtccccaggaactgcgaccgcgctgccggctttgaggagcaccgctactacaccgacagcaaccagcgttaccccaatccccagctcatcactgggaactacatggacacggctgtctcagaccacaacccccactgccaccatgagcaccgccacacctagcagcacccccgagaccgcccacacatccaccgtactgactgcaacggctaccacaactggcgctaccgggtctgtggccactccttccagcacgcccgggacggcgcacaccaccaaagtgcccactaccaccacgacaggatttaccgcaacaccttcgtcaagtccaggtaccgcattaacacctccagtttggatctctacgacaacaacgccaacaactagaggcagcactgtgaccccctcctcaataccagggacaacacacaccgccaccgttctcaccaccacaacgacaacagtggccaccggctcgatggcgacaccaagctcgagcacccagaccagcggcaccacgcatacaccaccagtgccgaatacaatggctacaactcacgggagatccttgcctcccagctcaccacacaccgtgcggactgcgtggacctcggcaacttctggtattctcggtactacacacatcaccgagccatccacggtaacttctcatacactggccgctaccaccggaactacccagcacagtacacccgcattaagtagtcctcatcctagctctcggacaacagagtctccacccagccccgggacgacaactccaggccacactacagctacctctcggaccacagctaccgccaccccttccaaaacaagaacgagcactcttttgccatcttcccctaccagtgctccgatcacaacggttgtgacaatgggctgtgagccccagtgtgcatggtcagaatggttggactatagctaccccatgccaggtccctccggaggagattttgatacctacagcaacataagggctgctggtggagccgtgtgtgaacagccactgggacttgagtgtcgcgctcaggcccagcccggcgtgccactgagagaactgggtcaggttgttgagtgttctctggatttcggtttagtgtgtcggaaccgggagcaagtcggaaagttcaaaatgtgtttcaattacgaaatccgcgtgttctgttgtaactacggtcactgtccatccacacccgcaacaagctccacggcaatgccgagctccactccaggtaccacttggattcttaccgagcttacaactaccgcgaccaccacggagtcaactgggtcgacggccacgcccagtagcacgcctggaacaacctggatcctgacagagcctagcacaactgccaccgttaccgtgcccacgggctctaccgcaactgcaagtagcacacaggcgacggccggcaccccccacgtgtccaccactgccacgactccaaccgttacctccagcaaggccactcctttttcatccccagggaccgcaacggcactgccagcattaagatccaccgccacaactcccacagccacctcgtttacagctatcccttccagctcattaggcactacatggaccaggctgagccaaaccacgaccccaaccgccactatgtcaacagccaccccctcctctaccccggagactgtgcatacgagcacagtactaacaaccactgccaccactactggcgcaaccggctcggtcgccactccgagcagcactcccggcacagctcatacgaccaaagtgcttacaacaactacaaccggatttacagcgacaccctcctcctctccgggcaccgcccgtaccctgcccgtgtggatctccactacaacaacccccacgacgagaggttccacggttacaccctcaagtattccaggcactactcatacacccaccgtgcttactactaccactacaactgtggccactgggtcaatggctacccctagttcctccacccagactagcggcaccacccacacaccgcccgtgcctaacaccactgccactacacacggtaggtccttaagtccatcctccccacacaccgtaaggaccgcctggacttctgcaacatctggaacattaggcactacacacattaccgagccgtccaccgggacaagccataccccagccgccaccaccggcactacacagcatagtacccctgccctgtctagcccacacccatcatccagaacgaccgagtctcccccttccccgggcacaactacacctgggcacacccgggccacatcaaggacgacagctacagccacccctagtaagacccggacctctacgctgctccctagtagccctacaagtgctcctataacaactgtagtcaccatgggctgtgaaccacagtgtgcctggtctgagtggctcgattatagctatcccatgcccggcccgagcggcggggacttcgatacctattctaacatacgggctgccggcggcgccgtgtgcgaacaacctcttgggttggaatgtcgggcccaggcgcaacccggcgtgcctcttagagaactgggtcaggtggtcgaatgttccctcgactttggcctagtttgtcgcaacagggaacaggtgggtaagttcaagatgtgctttaattacgagattcgggttttctgctgcaattatggccactgcccttcgacacctgctaccagctcgaccgccactcctagttcaactcccggaactacgtggattctgactgagcaaaccaccgccgctacaacaacagcgacaaccggtagcaccgccattccctcgagtacacccggcactgcccctcctccaaaagtgttaaccagcactgccacgacccccacagcgactagtagcaaggcaaccagcagttcgtcacccagaaccgctaccactcttcccgtgctgacaagcactgccaccaaaagtacggccacatccttcacgcctatcccgtcattcaccttgggtacgacaggaaccttgccagagcaaactaccacccctatggccaccatgagcaccatacatccttcctctacccctgagactactcacacctctacagtcctgaccaccaaggccactacaacacgcgccacatcttcgatgtctacgccctcttccacacccggcacaacctggatcctcaccgaattgacaactgccgccacaactacggctgccaccggaccgactgccacacccagcagtacccccgggaccacctggattctcacagaaccatcaacaacagccacagtcaccgtgcccaccggtagcacagctactgcttcttcgacacgggctacagctggaacccttaaagtgctgacttctaccgcaactaccccgaccgtaatctccagccgggctacgccttcctccagccccgggactgctacagcactacctgccctccggtccacagccaccactcctaccgccacaagcgtaacagctatccctagtagttcactggggaccgcttggactaggctcagccagactacgactccaactgccactatgtcgactgctacaccttcatccactcccgagactgtgcacacctcaactgttcttaccactactactacaaccaccagggcaaccggatccgttgccacaccgtccagtacccccggtactgctcacactacgaaagtgccgacaactacaactactggattcactgccaccccgagctcatcccccggcaccgcactcacacctccagtttggatatccactacaacaactccgacaacacgcggttcaacggtcaccccctccagcatcccaggcacgactcatacagctacagtcttgacaacgacaactaccacggttgctacaggtagcatggcaacaccatcctcctccacgcagactagcggtacaactcacacaccccccgttccaaacacaacagctactactcacggtcgatccttgccccctagttccccccacacggtgagaaccgcctggacaagcgccacgagcgggatcctgggcactactcacattacggagccttctactgttacatcgcacacccccgcagccaccacttcaactacacagcactctacacccgccctctctagtccgcacccttcttcacgcactacagaatcaccaccttccccaggtacgaccacaccagggcacactagggggacaagcaggacgacagcgaccgccactccttctaagacaaggacctccaccctgctgccaagttctcccacaagtgccccgatcaccacggttgtcactactggttgtgaaccacaatgcgcatggtccgaatggcttgattattcatatcctatgccaggaccaagtggtggggatttcgacacttactcaaacatcagggctgcggggggtgctgtgtgcgagcagccgctggggctggagtgccgagcccaagcccaacccggcgtacctctgcgcgagctaggacaggtggtcgagtgctccctcgatttcggactggtatgcaggaacagagagcaggtgggcaaatttaaaatgtgtttcaactacgagatcagagttttctgctgcaactatggtcactgtccatctacacctgccactagtagcaccgccaccccctcaagcacccctggcaccacatggatactgaccaagctgactactaccgccactacgactgagtcaacaggctcaacggccacgccctcatcaacaccaggaactacttggattctgaccgaaccgtctacaactgccacagtgactgtgccaaccgggtctacagccacggcaagctccacacaagcaacagctggaacgccgcatgtgtctactacggccacaactccaaccgttacctcaagtaaggctacaccattttcctctcccggtaccgcaactgctttgcctgctctgaggtctacagccaccacacccactgctacttcgtttacagcaatcccctcctcatcactgggaaccacctggacccggctgtcccagacaactacccccacagccacgatgagtaccgcgaccccttccagtacaccggagacagcccacacaagtaccgtgctaactactactgctaccaccacacgtgccaccgggtctgtagctacacctagttcgacccccggaacagcacacacaactaaagtgcctacgacgaccacgacaggctttacagtcaccccctccagtagccccggtactgcgcgaactcctcccgtctggataagtactactacgacccctaccaccagcggttctaccgtgactccatcttcagtcccaggcacaacacacacacccacagtgctgacaacgacaacgactactgtcgccacaggcagtatggcgacgcccagttcctcaacacagacaagtggcaccactcatacccctccggtacctaataccaccgctacgactcatggcaggagtctgagcccttcaagccctcatacagtgcggactgcctggacctccgccacttctggcaccttgggtacaactcatatcaccgagcctagcaccgggacgtcccacacacctgccgcgactacagggaccactcaacattccacccctgcattgtcctcaccccatccaagtagcagaacgaccgaatctccacctagtcccgggaccacaactcccggtcacaccactgccacaagtagaacaacagccactgccaccccatcaaagactaggacgtctaccctcctgccctcatcgcctaccagcgcccctatcacgaccgttgttaccaccggttgcgaaccacagtgcgcatggagcgaatggctggattattcttatcctatgcccggtcccagtgggggagatttcgacacatatagcaatatccgcgcagccggcggcgccgtctgtgagcagccgctgggtttggaatgccgggcccaagcccagccgggggtcccgttgggtgaactgggtcaggtcgtggagtgctctctggacttcggattggtgtgccgcaatcgagagcaggtggggaaattcaaaatgtgtttcaattacgaaatcagagtgttctgctgcaactacggacattgtccaagcaccccagctactagctctaccgccatgcccagctcaacgccaggcacaacatggattctgaccgaactcactactaccgcaacaaccaccgccagcactggatcaactgcaaccccgtcatcaaccccaggaaccgcaccccctccaaaggtgctgacatctccagccacaacccctacggccacctcgtctaaggccacctcctcttcatctccaagaacggccaccacactcccagtgctgacatccaccgcgaccaaaagtactgcaacttccgtcaccccaatcccaagctcaactctgggaaccactggaacacttcctgagcagaccacaacacccgtagctacaatgtcgacgattcatccgtcttctacgcctgagactacgcatacttcaacagtacttactaccaaagcaactaccacgcgcgcaacatcctctacctctactccctcgagtacgccaggcactacttggatcttgacagagttgaccacggcagcaaccacgacagcagccactgggccaactgctactccgtcttcgactcccggaacaacatggattctgacggaactaacaaccacagccaccaccactgccagcaccggttccacagcaacgcctagttccacaccaggcacaacctggatcctgaccgaaccatccacaaccgccaccgttacggtccccactgggtctactgctaccgcctcaagtactcaagccacggctggcaccccccatgttagcacgacggcaactacgcctacagtgacttccagcaaggccacgcccagctcttcccccgggaccgcaacggctctgccagctttgcgcagtactgccacaactcccaccgccacttcatttacagccatccccagttccagtcttggcaccacctggactcggttgtctcagaccacaacaccaacggccaccatgtctacggccactccatcctcaactccagaaactgtccacacttccacagtgttgaccgcaacagctaccaccactggagcaacaggctctgtagccactcccagttctacccccggcaccgcacacacaaccaaggtgccaacgactaccacaacggggtttacagccactccctcttcctctcctggcacagccctcacccccccgaccacaacgccaatgagcactatgtctacgattcacaccagttctacacccgaaactacccatacttccacggtactaaccactacagcgactatgaccagagctacaaatagtaccgccacaccgtcttcaacgctcgggacaacacggatcctgactgagttgacaacaaccgcgacaactacggccgcaaccggatccacagccaccttgagttctacccccggcaccacgtggatacttactgaaccttctacaattgccactgttatggtgcctaccggttccaccgccacggcctcctctactctcggaacggcacatacacccaaggtggtcaccaccatggccactatgcctaccgctaccgcttcaacagtgcctagcagttctaccgtgggaacaacacggactccagcagtcctgccttcatccttgcctacctttagtgtatcgaccgtatcctcatccgttttgacaaccctgcgccccactgggttcccaagctcacactttagcacaccttgcttttgtcgggcattcgggcagttcttctcccccggggaagtgatctacaacaagacagacagggcaggatgccacttctatgcggtttgcaaccaacattgcgatatcgatcgatttcagggagcttgtcccacttctccccctcccgtgtcttccgcgccactgtcgtccccttctcctgcaccaggttgcgataatgcaattccattgcgccaggtcaatgaaacctggactcttgaaaactgcacggttgccaggtgtgtcggagataatcgagtggtgttgttggaccccaagcccgtcgctaacgttacttgcgtcaataagcatctgccgataaaagtgagcgaccctagtcagccctgtgatttccactacgagtgtgaatgtgagtgcgtgggaggccggggcattacccctggagccggtatttgctccatgtgggggggaagtcattattccacgttcgatgggacctcctataccttcagagggaattgtacctacgtcctcatgcgcgagattcacgcccgctttggcaacctgtccctgtatcttgacaaccattactgcactgctagcgccacagccgccgcagcccgttgcccacgtgcgctttctatacactataagtcaatggatattgttctgaccgtcaccatggtgcacggtaaagaagaggggctcatactcttcgaccagattcccgtctcgagtggcttctccaagaatggagtactggtttctgtacttgggacaactacaatgcgggtcgacattcccgctctgggtgtgagtgtcacattcaatggccaagtctttcaggccagactcccttacagtctatttcacaacaacactgaaggtcagtgcggaacctgcacgaacaatcagcgtgacgactgtctccagcgagatgggaccacagctgcctcatgcaaggacatggcaaagacttggttggtgcctgattccagaaaagatggctgttgggcgcccactggaaccccacccaccgcctctcccgccgcccctgtgtcttcaacacctacccctacaccctgccctccccagcctctgtgtgatctgatgctgtcccaggtgtttgccgaatgtcacaatttagtgccccccggaccatttttcaacgcgtgtattagcgatcactgcaggggtcggctagaggtcccttgccagagtctcgaagcctacgccgagttgtgcagagcgcgaggagtgtgttcagattggcggggcgcaactgggggcctttgtgatctaacatgcccccccacaaaggtgtataaaccatgcggcccaatacaaccagcaacatgtaactctcggaaccagagcccccagctcgagggcatggctgaagggtgcttctgcccagaagatcagatcctcttcaatgctcacatgggcatttgtgtccaagcctgcccatgtgttgggcccgatgggtttccaaaattccccggtgagaggtgggtaagcaattgccagtcctgcgtatgtgacgagggcagcgttagtgtgcaatgcaagcctctaccctgcgatgcccagggacaacctcctccatgcaacagaccggggtttgtgaccgttacaaggccaagggccgagaatccttgttgccccgaaactgtctgcgtgtgtaatactaccacatgcccacagagccttcccgtgtgccccccagggcaggagagcatctgtacccaggaggagggggattgttgcccaactttcagatgcaggccccagctgtgctcatacaacggaaccttctatggtgtgggcgccacctttccaggagccctgccctgccatatgtgcacgtgtctcagtggcgacactcaggatccaactgtccaatgccaggaagatgcctgcaacaatacaacctgcccgcaggggttcgaatataaaagagtggctgggcagtgttgcggcgaatgcgtccagactgcctgtctgacgcctgatggacagccggtccagctgaacgagacatgggtgaatagccacgtcgacaactgtaccgtgtacctctgtgaagcagaaggcggggtgcaccttctgacgccacagccggccagctgcccggacgttagttcttgccgaggtagcctgcggaaaaccggctgttgctactcgtgtgaagaggattcatgtcaggtgcgcattaatactacgattttgtggcatcaaggctgcgagactgaagtcaatatcaccttttgcgaaggttcctgccctggcgcgtccaagtatagcgccgaagctcaggccatgcagcaccaatgcacctgttgtcaggaacgccgggtgcatgaggaaacagttcctctgcattgccccaatggatccgctattctgcatacttacacccacgcggtgcaagtactgtgtggtctccttgcgtggggcctgcaggccggggggcatatcaggggcgctgtccaagatccacagcagcctctcaaggaccaagaggcatcagggaaggcgcgccagggcgggggctaccgacaaacagtggcctggggtgataagtccaacgctcgggcatggttacaaaagcccgtggtttgggtacagtccggtgctttcccaactccaggtcccgcttcggccctgtgcccatggtag

SEQ ID NO: 124938 - DNA, 17298 bp, synthetic construct
  misc_feature 1..17298: note = Description of Artificial Sequence: Synthetic coding sequence
  source 1..17298: mol_type = other DNA
atgggtgcaccaagcgcgtgccgaacgcttgtacttgccctggccgcaatgctagttgttcctcaggccgaaacccagggcccagtcgaaccctcatgggagaacgctggacacactatggacgggggggcccccacgagttcgccaacaaggcgagtctcgtttgtaccacctgtgacggttttccccagcctgagtcctctgaatccagctcataatggccgcgtctgttccacctggggagattttcactacaaaacgtttgacggcgatgtcttccgattccccggactgtgcaattacgtgttctctgagcactgcagagcagcctacgaggacttcaatgtgcagttgagacgcggcctggttggcagtaggcccgtggttactcgagtagtgatcaaagcccagggcctggtccttgaagcgagcaatggcagcgtcctgatcaatggccagcgcgaggagttaccttactcgaggaccggcctgctggtggagcaatcgggcgactacataaaagttagcatccgactggttctcaccttcctgtggaatggagaggacagtgcacttctcgaattggacccaaagtatgccaatcagacctgtgggctgtgcggcgacttcaacggtctaccggctttcaatgagttctacgctcacaatgctaggctcacgcctctccagttcggaaatctccagaagctagacggacccactgagcaatgcccagatccactacctctgcccgctgggaactgcacagacgaggaggggatctgtcataggaccctacttggacctgccttcgctgaatgccacgccctggttgacagcacggcttatctggcggcctgcgcccaggacctctgcagatgccctacatgcccttgtgctacattcgtagaatactcccggcagtgtgctcatgccggagggcagccacgtaactggaggtgccctgagctttgtccacgtacctgccccctgaatatgcagcatcaggagtgcggctctccttgcaccgacacatgtagcaatcctcagagagcgcaattgtgcgaagaccactgcgtggacggatgcttctgtccccccggcagaagttgcaccgttttagacgacatcactcacagcggttgtctgcccctgggacagtgtccatgcactcatggcggacgcacttattcaccaggtactagctttaacactacctgctcttcttgtacgtgttcaggaggactctggcaatgccaagatttaccttgtccgggtacatgcagcgtccaggggggagcacacatttccacttatgatgagaaactttatgatttgcatggagattgctcctatgtgctctctaagaaatgtgctgactcctccttcactgtgctcgctgagctgaggaaatgcggcctgacagacaacgagaactgtctgaaggctgtaaccctatctctggacggcggagacacagccatcagagtgcaagccgacggtggggtttttttaaactcaatttacacccaactgcctctttccgcagccaacatcaccctatttaccccgtcaagttttttcattgtagtccagaccgggctgggtctgcagttgctcgtacagcttgtacctctaatgcaggtatttgtgcgtttggatcctgctcaccagggccaaatgtgcggcctctgcggtaatttcaaccagaaccaggccgacgattttacagctctctcaggtgtggtcgaggccaccggtgcagcctttgcaaacacttggaaggcccaggcagcttgtgcaaacgctcgcaattcctttgaggacccttgcagcctgagtgtagagaacgaaaactatgcacggcactggtgcagccgcctgacagatccaaacagcgcgttcagtcggtgtcatagcattatcaacccgaagcccttccattctaattgtatgttcgatacttgcaattgcgaacgctccgaagactgcctgtgcgccgcactgagctcctacgtgcacgcctgcgctgctaagggtgtgcagctgagcgattggagagatggtgtttgtacgaaatacatgcagaactgccccaagagtcagcgatatgcatatgttgtcgatgcatgtcagcccacttgtcggggcctcagcgaggctgatgtgacttgtagcgtgagcttcgtcccagtggatggatgtacttgtccggcgggcactttcctgaatgatgccggggcatgcgtccctgcccaagaatgtccatgttacgcccatgggaccgtcctggcacctggcgaggtggtacatgacgaaggcgcagtctgctcctgcacggggggcaagctgtcttgcctgggtgcgtctctgcaaaagtcaactgggtgcgctgcccccatggtgtatctcgactgctcaaatagcagtgccggtacaccaggagccgaatgcctgaggagttgtcacactctggatgtgggctgtttctctacccattgcgtatccgggtgtgtgtgtccacccggcctggtgtccgacggctccggtggttgtatagctgaggaagattgcccctgtgtgcacaatgaagctacgtacaagccaggagaaaccattcgcgtggattgcaatacatgcacatgccggaaccgaagatgggaatgttctcacaggttgtgtctgggcacgtgcgtggcctatggtgacggccactttatcacatttgatggtgacaggtatagttttgaaggaagctgcgagtatatcctcgcacaggattattgtggggacaacacgacccacggtactttcagaatcgtgacagagaacatcccatgcggtacgacaggaaccacctgtagtaaagccattaagttgttcgttgagtcatatgaactgatactgcaagaaggcacatttaaggccgtcgccaggggtccaggaggggatccaccctacaaaataaggtatatgggcattttcctggtgatcgaaacccacggcatggcggttagctgggacagaaagacctccgtgttcattagattgcatcaagactataagggtcgcgtttgcgggctttgtgggaatttcgatgataacgcaattaacgactttgcaacacgctctaggtcggtggtgggcgacgccctcgagttcgggaattcctggaagcttagcccttcctgccccgatgccctcgcacctaaagacccctgcacagcaaatccattccggaaaagctgggcccagaaacagtgcagcattctgcatggtcctactttcgctgcctgccggtcacaggtggacagcactaaatattatgaggcttgcgtcaatgatgcgtgcgcatgtgactccgggggcgactgtgaatgtttctgcaccgccgtggccgcctacgctcaggcatgccacgatgccggcttatgtgtgagttggaggactcctgatacatgcccactgttctgcgatttctataacccacacggcgggtgtgagtggcattaccagccatgtggggctccctgccttaaaacatgtcggaacccttcaggacattgtctggtagacttgcccggactggaggggtgttacccaaaatgccccccatcacagcccttttttaacgaggaccagatgaaatgcgtcgcccagtgcgggtgctatgacaaggacggtaattattacgatgtgggcgcacgggtgcccaccgccgagaattgccagagttgcaactgcactccttcagggattcagtgtgcccactccttagaagcctgcacttgtacttatgaggatcggacctattcttaccaggacgtaatatacaatactacagatgggctgggtgcctgcctgattgccatctgtggcagtaacggaactatcatacggaaagcggtagcatgccctggaactcctgcaacgactccattcactttcactacagcttgggtaccccactctactactagccccgccctgccggtgagcaccgtttgtgtgagagaagtgtgcagatggagttcctggtacaatggtcataggccagagcctggtcttggaggcggcgatttcgagactttcgaaaacttgcgtcaaaggggttaccaagtctgcccagttcttgccgatatagagtgtcgcgcggcacagctaccggacatgccactggaggaactcggccagcaggtggactgtgatcggatgagaggcttaatgtgcgctaattcacagcagtcacccccgctgtgtcatgactatgagctgagagtgttatgttgcgagtatgttccctgtggcccatctccagcacctggcacatcaccacagccttcattgtctgcaagtacagaacctgcagttccaactcccacccaaacgacagcaacagaaaagactaccctgtgggttacaccttcgattaggagcacagccgctctgacgagccagacagggagctcaagcgggccagtgaccgtcacgccatccgcgccgggcaccacaacctgtcaaccgagatgccagtggaccgaatggttcgacgaagactacccaaaatcagaacagttaggcggcgatgttgaatcttacgacaaaattcgagctgcaggcggtcacttatgtcagcagcctaaagatatcgaatgccaggccgagtcttttcctaactggactctggcccaggtcggccaaaaagttcattgtgatgtccacttcggactggtatgcaggaactgggagcaggagggcgtgtttaaaatgtgttacaactacagaattcgggttctatgctgtagtgacgatcattgcagggggagagctaccacccctcctcctacaacagaacttgagactgccaccaccactacaacccaggctctctttagtactccgcagccaactagctctccaggccttactcgggctcctcccgccagtaccaccgccgtgccaaccctgtccgagggacttactagccctcgctacacgagtaccctcggcacggcaactactgggggacccacaacacccgctgggagcaccgagcccacagtcccaggcgtcgctacgagcaccttgcccacccgcagcgccctacccggaacaacgggatcgctgggcacctggaggccttcacagccacctactctggcccctaccactatggcaacatcgagagcccgcccaaccggcacagccagtactgctagcaaggaacccctgaccactagcctggcacctactctcacctctgagctcagcacttcacaagctgagactagtacaccccgtaccgaaactaccatgagtcccctgaccaataccaccacatctcaggggacaaccaggtgccagccaaaatgcgagtggacggaatggtttgacgtagactttcctacctctggcgtcgctggcggcgatatggagacatttgagaacattagggccgctggtggaaagatgtgctgggcacccaaatcaatcgagtgtcgagctgaaaactatcccgaggtgtcaatcgatcaggtgggtcaggttttgacatgcagcctggagaccggtttaacgtgcaagaatgaagatcagacaggccgcttcaacatgtgtttcaactacaacgttagggtgctctgctgtgatgattactcgcactgtccgtccacacccgctacttcaagcactgccactcccagcagcacaccagggactacttggattctgacaaaacctaccaccaccgcaaccacgacagcttcgaccggcagcactgcaaccccgacatccactctgcggaccgcccctccgcccaaggtgttaacgaccaccgctacaacccctactgtgacatcaagcaaggccacaccatcttctagtcctggaaccgctactgcactgccagccttgcgctccacagccaccacccctacagctacaagcgtgactcccatccccagttcttcccttgggactacctggactcggctcagccagaccactactcccacggcaacgatgagtacagcaacccctagctccactccagagaccgcccacacctctaccgtacttacagctacagcaactacaaccggtgctaccggcagcgtggcaacaccaagcagtacaccaggcacagcacataccaccaaggtgcctacaacgacaactaccggctttaccgccactccttcaagttcaccggggacagccttgaccccccccgtgtggatcagtacgacgactacacctacaaccagaggcagtacagtaactccttctagcatccccggaacaacacatactgctaccgtgctaacaacaactaccactactgtcgccactggatcaatggccacaccttcgtcaagcacgcaaacctccggaactccacctagtctaacgactaccgcaacaactatcacagccacaggatcaacgaccaatccatcctctactcccggcacaactcccattcccccagtgttgacaactacggccacgacccctgccgccacaagcaatacagtaacacccagctcagctctgggaactacccacacgcctcccgtccccaacaccatggctactacccacgggagaagcctcccgccgtcgtcaccccataccgttagaacagcttggacttctgctacttccggcatcctgggaactacccatatcacggagccatcaacagtaacatcccacaccttggccgctactacaggcactactcagcacagcaccccagccctcagcagcccacacccctcgtcgcgaaccacagagtcacctccgtcacccggcacaactacccctggccacactacagctacaagccgcacaacagccactgccacgccaagtaaaacccgaactagcaccttgctccctagctcccccacaagtgcccccattacgaccgtggtcaccatgggctgtgagccacagtgcgcttggtccgagtggctggactactcgtaccctatgccggggccgagtgggggggacttcgacacgtattcgaacatccgcgctgcaggaggggccgtatgcgaacaacccttaggcttggagtgccgcgctcaagcccagcctggagtaccactgcgcgagctgggccaggtagtggaatgctcgctcgattttgggcttgtttgtaggaatagagagcaggtggggaaatttaagatgtgcttcaactacgaaatacgagtgttctgctgcaattacgggcactgcccatctacacctgctacctccagcaccgccatgcctagttccaccccagggacaacatggattttgactgagctaacgacgacggcaactactactgagagcaccggcagcactgccacaccaagcagcactccagggactacctggatcttaaccgaacccagcactaccgccacagtcactgtcccaacaggatctacagccacagcatctagcacacaggcgacagccggtactccacatgtgtccaccaccgccacaactccgactgttacttcttcaaaggcaacccctttctcatcacccggcactgccacggcactgcccgccctgcgctcaaccgctactactcccacagcaacatcatttactgctattccgtcctcatcactcggcaccacctggactcggctcagccaaacgacgacccccacagctacaatgagcaccgccacaccttcaagcaccccggaaacagtccatacaagtaccgttctcacgaccaccgcaaccactacgggggctacaggtagcgttgccacccctagctcgaccccaggcaccgcccacaccaccaaggtgctgacgaccaccacgacgggttttacggcaaccccttcctcatctcccggcaccgcccgaacactgcccgtgtggatcagcacaaccacaaccccaacaacccgcggaagtaccgtcacaccaagtagtattccagggactactcacacccctaccgttctgacaacaacaaccacgaccgttgcgacggggagtatggccactccctcttcttccacacaaaccagcggtacacccccaagcttaacgaccacagcaaccacaattaccgcaaccggaagtacgacaaacccttcttcaacccccgggaccaccccgataccgccagtactaacaacgactgccactacacccgccgctacatcttccaccgtaaccccgtcttctgcactgggcactactcataccccccccgtccccaacaccacggcaaccactcacggtcgatccctgagcccttcgagtcctcacaccgtcaggacagcatggactagtgccaccagtgggacactgggcacaactcacatcaccgagccttctacaggtaccagccacactcccgccgctaccactgggactacccaacactctaccccggcactctcatccccacaccctagttctcgtactaccgagagccccccaagtccaggaactaccacccctggccatacacgggcgaccagtaggaccacagctactgctaccccctccaagactcgcacgtctactctgctgccttcttcccccacgtctgcacctatcacgacagtggtcactatgggctgcgagccgcagtgcgcatggtctgagtggctagactatagttatccgatgcccgggccttctgggggagatttcgacacttactctaacattcgcgcagctggcggcgctgtgtgtgagcagcctctaggtctggagtgccgggcacaagcccaacccggggtccctctgagggagctgggacaagtcgtggagtgcagcctcgatttcggtttggtttgcaggaatagggaacaggtgggaaaattcaaaatgtgctttaactatgaaataagggttttctgttgcaattacggccactgtccatctacgcccgcgacaagctccaccgctacaccctcctctacgccaggaacaacttggattctaaccgaacaaaccaccgcagcaaccactacagcgaccaccgggagcaccgcgataccaagctcaacccccgggacagccccccctccaaaggtgctgacttcaacagcgactacgccaacagcaactagttccaaggctacctcctcttcgagcccacggacggcaacaactttaccggtgctaacttccaccgcaaccaagtccacagccactagctttacccccatcccctccttcacccttggtactacgggaacccttccagaacagactactactccaatggccacgatgtccacaatccaccccagtagcacaccggagacgacccacacaagtaccgtccttacaaccaaggccacaactacccgggccactagcagcatgtctacgccgtcctcaacaccgggtacaacgtggatactgactgagctaactactgcagcaacaactactgccgctactggtcctacagccacaccgagcagtacgccaggaactacctggattctgactgaaccatcgaccacagccaccgtgaccgttcccaccggaagtacagcgacggcatcctcaactagagctaccgcaggaacgcttaaagtgcttacgtccactgccaccacccccaccgtgatctcatctagagctactcccagttccagcccaggcaccgctactgcacttcccgcgttgcgatccacagccaccacccctaccgctacctcggttactgctatcccgtcctcatccctgggtaccgcatggaccaggttaagtcaaacgaccaccccaaccgcgacaatgtcaactgccacaccctccagtacccccgagacagtccataccagcaccgtgctgacaaccactaccaccacgactagagccaccggctcggtcgcaactccctctagcacgcctggcaccgcccacacaacaaaagtgccgacaacaaccactacagggtttactgcgacaccaagctctagccctggtacagcgctgactccacccgtttggatcagcaccacaaccactcccacaacgcgggggtctaccgtcacgccatcttctattcccggaacaacacacacagcgaccgtgttaacgacaacaactacaacggtggccacggggagcatggccacccctagtagctctacacagaccagcgggactccaccatctctgactactaccgccacaacaatcaccgcaactggttcaaccacaaatcctagcagtacgcccggcacaacaccaatcccaccagtcctgactacaacagctaccaccccagctgcaacctcatccaccgtgacacctagctcggccctcgggacgacccacacacctcccgtacctaacacaaccgccactactcacggacgttccttacccccaagttcacctcacacagtgagaaccgcatggacctcagcaacaagcgggatcctcggcactacccacattacagaaccctcgaccgtaaccagccatactccagccgctactactagtaccacccaacattctactcctgccctgtcaagcccccatccatccagcagaacgacagaaagtccgccctcccccggcactactacacccggccacactcggggtactagccgcacaacagccacagcgacaccaagcaagacccggacctctactttgctgccaagcagccccactagtgctccaatcacaaccgtggtgacaactggttgcgagcctcagtgtgcgtggagcgaatggctggattactcctaccctatgccgggaccttctggaggggacttcgatacttattccaacatacgtgctgctggaggagcagtatgtgagcagcccttaggtttagagtgtagagctcaagcccagccgggggtccccctgcgcgaactgggccaggtagtggaatgctcactagattttggacttgtgtgcagaaatagagagcaggtaggaaagtttaagatgtgtttcaattacgagatccgcgtcttctgttgtaattacggacattgcccatctacaccagccacctccagcaccgcaacccccagtagcacgccaggtacgacatggatcctcacaaaactcaccactacagccaccactacagaaagtacaggctctactgcaactcccagttccaccccaggaacaacatggattcttaccgagccatccaccaccgcgacagttaccgtgccaaccggtagtaccgctactgccagctccactcaggctacagcgggaacgccacacgtctctactaccgctacaacccccactgtgacaagctctaaagcaacccctttcagttctcccggtactgccaccgccctgccagcccttcgtagtaccgccaccactccgactgcaacgtcgttcacagccataccaagctctagtctaggcacaacatggacgcgactgagccagacgactacccccactgctacgatgtctaccgctaccccctcttctacaccagagacagctcatacttccacagtgctgacaaccacagctaccaccacccgggcgaccggttcagtcgccactccttcatccactcctggaaccgcacataccaccaaggttccaaccaccaccaccacaggcttcacagtcacaccaagctccagcccagggaccgcgaggaccccaccagtttggatatccaccactactacgcctaccacctctggaagcactgtaaccccgtcttccgtcccaggcactacccacactcccacagtcctgaccaccacaacaaccaccgttgcaacaggctctatggctaccccctcctcatcaacacagacaagcggcacaccacccagcctgattaccaccgccactactatcactgccactgggtccaccactaatcccagctccacacccgggactacccctatccctcctgtcctcacaactacagctaccacacccgcagctacaagcagcacggtgacgccatcctctgcgctgggcacgacccatacaccaccggtgcctaacacaacagctactacgcacggtcgctctctgtctccctccagtccacatacagtgcgtacagcctggaccagtgctacctcaggtactcttggcaccacacatatcacggaaccatcgaccgggacctctcataccccggctgctactaccggtacaacccagcattcgacccccgctttgtccagcccccaccccagctcccgtaccacagaaagtcctcccagcccaggtacaactacacccggtcataccaccgctacttccaggacaactgcaaccgccactccgtctaaaactagaactagcaccttgctcccaagctcacccaccagtgcgccaataacaaccgttgtgaccaccggctgtgagccacagtgtgcctggagtgagtggctggactacagctaccccatgccaggcccctccggtggcgactttgacacctacagtaatattagagctgcaggcggcgctgtgtgcgagcagcctctggggctggaatgtcgcgcacaggcacagccgggggttcctcttggggaacttggacaggtagttgagtgcagcctggacttcggcctggtgtgccgaaatcgcgagcaggtagggaaattcaagatgtgctttaattacgaaataagggtgttctgctgtaattatggacactgtcccagcaccccggctacaagttccacagcaatgcccagcagcacccccgggacaacctggattctcaccgagctaaccaccactgcaactaccacagcaagtaccgggagtaccgctacaccctcatccacccctggcactgctccacccccaaaggtactgacctctcccgctaccacccccaccgccacctcaagcaaggcaaccagttcgtcctcacccagaacggctaccactctcccagtgcttacgtctacggccactaaatccaccgccaccagcgtgacacctattccctcctccactcttgggacgacaggtactctccctgaacagaccaccacaccggtagcgacaatgtcaacaattcacccttcctctacccctgaaactacacatacctccacggtcctgaccactaaagccacaacgactagggcaaccagctctacttctaccccttccagcacacccggaaccacttggatcctgacggaactgacgacagcggccacaaccaccgccgcgacaggcccaacggccaccccctctagtactccaggcaccacatggatccttactgaattgacaaccacagccacaactacggcaagtacaggttcgactgctaccccctcctcaactcccggcaccacctggatcctcactgaaccttccaccactgccactgtgaccgtgcctacaggcagtacggcaaccgcctcatcgacacaggccactgccggaacaccccacgtcagcaccacagctaccacgcccactgtcacaagttcaaaagctacaccgtcttcttcacctggtacagccactgctttgcccgctctgcgcagtaccgctacgacgcccaccgctacaagttttaccgcaattcctagcagttctctgggtacaacttggaccaggctgtcccagaccactactcctaccgcaactatgagcaccgcaacccccagcagtacccccgaaaccgtgcatacatccacggtcctaactgccaccgctactaccaccggcgctactgggtctgttgctacacctagctccaccccaggcacggcacacaccacaaaggtccctaccactaccaccaccggtttcaccgccacaccatcaagttccccaggtaccgcgcttacccctcccgtatggatctcaaccacaacgactcccactaccaccacacccaccactagcggaagtacagtcacaccttctagcataccgggcaccacccacactgcccgcgttctgaccacaacaacgactaccgtggcgacgggaagcatggccactccatcctccagtacacaaacctccggaacccccccatctcttacaaccacagccacgacgatcactgcaacaggctccacaaccaatccttcgtctaccccaggcacaaccccaatcactcccgtattaacatctacggccacaacaccagcagcaacgtctagcaaagctacttccagtagtagcccccgaaccgcaaccaccctccctgtgcttacatctactgcaacaaaaagtacggccacgagctttaccccaatcccgtcctccaccctgtggacaacatggaccgtgccggcccagacgacaaccccaatgtcaacaatgtccacaatccacacttcctcaaccccggagaccacgcatacatctactgtcctaactaccacagccaccatgacgagggccaccaactctacggctacaccatcgtcaaccttgggaaccaccagaatactaactgagttgaccacgactgccacaaccacagctgctacggggtctacagctacactgtctagtacgcctggcacgacctggattttgacagagccgagcactatcgccactgtgatggtaccaaccggcagcaccgctaccgcaagcagcacactcggtaccgcccatactccgaaggtggtcacaactatggccacgatgcccacagccaccgcctctaccgtgccatcaagcagtacagtggggacgactcggacgcccgctgtcctgccatctagtctgcccaccttctctgtctcgaccgttagttcctctgtcttaacaaccctgaggcccaccggatttccaagtagccacttttccacaccttgtttttgccgggcatttggtcagttcttctccccaggcgaagtgatatataataagaccgatcgcgcgggctgccatttttatgccgtttgtaaccagcactgtgacatcgacaggttccaaggtgcttgccccacatctcccccccctgtgtccagtgcacctctcagctcaccctcacccgcacctggatgcgacaacgccattcccttgcgccaggtgaacgagacctggacactggaaaattgtacagtggcccgatgcgtgggcgacaatcgagtcgtgttactggacccaaaacctgttgcaaatgtcacctgcgttaacaagcacctccctataaaagtttctgaccccagccagccatgcgatttccactatgagtgcgaatgcatctgctctatgtggggcggctcacactactccacttttgatgggaccagctataccttcaggggtaattgcacttacgtgctcatgagagagattcatgcccgcttcggaaacttgtcactgtacctggacaatcattactgcacggctagtgccaccgcagccgcagccaggtgtccaagggccttgagcattcactataagtcaatggacatcgtgcttacggtgactatggtgcacgggaaggaagaggggctgattctttttgatcagatcccagttagtagcgggttttccaagaacggcgtgctcgtgtcagtgctggggactacaacgatgcgcgtcgatattccagccctgggagtgtcggtgacttttaacggccaggtgtttcaagcacgcttaccgtactctctcttccacaacaataccgagggacagtgtgggacctgcaccaacaatcagcgcgacgattgtctgcagagggatggcaccactgcggcaagctgcaaggacatggcaaagacatggctagtacctgacagccgcaaggatggatgctgggcacccactgggaccccgccaactgccagccctgccgcaccagtgtcctcaacgcccacacctactccttgtccccctcagcccctttgtgatttaatgctctcccaagttttcgccgagtgccataacttagtgcctccagggccattctttaacgcatgcattagcgatcactgccgcgggcgactagaggtaccttgccaaagtttggaagcttacgcggaactgtgccgtgcccgcggcgtgtgctctgattggcgtggggccacagggggactgtgtgatctgacctgtccccctacaaaggtctataagccttgcgggccgatccagccagcaacctgcaattcacggaaccagtccccccaactggagggaatggctgaaggttgcttttgcccggaagatcaaattctcttcaacgcccatatgggcatctgcgtgcaggcctgcccgtgtgttggtcccgatggcttccccaaatttcccggggaacgctgggtgtcaaattgccagagctgtgtgtgcgacgaaggcagtgtgagcgtacaatgcaaacctctaccatgtgacgctcagggacagccgcctccctgcaaccgcccagggttcgtgaccgtaacccggcctagagcagaaaacccatgttgtcccgagacggtgtgcgtctgtaataccactacgtgccctcagagtctgcccgtgtgcccacccggccaggagtccatctgcactcaggaggaaggcgattgttgtcccaccttccgttgtcgccctcagttgtgtagctacaacggaactttttacggcgttggggccacatttcctggcgccctgccatgtcacatgtgtacatgcctgagtggtgatactcaagaccctacagtgcagtgtcaagaggatgcgtgcaataatactacttgcccgcagggcttcgagtacaagagggtggcaggccagtgctgtggggagtgcgtccagacagcctgcctgactcctgacggacagccagtccagcttaacgaaacttgggtgaactcgcacgtggataactgtactgtgtacctatgcgaagctgaaggaggggtgcatcttctgaccccacagccagcatcatgtcccgacgtgagctcctgccgcgggtccctacgcaaaacagggtgctgctattcgtgtgaggaagactcgtgtcaggtgagaatcaatactaccattttatggcaccagggctgtgaaactgaggtgaacatcaccttctgcgagggctcatgtcccggcgcctcaaagtattcggctgaagcccaggccatgcagcatcaatgcacatgttgccaagagaggcgggtccacgaggagacagtgcctctgcattgccctaacggaagcgcaatcttgcacacatatacccacgtggatgagtgcggatgtacaccattctgtgtcccagcccccatggcaccacctcacactcgaggatttcctgcgcaggaagctaccgcagtgtag

SEQ ID NO: 124939 - DNA, 17289 bp, synthetic construct
  misc_feature 1..17289: note = Description of Artificial Sequence: Synthetic coding sequence
  source 1..17289: mol_type = other DNA
atgggcgcccctagcgcctgcagaaccctggtgctggcactggcagccatgctggttgtgccccaggctgagacccaggggccagtggagcctagctgggagaatgccggtcatacaatggatggtggggccccaaccagtagccctacgcggcgcgtatcatttgtaccacctgtgacagtgttcccgtccctcagtccactaaaccctgcacataatggccgggtgtgttctacgtggggcgatttccattacaagacatttgacggggatgttttcagattccctgggttgtgcaattacgtgttttctgagcactgccgggcagcctacgaagatttcaacgttcaactgcggcgcggactcgtcggctccagacctgtcgtcactagagtggtcattaaggctcagggcctagttttagaggcctctaatgggagcgtattaattaatgggcagcgtgaagagctgccctactcaagaaccgggctgcttgtggaacagtccggcgattatatcaaggtcagcattcgactggtgctgacattcttgtggaacggggaggactcggctctcctggaacttgacccgaagtatgccaaccaaacatgcggcctgtgtggcgacttcaacgggttgccagcatttaatgaattctacgcccacaatgcacgtctgacccccttacaattcggtaatctacagaaactcgatggtcccacggagcagtgccccgatccactgcccctgcctgcaggaaactgcacagatgaggagggaatctgtcaccgaaccttgctgggccctgctttcgccgaatgccacgcccttgtggatagtactgcatatctggcggcttgtgcccaggacttgtgtagatgccctacctgcccttgtgccacctttgtcgaatatagccggcagtgtgcccacgcgggagggcaacccaggaactggaggtgtcccgagctgtgccctcggacttgtccactgaacatgcagcatcaggagtgcgggagcccgtgcacggacacatgttccaatccacagcgagctcagctttgcgaagaccattgcgttgatgggtgcttttgcccccctgggacggtcctggatgacatcacccactctggctgtctgcccctcggacaatgcccctgtacacacgggggaagaacatattcccctggaaccagtttcaacaccacatgcagtagttgcacatgcagcgggggactctggcaatgtcaggatttaccttgtcctggtacatgtagtgtgcagggtggagcgcatatctctacctacgacgaaaaactgtatgacctgcacggagactgctcctatgtcctgtcaaagaaatgtgctgactcatcctttaccgtgctggcagaactgcgcaagtgtggcctgactgacaacgagaactgccttaaggctgtaactctatcactggacggcggggataccgctattcgcgttcaggctgatgggggggtcttccttaactccatctacactcagcttccccttagcgccgccaatattactttattcaccccttctagcttctttatcgtcgtgcagaccgggttgggattacaactactcgttcagcttgtcccactgatgcaggtgtttgtgaggcttgatccagcccaccagggccagatgtgcgggttatgcggcaactttaaccaaaaccaggctgacgatttcacggccctgagcggagtcgttgaggcgactggcgccgcctttgccaatacctggaaagctcaggctgcatgcgctaacgcacgtaattctttcgaggatccttgctccctgtccgttgagaacgaaaactacgctagacattggtgcagtcgcctcacggatcctaattcagctttttcccgctgtcacagcattataaacccaaagccattccattcaaattgcatgtttgacacatgtaattgtgagcggtccgaagattgtctgtgcgctgccctgtcttcttatgtgcatgcctgcgccgctaagggggtgcagctgagtgactggcgcgatggagtatgcaccaagtatatgcagaactgccccaagagccaacggtatgcctacgtcgtggatgcatgccagcccacctgtcggggactgtccgaggcagacgtcacctgctctgtatcatttgtaccagtggacgggtgtacctgcccggccggcacatttctgaacgatgcaggagcctgcgtgcccgcccaggaatgtccatgttacgctcacggcactgtgcttgctcccggcgaggtggtgcacgacgaaggcgcggtgtgctcttgcactggtggcaagctgagttgcttgggggcctctcttcagaagtctactggctgtgcagcccctatggtttacctagactgtagcaacagctcagccgggacaccaggcgctgaatgcctgcggtcctgtcacacacttgatgtaggatgtttctcaactcattgtgtctcgggatgtgtgtgcccaccagggcttgtgagcgacggatctggcgggtgcatcgccgaggaagattgtccatgcgttcataatgaggctacgtacaaaccaggggaaactattcgggtggattgcaacacttgtacatgcagaaaccgccggtgggagtgctcccaccgattatgtctggggacatgcgtcgcctatggcgatggccacttcataacctttgacggggaccggtacagcttcgaagggtcgtgtgaatacatccttgcccaggattactgtggcgataacactactcacggcacgtttaggatcgtgacagagaatattccttgcggcaccaccggcactacttgctcgaaagccatcaagctattcgtggagagctacgagttgattttgcaggaaggcacattcaaagctgtcgctcggggtcccggaggcgaccccccctacaagatcagatatatgggcatttttctcgtcatagagactcatggaatggctgtgtcttgggataggaagacgagtgtcttcattcggctgcatcaggactataaagggagagtttgtggcctttgtggaaacttcgatgataacgccatcaatgacttcgcaacacgcagtaggtccgttgtgggagacgccctggagttcggtaacagttggaagctaagcccctcatgccccgacgccttggctcccaaagatccctgtacagccaatccgttccgtaaatcctgggcacagaagcagtgtagtattcttcatggccccacattcgcagcctgccggtcacaggtcgacagtactaagtactatgaggcctgtgttaacgacgcttgtgcatgcgattctggaggggattgcgagtgcttttgtacagctgtcgctgcatatgctcaggcgtgccacgacgccgggctgtgcgtgagctggcgcactccagatacatgcccactgttttgcgatttttataacccccatggagggtgcgaatggcattaccagccctgcggtgctccttgccttaagacctgtcgaaatcccagcggccactgcttggttgatctgccagggctggaaggttgttaccccaaatgcccaccaagccagccatttttcaatgaagaccagatgaagtgcgtcgcccaatgtggctgctacgataaggacgggaactactatgacgtgggagcgcgcgtgcctaccgccgaaaattgtcagtcgtgcaattgtacgccttcaggcatccagtgcgcccatagcttagaggcgtgtacttgtacatacgaagataggacttacagttatcaggatgtgatttacaataccaccgatggcctcggtgcttgcctaatagcaatctgtggcagcaacggcacgatcattcgaaaagctgttgcatgtcctggcacacctgctactacaccattcacctttacgaccgcctgggttccccattccaccacatctcctgccctgcccgttagcaccgtctgcgtgcgggaggtttgccggtggtccagctggtataacggccacagacccgaacctggtctgggggggggcgatttcgagacctttgaaaatctgcggcagcgtggctatcaggtgtgccctgtgctcgctgatattgagtgcagggcagctcagttacccgacatgcctctggaagaactgggacagcaggtggattgcgatagaatgcgggggttgatgtgcgcgaattcacagcagtccccccctctgtgtcatgactacgagctgcgggtgttatgttgcgaatatgtcccttgtggcccttcaccagctcccggcaccagcccacagccatctctcagtgcttctaccgagccggcggttccgaccccaacacagaccacagctaccgaaaagaccactctttgggttactcccagcataagaagcacagcagctctgacctcccagacaggtagtagttccgggcccgtgacggtgaccccctctgccccagggaccactacttgtcagccaagatgtcagtggacggaatggttcgacgaagactacccgaagtcagaacaactgggaggcgacgtggaaagttacgacaagatccgcgctgccgggggccatctgtgtcagcagccaaaggatatcgagtgccaggcagagtcctttcctaactggacgctagcccaggtcggacaaaaagtgcattgcgatgtgcatttcgggctcgtgtgcaggaactgggagcaggagggagttttcaaaatgtgttataactatagaattcgcgtgttgtgctgttcagatgatcattgtcgaggacgggccacaaccccgccacccactactgagctagaaaccgccacaacaaccaccacccaggcgctcttcagtaccccacaacctaccagcagccctgggttaaccagggcaccaccagcttccaccactgccgttcctactttgtccgaaggattgacgtccccgaggtatacttccaccctaggcacagcaacgactggaggccccaccacccctgctggctctacagagcctactgtgcctggcgtggcgacctcaacactacccaccaggagtgctctgcctggcacaaccggctctctgggcacatggcgccctagccagcctcctacacttgcgcccactaccatggctaccagtagggcaaggccaacaggtaccgcctccacagccagcaaagagcccctgacaacatcactggcaccaaccttgacttcagaactgagcacatcacaggcagaaacatctactcccagaactgagaccactatgagtcctttaacaaacaccacaacaagccagggtactactagatgtcaacccaagtgcgagtggactgaatggttcgacgtagacttcccaacctcaggtgttgctggtggagatatggagacatttgagaatattcgagccgccgggggaaagatgtgttgggcaccaaagagcatcgagtgtagggcggaaaactacccggaggtgagcattgaccaggtggggcaagtcctgacctgtagcctggagaccggattgacgtgtaaaaatgaggatcagactgggaggttcaatatgtgctttaactacaacgtgagggttctttgttgtgatgactacagtcactgcccgtccaccccagcaacttcgtccaccgccaccccctcgtcaacacccggcacaacatggatcctgaccaaaccaaccaccaccgctaccacaacagcaagcacaggatctacagccacacctacttccacacttcggaccgctccccccccaaaggtgctcaccaccacggccacaacgccaaccgtgacttccagcaaagcaacgccaagctcttctccaggcactgcgacggccttgccagctctgcgaagcactgctactacacctacagcaacttcggtgaccccaattccctccagctctctcggcacaacgtggacccggctgtcgcagacgactacgccgaccgcaaccatgtctacagcaacaccttccagtactccagaaaccgcacatacttccaccgtgctgacggccaccgctacgactacgggggccaccggctctgtagccaccccttcaagcactccagggacagcccatacgaccaaagtgccaaccacaacgactactggtttcactgcaactcctagcagtagcccagggaccgctctgacgccacccgtatggatcagcacgaccactacccccacaactcggggaagtaccgttactcccagcagcatacctggtacaacgcatactgccacagtccttactacaaccactacgaccgtggccaccggctcaatggccactcccagctcctccactcagacatcaggtacgcccccctccttgaccacaactgcgacaacgatcacagccactggatccaccactaatccctcatccactcccggaacaacccccattccgcctgtgctgacaaccaccgcaaccacgcctgcggcgactagcaatacagttaccccttcatcggccttagggactactcatactccacccgtgcctaacacgatggctaccacacacggccgatcacttccacccagcagcccacatacagtccggacagcttggacctccgccacttcaggcatcctcggcactactcacatcactgaaccaagcacagtaacaagccatacgcttgccgccactaccgggaccacacagcactcgaccccagcactgtcctccccacatccgtcttccagaacgaccgaatctcccccatcacccggcactacaaccccagggcatacaactgccacctcacggaccacggccaccgccacgcccagcaaaacacgcacttccaccctgctcccctcgtccccaaccagcgcacctattactactgtggtcacgatggggtgtgaacctcagtgcgcatggtccgagtggctggattatagctatcccatgccaggcccctcaggcggagattttgatacatattccaatatcagagccgccggaggcgccgtttgtgagcagcctctcgggcttgagtgcagagcccaggcccagcctggtgtcccactgagagagctcgggcaagtggtggagtgtagtcttgacttcggcctggtctgtcgcaatagggaacaggtgggaaaatttaaaatgtgctttaattacgagatcagggtattctgttgtaactatggacattgtcctagcacccccgctacttccagtacagctatgccgtcctcaacccccgggacaacctggattcttacagagctcacaacaacagccactacaaccgaaagtacagggagtactgcaaccccctcatcaacccccgggacaacatggatcctgactgagccaagcactaccgcgacagtgactgtgcccaccggctctacggctactgccagttctacccaagctacggctgggacaccccacgtgtccacaactgccacgactccgaccgttacgtcttcaaaagcaacccccttctcatcgcccggtacagcaaccgcactgcccgcactaaggagcactgccaccaccccaaccgccaccagttttaccgctattccaagcagctctctggggaccacttggacacggctatcccaaacaaccacaccaacggccactatgtcaaccgctaccccgagctcaaccccagagaccgtgcacacttcgactgtgctgaccacgacagcaacaaccactggcgccactggttcagttgcgacacccagctctacaccagggaccgctcacaccacaaaggttctgacaacgacaacgactggattcaccgctacaccatccagttctccagggacagcaaggaccctgccagtgtggatcagcacaactaccacgccaactactagaggcagtactgttaccccttcgtccataccgggcacaacgcacacaccaacggttctcactaccaccaccacgacggtagcaactggatctatggcgaccccaagctccagcacccaaaccagcggaaccccacctagcctcaccacaacagccacaaccatcactgcaacaggaagtaccaccaacccatccagcacccccgggaccaccccaatccctccagtgctaaccactaccgcgacaacacccgctgcaacgagttcaacggtgacacctagctctgccctcggtactacacacactccaccggtcccaaataccaccgccaccacacacggtcggtcgctgtctccttcgtccccccacaccgttcgcaccgcttggacatcagcaacctcaggcaccctcggaaccacacacatcacagaaccttcaacgggcacctcccacacacctgccgcaaccacaggcaccactcagcactccacacctgcactctcttcgccacacccatcttcacggaccacagaatcccccccctcccctgggaccacaacccccggacataccagggcaacttcacggaccaccgcgactgccactccgagcaagacgcgaaccagtaccttgctcccctcctctccaacatccgctcctatcacaacagtggtaacgatgggctgcgaacctcagtgtgcgtggtctgagtggctagattactcatacccgatgccagggccgagtggaggcgattttgacacttactcaaatattcgcgctgctggcggcgcagtgtgcgagcagcccctcggcttggagtgcagagcccaagctcagcctggggtgccgctgcgagaactaggccaggtggtggaatgcagcttggatttcggcctggtgtgtaggaaccgcgagcaagtcggcaaatttaaaatgtgtttcaactacgagatccgcgtgttttgttgcaattacggccattgtccaagcactcccgctactagctctactgctaccccctcctccactcctggtacaacatggatccttacagaacagaccacggccgccactaccacagcaaccacagggtcaactgccattccatcctctacgccaggtactgcacctcctccaaaagtgcttacatctacagctacaactccaacagcgacatcttctaaggcaacctcaagttctagcccccgaaccgctactacattacccgtgctgacaagcaccgcgaccaagagcacagctacaagctttactcccataccgtctttcacgctcggcactacagggacactgccagaacagactacaacacccatggctacaatgagcacaatacacccaagttccactcccgaaaccacacacacaagcaccgtgctcacaacgaaggccacgaccacgcgcgcgacctcaagcatgtcaacgccctcttccacgcccgggactacatggatcttaactgagctgacaacggccgctacaacgacggctgctacagggccaacagcaacacccagcagcaccccagggacaacctggatattgactgagccctcaactactgcaaccgtgacagtgccaactggaagtaccgccacggcctccagcactcgagcgaccgccgggaccctgaaagtcctgacctcgaccgctaccaccccgaccgtgatttccagcagagctacaccctctagttcccccggtaccgcgacagcgttgccggccctcagaagcactgcaaccacaccaactgctaccagcgtcacagctataccctctagtagccttggtacagcatggacacgcctctcgcaaactactactcccacagcaaccatgtctacggccactccctcctccactccagaaaccgtccatacatcaaccgtcctgacaacaaccactaccactacccgggccacagggtcagtggcaacaccaagctctacccccggaacagcccatactaccaaggtgccgacgaccacaaccaccgggtttactgccactccatcatcgagtcccggaaccgctctgactccaccagtgtggattagcactactacaactccaactacacgcggctcaaccgttacaccgtcaagcattcctggcacaacccatactgccacagtactgactacaaccaccacgaccgtcgcaaccgggagcatggccacacctagctccagcactcaaacctctggaactccaccatctctcaccaccacagcaaccaccatcacagccacagggagcaccactaatcctagctctactccagggaccacgccaattcctccagttctcacgaccactgctactacgcccgcagctacctcttcaaccgtgacgccaagtagcgctctgggaaccactcatacccctcccgtccccaacactacagctacaacacacggcagaagtctcccaccatccagcccacacactgtcagaaccgcctggacgtctgccactagtggaatcctcggcacaacacacatcacggagccctccaccgtcacgtctcatactcctgctgccaccacttcaacaacccagcactctacccctgccctcagttcaccacaccctagtagtcgaactactgagtctcctcccagccccggcacgaccactcctgggcatactaggggcaccagccgcactactgccactgccacaccctcgaagacaaggacatctacactgctcccctcgtcccccacgagtgcacctattactacggtggtgaccaccggctgcgagcctcagtgcgcgtggagtgagtggctcgactatagctaccctatgcccggtccgagcggaggggactttgacacatacagcaatatcagagcggctggaggggcggtttgcgaacagccccttggtttagagtgccgtgcccaagcccaacccggggtgccgcttagggagctcggccaggtggtcgagtgtagcctggattttggactagtctgtaggaatcgcgagcaggtgggtaagttcaagatgtgctttaattacgaaatcagggttttctgctgtaactatggacattgtcccagcaccccggcgacctcaagcaccgcaacgccctcttctaccccgggcaccacatggattctaaccaaattgacaactacagcgactactaccgagtctaccgggtctaccgctaccccatcttccactcccggaactacttggatcctaaccgagccaagcactacagccaccgtgactgttccaactgggtctactgctactgcatctagcacacaggccaccgccgggacaccacacgtctctacgacagccacaaccccaactgtgacaagctccaaagccacaccattctcaagcccaggaactgctactgcgctgccagctttgcgaagtacagccacgactcctactgctacatctttcacggcaattcctagcagttctcttggaaccacctggaccagactgagtcagaccacgactccaacggccacgatgtctactgctacacctagctctaccccagagacagctcacacctccacagtactgaccacaacggctaccacaactcgtgccacagggagcgtcgcaacccccagctctaccccggggactgcacataccacaaaagtgcctactaccacaactaccggttttaccgtaaccccaagttcaagccctggaaccgccagaacaccacccgtgtggatttcaaccaccaccacacctactacctccggtagcactgtgactccctcttcagtgccaggaaccacccacacccccactgtattaactactacaacaacaaccgtggcaacagggagcatggccacaccatctagttcaacacagactagcggtaccccccccagtctgatcactaccgcaactactatcactgctacagggtctaccactaatccttcttcaaccccaggcacgacacctattcctcctgtgctcaccaccaccgccacaacacccgcagcaaccagcagcacagtaacaccaagttcagctctcggaacaactcacaccccgcccgtacctaatactactgcgaccacccacggtaggagcctctcgcctagcagcccacacaccgtgaggaccgcttggacatctgcgacctccggaaccctaggtaccacccacattacagagcccagtactggcacttctcacactcccgcagccaccacaggtaccactcagcattcgactcctgccctgagttcaccccatccctcctctcgcactaccgaaagtccccccagccccggaactaccactccaggtcatacaaccgccaccagtcggactacagccacagccacgcctagcaaaacaagaacgtcaaccctgctgccttcttcccctacgtctgcccctattacaaccgttgtcacgacagggtgcgagcctcaatgtgcatggagtgaatggctggactactcttaccccatgccaggaccatcagggggcgacttcgacacttattctaacatcagggccgccggcggagctgtgtgcgagcagccgctggggctagaatgcagggcccaggcacaacctggcgtacccctcggcgagctggggcaagttgtggaatgttccttggacttcggtctggtttgcagaaacagggaacaggtgggcaagttcaaaatgtgtttcaactacgagatcagggtgttctgctgcaattatgggcactgccccagcacacctgcaacctcaagcactgctatgccctccagcaccccaggaaccacgtggattctgaccgagctgacaacaacagcgacaacaaccgccagtaccgggtccaccgctacacccagcagtacacccggtactgctccacctcccaaagtccttacatctcctgccaccactcccacagcaacttctagcaaggcaaccagttccagcagtcctcggaccgcaactaccctcccagtgctgacttccacagctacgaagagtacggccacctccgtgacacctattccatccagtacccttgggaccaccggcactcttcccgagcagacaacaacccccgttgcaacaatgtcaactatacatccttcctccacacccgagacgacccacacatccacagtgctgacaaccaaggctacaactacccgcgctaccagctctacatctacaccgtcctctacgcccggtactacctggatactgactgaactgacaaccgctgctaccacgaccgctgcaacaggtccaactgccacgccctcttcaaccccaggcactacctggatcctcactgaattaacgactacggcaactacgaccgcatctaccgggagcaccgccactccttctagcactcccggcacaacatggattctcacagaaccatctactaccgctaccgtcactgtgcccacaggttctactgcaactgcctcatcgacacaagcaaccgctggtacaccccatgtatccaccaccgcgaccacgccgactgtgacttccagtaaggcaacgcctagctcttcaccagggaccgcaacagccttgcccgcgttgagatctaccgcgaccacccctactgctacgagcttcaccgctattccatccagtagcctgggtacaacctggacgcgcctgagccagacaacaacccccactgccaccatgagcaccgctactcccagttctacccctgagaccgtacacacttcgaccgtactcaccgcaacagccaccaccacgggggccacgggaagtgtggccaccccttcgtccacccctggtaccgcgcatactaccaaggtacctactacaaccacgactggcttcaccgccacacctagcagttctcccggaactgcgctcacgccccccgtgtggatatccacaacgacaactccaaccactaccacgcctactaccagtggcagcaccgtgactccctctagtatccccggtaccacccataccgcaagggtcttgacaactactacaacgactgtcgctaccgggtctatggcgacaccttcatctagcactcagacttcaggcactccaccttcattaacaacaactgccacaaccataaccgctacgggaagcactaccaacccgtccagcacacccgggactacaccaatcacacccgtccttacctccaccgccactacgcctgctgcaacgtcaagcaaagcgacctcaagctcctctccaagaacagctaccacattacctgtgctgactagcacagcgaccaagagcactgcgaccagtttcactcctataccctcctctacactctggaccacttggactgtcccagcacagaccaccactccaatgtccaccatgtcaaccattcacacatcttccacaccagagacaacacatacctcaactgttctgacaaccaccgccaccatgacaagggcaaccaattcaactgccactccgtcgtccaccctggggaccactaggattctcacagaactgaccacaactgcgaccacaacggcagcgacagggtccaccgccacactttctagtacacccggaactacctggatcttaaccgaaccgtccaccattgctaccgtgatggtgcctacaggcagcacagcaaccgcaagttcgaccctagggacggcccatacccccaaagtggtaactaccatggccaccatgcctacagccaccgctagtacggtcccatcatcctccactgtcggcacaactcgtaccccagctgtgttgcccagcagcctgcctacattctcagtttccactgtatcatctagcgttttaacaacgctgcgccctaccggatttcccagctcgcattttagtactccctgcttctgtagggccttcggccagtttttctctccaggcgaagtgatctacaacaaaaccgatcgagctgggtgccatttctatgcagtgtgcaaccaacattgcgacatcgacaggttccaaggcgcatgtcctaccagtcccccaccagtgtcttcggctcccctctcctccccttcacctgctcccggctgcgacaacgccatacccttaaggcaagtgaatgagacatggaccctagagaactgtacggtggcccgctgtgttggcgacaatagagtggtcctcctggaccctaaacccgttgcgaatgtcacatgtgtgaataagcacctcccaatcaaggtctcagacccctcacagccctgtgactttcattatgagtgtgagtgcatctgctccatgtggggcgggtcccactacagtacatttgatggcacatcatacactttccgtggcaattgtacatacgtcctgatgagagagattcacgcacggttcggaaatctgtcgctgtacctggacaaccactactgcaccgcctcggccaccgcggctgctgcccggtgcccacgggctctgtcgatacactacaagagcatggacatcgtgttgacggtgaccatggtccacggtaaggaggaggggttgatcctgtttgaccagatccccgtaagctcaggatttagcaagaacggagttctggtatctgtgctaggtactactactatgagagtagatataccggcacttggcgtgtcagtaacctttaatggacaagttttccaggctcgtctgccgtattctctgtttcataataatacagaggggcagtgcgggacttgtaccaacaatcagcgggacgactgtctgcagagggatggaactaccgctgcatcatgcaaagatatggccaagacatggctcgtgcctgatagccgtaaagacggttgctgggctccaaccgggacacctcccactgcttctccagctgcccctgttagttcaaccccgacgccaacaccttgcccacctcaacctctatgcgaccttatgctttcacaagtcttcgcagaatgccataatctggtgccccccgggccctttttcaatgcgtgtatcagtgatcattgtcgtggcaggctggaggtcccctgtcaatcactagaggcttacgctgaactgtgccgcgcccggggggtgtgctccgattggcggggggcaacagggggactgtgtgatctcacgtgcccgcccacaaaagtgtacaagccttgtggcccaatccaacccgccacctgcaacagcagaaatcagagcccacagttggagggcatggccgaaggttgtttttgccccgaagatcagattctcttcaatgcccatatgggtatatgcgtgcaagcttgcccctgcgtggggcctgacgggttccctaagttccccggagagcggtgggtatctaattgtcagagttgtgtttgcgacgaaggctccgtgtccgtccagtgtaaaccgctaccttgcgatgctcaaggacagcctcctccttgcaacaggcctgggttcgttacagtcactcgtcctagagcagaaaatccttgttgtccagaaactgtgtgcgtttgtaacactacaacatgtccacagtcgttacccgtatgtcctcctggccaggaatctatctgcacacaggaagagggcgattgctgcccaacctttcggtgccggccacagctgtgtagttacaacgggactttctacggagtcggcgccactttccctggggcactcccttgccacatgtgcacttgtctgagcggggatacacaagaccccaccgtgcaatgtcaggaggacgcctgtaataatactacttgtcctcagggcttcgaatataagcgcgtggctggacagtgttgcggcgagtgcgtgcagactgcctgtctcaccccagatgggcagccagtgcagctgaatgagacatgggttaactcacatgtcgacaattgcacagtgtatttgtgtgaggccgaggggggagtgcatctgttgaccccacagccggctagttgtccagatgtctcatcgtgtagggggtccctcaggaaaacagggtgttgttactcctgcgaggaggattcctgtcaggtgcgaattaatacaacgatcctttggcaccaggggtgtgagacagaggttaatattaccttctgcgaggggtcttgtccgggagcgtcaaaatacagcgctgaggcgcaggcaatgcagcaccagtgtacatgctgtcaagagaggcgagtacacgaagagacagtgcccttgcattgcccaaacggcagcgctattctgcatacatacacgcacgtggacgagtgtggttgtacacccttttgtgtcccagcgccgatggctccacctcatacccgcggcttccccgcccaggaggctaccgccgtgtag

SEQ ID NO: 124940 - DNA, 1611 bp, synthetic construct
  misc_feature 1..1611: note = Description of Artificial Sequence: Synthetic coding sequence
  source 1..1611: mol_type = other DNA
gtattctgctgtaattacggccattgccctcccagaccacctgctctgcgtccgtgccccccacccttgcgggggcggccaggaagcaccgagttgactacgactgccaccacaaccgcgtccacaggatcaacagcaactccttctagtacccccggaacagctccaccacccaaagtcttgacttcccccgccaccacccccaccgctacgtcttctaaagcaacctcatctagttccccgaggactgcaacaacacttcccgtcttgaccagcactgcaacaaagtctaccgccacctcagtaaccccaattccgtcctctacattaggaaccaccggaacgttgcctgaacagactaccacacccgttgcaactatgtcaactattcacccttcaagtactcctgagacaacacacacatccacggttttgaccactaaagctaccacaacacgagctacgagcagcacaagcaccccatctagtactcctggaactacatggattctgactgaactgactacggcggctacaaccaccgcagccaccggcccaacagccactccgtctagcacacccgggactacttggatcctgactgaactgaccacgaccgccaccactactgcatctaccgggtccacagccaccccgagtagtacaccaggcacaacttggatcctaacggagccctccactaccgccacagttacggtcccaactgggtccacagccactgccagcagtacacaagcaacagctggtaccccacatgttagtacaactgcgacaacgccaaccgtaaccagtagcaaagctacaccatctagcagccccggaaccgccacagctctgcctgccctccggtcgacggcaacgacccacagctaccagttgtatagccaccccttactcctccctacaacctggacaagactgagccagacaaccactcccaccgctacaatgtctacagccaccccgtcaagcacccccgagacagttcataccagcaccgttctgaccgccactgcaaccaccacgggccccgctctctggccacctcccccgcctccccaggagcagctgacccttcctaaatgcagactgcctcagccgcggcactcccatcccctgctccagccccgagatggcacccacgcttcatccgtcgatcagcacaaccaccatacccataaccaccatacccacaatcagtggctgcatggtgacccactgctccatccaggggaccatccgcatcgacagtcagcggaccaccaccatcacaattgcaccggaagcatggccaccccatctagtagtacccaaacttccgggaccccccctagtctgaccacaactgccaccactataaccgccaccggcagtaccacaaacccctcgagtacccccggcaccacccctatcacacctgtgctcactagcaccgctactaccccagctgcaacatcctctaaagcgacgagttcatccagtcctaggactgctactaccttgcctgtgcttacaagcactgcaaccaagtctaccgccacgtccttcactcccatcccttccccctgcggcccgaggggaccctcatag

SEQ ID NO: 124941 - DNA, 561 bp, synthetic construct
  misc_feature 1..561: note = Description of Artificial Sequence: Synthetic coding sequence
  source 1..561: mol_type = other DNA
tctagcactcccggcactacttggattttaactgaaccatcgaccaccgctaccgtcacagttccaacaggctcgacggccaccgcctccagtacacaggccaccgcaggaacaccccacgtttctactactgcaaccacccccaccgtgacgtctagcaaagcaacaccctttagcagcccaggaaccgcgaccgccttgcctgcactgaggtccacagccactacacctacagccacttcctttactgccatccccagctcctgggccccccccggacctgcttatcaccgcccaccacaccccaggcctccctgtcctcaaccacacccccccccattgcagcggctgagtacgccacctcaatgtctgcctccaagaccaccccgcggccacaggttatgtggccacccacttctgcatccacggaactcttctcactaccagtcagcagactaccacaatcattttactgctaccccctcaagcagcccgggcaccgctaggacactgcctgtctggatttccacgactaccacccccactacacggggaagctag

SEQ ID NO: 124942 - DNA, 960 bp, synthetic construct
  misc_feature 1..960: note = Description of Artificial Sequence: Synthetic coding sequence
  source 1..960: mol_type = other DNA
actaaggcaaccaccaccagagccaccagcagtatgagcacaccttcgagtacaccagggacgacatggatcctcacagaattgacgacagccgctactactaccgctgccaccccccacggacatcccgttcttcatcctagagatcacctggatccacacagggcccagcactacaccgtaacagtgccgacggggtccaccgcaacagcctcgtctacgagggccactgccgggaccctcaaggtgctgacctcgcaccatacccattctcaccaacttcagagccatagtctgctgcagagccgggactgcaatcgaccaagcagtaccgaaaaacattcgcaccatacacattcataccagaggtactctcacccattgtttttgcctaccgcttggacacggctttcacaaacgacaacccccaccgcaacaatgagtacagccactccctcaagtacacccgagaccgtgcacactagcaccgttcttaccaccaccaccacaaccacaagagccaccctttggccgccccccccccctccccaggaacaactcacgctgccaaagtgccgactcccgcagccccggcactcccatccactgcttcagcccagagatgggactcacgcgagtagtgtggaccagcacaaccatcacactcacaaccagcggctgcacggagatcccctactgcaccctaccacgcatactgccacagtcttaacgactacaaccactacccccctcgtgctctggcagcatcctccactggctcacaggccagtggtccccccttctctgacgaccaccgccaccactatcaccgctacaggttcgacaacgaatccgtcttcgacccccgggactacacctatcccccctgtgctgacgactactgcacatacttgctcccaccaacaacacagcgacagcctactgtgtcctcgagactag

SEQ ID NO: 124943 - DNA, 2007 bp, synthetic construct
  misc_feature 1..2007: note = Description of Artificial Sequence: Synthetic coding sequence
  source 1..2007: mol_type = other DNA
atgcgagaaatccacgcaaggtttgggaatctaagtttgtacttggacaatcactactgcaccgcgagcgccactgcggcagcagcccgttgcccacgggctctgagcattcattataaaagcatggatattgtgctgacagtgactatggtccacggtaaagaagaggggcttattctgtttgaccagatccctgtttccagcgggtttagtaaaaacggagtgctggtctccgtattaggcacaaccactatgcgagttgatatccctgcattgggagttagcgtcaccttcaatggtcaagttttccaggcaagactcccatactctctcttccacaacaacaccgaaggacagtgcgggacctgcaccaataatcagagggatgattgtttacagagagacggcacaaccgctgcaagctgtaaagacatggccaagacttggctggttccggatagtcgcaaggacgggtgctgggcccctacagggactccccctactgcctcccctgctgcaccagtgagttctacccctaccccaacaccgtgccccccgcagccgttatgcgacttgatgctgagtcaggtcttcgcagaatgccacaacctcgtgccccccgggccttttttcaacgcctgcatctccgaccactgccgggggcgtctcgaagtgccttgccagtcattagaagcttatgccgagctttgcagggcccggggcgtctgttcagattggcgaggggccaccggcgggctgtgtgatctgacttgccctcctactaaggtatataaaccttgcgggcctatacagcccgcaacttgtaactcaaggaatcagagtccccagctcgagggtatggcggaaggctgcttctgccctgaggatcagattctcttcaatgctcacatgggcatctgtgtgcaagcctgtccgtgcgtgggacctgatggattccccaagttccccggcgagcggtgggtgtctaattgccaaagctgtgtgtgtgacgagggatctgtgtccgtccagtgcaagccgctgccttgtgacgcccagggtcagcccccaccctgcaaccgacctgggtttgttaccgtcaccagacccagagccgaaaatccctgctgtcccgagaccgtgtgcgtatgcaatactacaacttgcccccaatccctgcctgtgtgtccccccggacaggaatccatttgtacccaagaggagggagactgctgccctacatttcgatgccggccacagctctgttcttataacgggacattctacggcgttggcgcgacgttccccggcgctctgccatgccacatgtgtacctgcctgtcaggtgacacacaggacccaactgttcagtgtcaagaagatgcctgcaacaatactacttgtcctcaaggctttgaatacaaaagagttgctggccagtgctgtggcgagtgtgtgcagaccgcttgccttacccctgacggccagccggtgcagttgaatgaaacctgggtgaactcccatgtggacaactgcaccgtctatctgtgcgaggcggaggggggcgtgcacttgctgactccccagcccgcatcctgcccagacgtgtcgtcatgtcggggctctctacgcaagactggctgctgctatagctgcgaggaggatagttgccaggtgaggatcaatacaactatcctctggcatcagggctgcgaaacagaagtgaatatcactttttgtgaagggtcctgcccaggcgcctccaagtatagtgcggaggcccaggcaatgcaacaccaatgcacatgttgccaggaaagacgggtgcacgaggaaaccgtgcctctgcactgtcccaacggatctgcgattctacacacctatacccatgtcgatgagtgtggctgcacccctttctgcgtgccagcccctatgtccccccctgcttgtgtgtggcaccctgcccttagagcacccgccgctcatcttgggctagcccccccatag

SEQ ID NO: 124944 - DNA, 7320 bp, synthetic construct
  misc_feature 1..7320: note = Description of Artificial Sequence: Synthetic coding sequence
  source 1..7320: mol_type = other DNA
atggtgcagcgatggctgctgctgtcctgctgcggggctctgctgtctgccggactagccaacacctcctacacatcgccagggttgcaacgactgaaagattcaccacaaacagcaccggacaagggacagtgcagcacatggggcgccgggcacttttccacatttgaccaccatgtgtacgacttctccggcacctgtaactacattttcgccgctacatgcaaggacgcatttcctacattttccgtacaactgagacgcgggcccgacggaagcatctctagaatcatcgtggagctcggcgcttcagttgttactgtgtcagaggcaataatcagcgtcaaggacattggcgtgatatcattgccctacacctcaaacggcttgcagattaccccattcggtcagtctgtcagactcgtcgctaagcagctcgagctcgagctcgaggtggtttggggtcctgactcgcacctgatggtgctagtggagagaaagtatatggggcagatgtgcggtctttgtggcaatttcgacggaaaggttactaatgaatttgtatcagaggaaggaaaattccttgaacctcataagtttgccgccctgcaaaagttagacgaccctggcgaaatctgcacatttcaggacattcctagtacacatgtgaggcaggcccagcatgcgaggatctgtacccaacttctcaccctggtagcccccgagtgctcagttagtaaggagcccttcgtcctgtcatgtcaggccgatgtggctgccgcaccacagcccggaccccagaattccagctgcgctacactgtccgagtatagccgccagtgcagtatggtcgggcagcctgttaggagatggagaagtcctggactttgcagcgtgggacagtgcccagctaaccaggtttaccaagaatgcgggtccgcctgtgttaagacatgctccaaccctcagcactcgtgcagctcatcttgtactttcggatgtttctgtcctgagggtacagtgctcaacgacctctcgaacaaccacacctgcgtgccagtgacacagtgcccttgcgtccttcacggcgctatgtatgcaccgggcgaagtgacgattgccgcttgtcaaacctgtcggtgcaccttgggcagatgggtctgtacagagaggccctgcccagggcattgctctctcgagggaggaagcttcgttaccactttcgacgcaagaccttaccggttccacggcacatgcacttacatcttgctacagtctccacagttgcctgaagacggcgccttgatggccgtctacgataagagcggcgtgtcccattctgagactagcctggtagccgtcgtctacttgtctcggcaggataaaatagtgatcagccaggatgaagtggtaactaacaatggcgaggcgaaatggctcccctataagacaaggaatataacagtgtttagacagaccagtacccacttgcagatggccaccagttttgggttagaactcgtggtgcagctgaggccaatcttccaggcttatgttacagtcggccctcaatttaggggtcagacccggggattatgtggaaacttcaatggggatactactgacgatttcactaccagcatggggatagccgaggggacggctagcttgttcgtggactcctggcgggcaggaaactgcccagcagctctagagcgggaaactgatccgtgttccatgtctcagttgaataaggtgtgcgccgaaacccactgcagcatgctgctgagaacaggaaccgtgtttgaaagatgccatgcaaccgtgaacccagcacccttctacaagagatgcgtgtatcaggcttgcaattatgaagagacctttccacacatttgtgctgccctgggcgattacgttcatgcttgctctttgcgcggagttcttctctggggctggcgcagttcagttgataactgtaccattccatgtactgggaatactaccttctcttacaactcccaggcctgcgagcggacctgtctatctctgagcgaccgagccaccgagtgtcaccacagcgccgtgcctgtagatggatgcaactgccccgatgggacttacttgaaccagaagggtgaatgtgtaagaaaagcccagtgcccatgcattctggagggctataagttcatcctagcagaacagtcaacggtaatcaacggcatcacatgccactgtatcaatggaagattaagttgcccacagcgcccccagatgtttctcgcttcctgtcaggcaccaaaaacttttaagagttgcagccaatcaagcgaaaacaaattcggggccgcctgtgccccgacctgccagatgcttgccacaggggttgcgtgtgtgcccaccaaatgcgagccagggtgcgtgtgcgccgaaggtttgtatgagaacgcggacggacagtgtgttccacccgaggagtgcccctgtgaattctctggcgtttcctatcctggtggagcagaactccacacggactgtcgtacctgcagctgcagcaggggaaggtgggcctgtcagcaaggtactcattgtccgtccacttgtaccctgtacggcgagggccatgtgatcacttttgacggacagagattcgtcttcgatgggaattgtgaatacatactggctaccgatgtctgcggcgtgaacgactctcagcccacattcaaaatcctaaccgaaaacgtaatctgtggaaatagcggagtcacatgctcaagagctatcaaaattttcctcggcgggctcagcgttgtactagccgatcggaactacacggtgaccggcgaggagccacacgtccagctgggcgtgacccccggagccctcagcctggtggtcgacataagtattcctgggaggtataatctgacactgatatggaatcgacatatgacaattcttatcaggattgcaagagcatcacaggatcccctatgtgggttgtgcgggaatttcaacggcaacatgaaggacgatttcgagacaaggagccgctacgttgcaagttcggagctggaactagtgaatagttggaaggagagcccattgtgcggtgatgtcagtttcgttacagatccttgctctctgaatgccttccggcgatcatgggccgagagaaaatgttctgttattaattctcagacatttgccacttgtcacagcaaagtgtaccatctcccatattacgaggcatgcgtccgcgacgcctgtggatgtgattcagggggcgattgcgagtgcctctgcgacgctgtcgccgcatacgcccaagcttgtctcgataagggcgtctgcgtggattggaggactccagcattctgccccatctactgtggtttttataacacccatacccaagatggacacggcgagtaccagtatacccaggaggctaactgtacgtggcactaccagccctgtctttgccccagccagccacagagcgttcccgggagcaacatcgagggctgctataactgctctcaagatgagtattttgaccacgaggagggggtgtgcgtgccatgtatgccaccaactactcctcagccgccaaccactccacaactgccaacaactgggtccagacccacgcaggtgtggcccatgacagggacctctacaacaataggactgctttccagcaccggaccaagcccatctagtaatcacacaccagccagtccaactcagaccccactattacctgccaccctgactagctcaaaaccaaccgcctcaagcggtgagcctccacggccaaccacggctgtgactcctcaggctacgtccggcctgccacccactgcaaccctgagaagcacagccaccaaacctacggtcactcaggccactacgagagcgacggcttccactgcttcccccgccaccaccagcacggcacagtctacgactaggacgactatgactctccccacccctgccactagcggaacatcccccacacttccgaaaagcacaaaccaagagctgcccggaacaaccgcgactcaaactaccgggcccagaccaactcccgcaagcactaccggcccaaccaccccgcagcctggccagcccaccaggccaactgccaccgagacaacacagacacggaccacgacagagtataccacgccccagacccctcatactacacacagtcccccgactgctgggtcacctgttccttccactggcccagttaccgccacatcttttcatgctactaccacctacccaactccttcgcaccctgaaacgacgctgccgacccacgtccctcccttctctacctccctggtcacccctagtactcacacagtgatcactcccacccatgcacagatggccactagcgcctcaaaccattctgcaccaactggaactatcccaccccctaccaccctgaaagctactggatctacccacacagcaccccccattactcccacaacatccggaaccagtcaggcccactcctccttttccacaaacaagacacccacttcccttcactctcacacgagctccacacaccatcccgaggtgacccccacatctactaccacgataaccccaaatcctacctcaacccggactcgcactccggtggctcatacaaatagtgccacgtctagtcgaccgccccccccctttaccacacatagtccccctaccggctcctcccctttctcaagcactggaccaatgactgcaacgtcctttaaaaccacgacaacctacccgacgcccagccacccacagacaactttgcctacacatgtccccccgttctccacgagtctggtgactccatctacccatacggtcattacacccacacacgcacagatggctacatctgccagtattcacagcatgccaactggtactatccccccaccaacaactttaaaagccacggggagcactcatactgcccccacaatgactctcacaacatctgggacaagtcaagccctgtcatcgctcaacacagccaaaacgtccaccagcttgcactcacatacatctagtactcaccacgctgaggctaccagcacttccacgacaaacatcacaccgaatcctacgagtaccggcacacccccgatgacggttaccacctccggaacttctcagagtaggagcagcttttctacagccaagacttctaccagtctccacagccacaccagctccacccaccaccccgaggtgaccagcacctcaacgacctccatcacgccaaaccacaccagtacaggaaccagaacccctgtggcccatactaccagtgccacgagctctaggctccccactccctttactacccactcccccccgacaggaacgacacctatatctagtactggaccagtgaccgcgacttcatttcagaccaccaccacctatcccacgccgtcccatccacacactaccttgcctacccacgtccctagtttttcgacttctctggtcacaccctcaacccacaccgttatcattcctacccacactcaaatggcaacttccgcttcaatacactccatgccgacgggaaccataccccctccaacgaccattaaagccacgggatcaacccataccgctcctcccatgactcccaccacctcaggtactagccagtctcctagctctttcagcactgccaagacatctacctccctgccctatcatacctccagtacgcaccacccagaagttaccccgacatctacgacaaacataacacctaagcacacgagtactgggacccgcacacctgtcgctcacacaaccagtgctagcagtagccgcctgccaacaccatttactacccattcacctcctactggatccagcccgtttagttctacggggccgatgacagctacgagcttccagaccactacaacttaccctaccccaagtcacccacagaccacactcccaactcacgtacctccattttccacatctctggtcacccccagcacccatacagttataatcactacacatacccagatggcaacttcggcaagcatccattccacccctacaggaacagtcccgcccccaacaacactgaaggccaccggctcaacccatactgctccgcctatgacagtgaccacgagcggcacctcccagacccactcatcattcagtaccgccactgcttccagtagttttatctcttcctcaagttggctgccccagaatagctccagtaggcccccttcaagcccgataaccacacagctgcctcatctatcaagtgctacaacacccgttagcacgacaaaccagctgtcttccagtttttccccttcacccagcgccccaagtaccgtcagtagttacgtgcctagttcacattccagccctcagacctcctcgcctagcgtgggcaccagctcaagttttgttagtgctccggtgcatagtaccactttatcgtcggggtcacacagcagtttaagcacccatcccaccacagcctctgtcagcgcgtcgccactgttcccaagttccccagccgcatctacgactatccgggccactctgccacacacaatcagcagccccttcaccctgtctgctctgctcccaatttcaacagttactgtgagtcctacgcccagctcccacctggcctcaagtaccatcgcctttccttccactccaaggaccaccgccagcacgcacacggctccggcattttcctcacagagcaccacaagtaggtccacctcccttacgacgagagttcccacctcaggatttgtatcccttacctctggagttactggcataccaacttcaccagtcacaaacctcaccaccaggcaccctggaccgactctgtccccgactactcggtttttaacctcgtccctcacggctcacggctcaaccccagcatctgctccggtaagcagcctcgggactccaacgcctacttcgcccggagtctgttcagttcgggaacagcaggaggagatcaccttcaagggctgcatggccaacgtgactgtgactcgatgcgagggggcgtgcatttccgccgcgagcttcaatattattacacagcaggtcgacgctaggtgcagttgttgtcgcccattgcacagttacgagcagcagcttgagctcccttgtccagacccctccacaccagggcggagactagtcttaaccctccaggtgtttagccactgcgtttgttcttccgtggcatgcggcgattag

SEQ ID NO: 124945 - DNA, 1134 bp, synthetic construct
  misc_feature 1..1134: note = Description of Artificial Sequence: Synthetic coding sequence
  source 1..1134: mol_type = other DNA
atgaaaaccctacccctcttcgtctgcatctgcgcgttaagtgcttgtttttctttttccgaggggcgggagagagaccatgagctgagacaccgcaggcaccatcatcagtcccccaagtcacattttgaattgccacactatccgggattgctggcgcaccagaaaccatttatccgcaagtcctataagtgtttgcacaagcggtgccgccctaaattgcctccgagtcctaataaccctcctaagttccccaatccgcatcagccccctaagcaccccgacaagaacagctccgtggttaatcccactctggtcgccactactcagatcccctcagtaacattcccttctgcctctacaaagataactacactgcccaacgtgaccttcttgccccagaacgccaccactatctcatccagggagaacgtgaacactagctcttcagtcgcgaccctcgctcccgtcaattctccggcgcctcaggataccacggcagccccacccactccctcagctacgacccccgctcccccgtccagcagtgctccccctgagactacggcggccccgcctaccccttccgccacgacacaggcgccaccctctagtagcgccccccccgaaaccacagctgcaccgccaactccacctgctacgacgccagcccctccctcttcttcagcaccaccggagacaacagctgccccaccaacccccagcgcaaccacgcctgcccccctatcctccagcgctcctcctgagacaaccgcagtgcctccaaccccttcagccactacactagacccatcaagtgcatccgcaccaccagagacaaccgcagcccctccaaccccctccgctaccaccccagctccacccagctctccagctcctcaggaaaccaccgcagctccaataactacaccgaacagctctcccaccacacttgctccagacacttctgaaacaagcgccgctcctacccatcagactacaaccagcgtgacaacacagaccactactaccaagcaacccacgagcgccccagggcaaaacaaaatcagtcggtttctgctatatatgaagaatctgttgaaccgcatcattgatgatatggtcgagcagtag

SEQ ID NO: 124946 - DNA, 1134 bp, synthetic construct
  misc_feature 1..1134: note = Description of Artificial Sequence: Synthetic coding sequence
  source 1..1134: mol_type = other DNA
atgaagaccttgccgctgttcgtgtgtatttgtgccttgtccgcgtgcttttctttttctgaaggtcgtgaacgagatcacgaattgcggcaccggcgccatcatcatcagagtcccaaaagccacttcgaacttcctcactatccaggtctacttgcccaccaaaagcccttcattcgtaagagctacaagtgtctgcacaagaggtgtcgcccaaagctcccaccctcaccgaataatcctcccaaatttccaaatccacaccagccccctaaacacccggataagaattcctcggtggtgaatccaacactcgttgcaaccacacaaataccatctgttacattcccctccgcctctacaaaaatcaccactctaccaaatgttacgtttcttccacagaacgccacaaccatctcttctagagagaatgtgaatactagtagctctgtagcaacgctggcccctgtcaactctcccgccccccaagacactacagcagccccgcctaccccatctgcgaccacgcctgccccgcccagctcctcggctcccccagaaactactgctgcgccaccaaccccaagtgcgaccacgcaggcaccccctagtagttcagctccaccggagaccacagccgccccacctacgcctccagctaccacaccagcgccgccgtcttcttcagccccaccggagactaccgctgcaccccccacaccatccgccacgacacctgcccccctcagctcgtccgccccgcccgaaaccacagctgtcccaccaactccttcagccactaccctcgacccaagcagcgccagcgctccacctgagaccacagctgcccccccaacaccatctgctacaacccccgcaccacctagttcacctgccccacaggaaacaaccgcagcacccatcacaacgcccaattcatcccccactactctggccccggatacaagcgaaacttctgccgccccaacccatcagacaaccacgtctgtcacaacccagacgacaaccactaagcaacccacatctgctccagggcaaaacaagatatctcgattcctgctttacatgaagaacctactcaatcgcatcatagacgatatggtggagcaatag

SEQ ID NO: 124947 - DNA, 1134 bp, synthetic construct
  misc_feature 1..1134: note = Description of Artificial Sequence: Synthetic coding sequence
  source 1..1134: mol_type = other DNA
atgaagacattacctctctttgtttgtatctgtgccttgtcagcctgcttttccttctccgagggccgcgagagagatcacgaattgcggcatcgcaggcatcaccaccagagccccaagagccacttcgaactgccccactaccccggcctactggcgcaccaaaaacctttcatccgcaaatcatacaaatgcctccacaaaagatgtaggccaaaactgccccccagccctaacaatccccccaaatttcccaatccacaccagccacccaagcacccggacaaaaatagttctgttgtcaaccccacgctggtggcgacaacccaaatcccaagcgtgactttcccaagtgcctcgactaaaataactactctccctaatgtgacttttctgccccagaacgctacaacgatcagctccagggaaaatgtgaacaccagcagctcagtcgccactctcgctccagtgaacagtcccgcacctcaagacaccacggccgcccctcctacaccctcagcaacaacccccgcccctccttcctccagcgcgcctccagaaacaacagcggcacctcctacgccgagcgccaccactcaagctcctccatctagttccgccccccctgagacgactgcagcccccccgactccccctgccaccactcccgcgcctccctctagctctgccccccccgaaaccacagccgcacctccgactcctagcgccaccacgcctgcaccactctcatcaagcgcgccacccgaaaccacagcagtaccccccacaccatccgcgaccacccttgatcccagttctgcatcggcccctcctgaaaccactgcagctcctcctacgccatcagccacgactccagctcctcccagcagcccagccccccaggagaccacagctgctcccatcacaaccccaaacagtagcccaactacactggctcccgatacatccgagacctctgcggctcctacgcatcagactaccaccagtgtgacaacgcagaccaccacaactaaacagccaacaagcgccccaggtcagaacaagataagtcgctttttgctctatatgaaaaaccttctcaatcggattatcgatgatatggttgagcagtag

SEQ ID NO: 124948 - DNA, 411 bp, synthetic construct
  misc_feature 1..411: note = Description of Artificial Sequence: Synthetic coding sequence
  source 1..411: mol_type = other DNA
atgaaaactttgccactgtttgtgtgcatctgcgcattgtctgcctgcttttctttcagtgaggggagagagcgggatcatgagctgaggcatcgaaggcatcaccaccagtctccaaaaagccatttcgagctgccccattatcccgggctcctcgcgcaccagaaaccgtttatcaggaaaagttataaatgcctacacaaacgttgtaggccaaaactgcctccaagccctaacaacccgcctaagtttccaaacccccaccaaccccccaaacatccagacaaaaacagcagcgtggttaacccgacgctggtggcaactacccagatcccatccgttactttccctagcgcgagcaccaagattaccaccctcccgaatgtgacattcctcccacagaatgcctag

SEQ ID NO: 124949 - DNA, 1743 bp, synthetic construct
  misc_feature 1..1743: note = Description of Artificial Sequence: Synthetic coding sequence
  source 1..1743: mol_type = other DNA
atgaccgctcctgcagggccaaggggaagcgaaacagaaagacttctaaccccaaatcctggctatggcacccaggctggaccttctcccgccccacccacccctcccgaggaggaagatcttcggcgcagattaaaatactttttcatgtctccctgcgacaaattccgcgccaagggccgaaagccttgcaagctgatgctccaggtggtaaagatactggtggttactgttcaactgatcctgttcggcctgagcaaccagttggcggtcactttccgtgaagagaacaccatcgccttcagacatctcttcctgctaggctactcagacggtgcggacgatacctttgcggcctacacccgggagcaattatatcaagcgatcttccacgcagtggatcagtacctcgccctgcctgacgtttcattaggaagatacgcctatgtccggggaggcggggacccctggactaacgggtccggactggccctgtgccaacgctactaccatcggggtcatgtggatcctgccaatgacactttcgatatcgatcctatggttgttactgactgcatccaggtggatccccccgagcggccaccccctccacccagcgacgatttaacactgctggaatcaagctctagctacaagaacttgacccttaagttccacaagttggtgaatgtgacaattcacttcagactgaaaacaattaatcttcagtcactgatcaacaacgagatcccagattgttacacgttctcagttttgatcaccttcgacaacaaagcacacagcggcagaatccctatctcacttgagacccaggcccatattcaggaatgtaaacacccctccgtttttcagcacggggacaactcttttagactgcttttcgatgtggtggttattctgacctgttctctgtcctttctactgtgtgctcgaagcctcctccgagggttcctcctccagaatgaattcgttggcttcatgtggagacagagaggtagggtgatttcactttgggagagactggagttcgttaatgggtggtatatcctcctggtgacgtctgatgtcctgacaattagcggaactattatgaaaataggaattgaggcaaagaacctcgccagttatgatgtatgctcgatacttctcggaacatccacacttctggtgtgggtcggggtgattcggtacctgaccttctttcataactacaatatcctcatcgcgacgcttcgtgtggcattacccagcgtgatgaggttctgttgctgcgtcgccgtgatttatctgggctattgcttctgtggatggatcgtcttgggcccttaccacgttaagttccgctccctctcaatggtgtccgagtgtctgttcagcctgatcaacggtgacgatatgttcgtcacctttgcagcgatgcaggctcagcaaggaagatcctcccttgtgtggctgttttctcagctctatctgtactcctttatatctctcttcatctacatggttctgtctctctttatcgctctgattactggagcctatgacaccatcaaacaccctggtggcgctggggccgaggagtctgagctgcaggcgtacatcgctcagtgccaggattcaccaacctctggcaagtttcggcggggctcaggaagcgcttgcagtctgctgtgttgctgtggaagagacccctccgaggagcactcccttctggtgaattag

SEQ ID NO: 124950 - DNA, 1638 bp, synthetic construct
  misc_feature 1..1638: note = Description of Artificial Sequence: Synthetic coding sequence
  source 1..1638: mol_type = other DNA
atgactccaagccagccgacccgaggcagctcatgcacaaggccttcttccatgttgtggacgagcacgtggagatgcttaacatgccattgggcaggaatgcggatgtccgtggtcggggtaacacttggcccgatggcccagggactgctatctgcatccggtacaacaaccgaagccacttggactcgcccaactacacacctgacgctcatcaggtggtggttactgaccgcctcaaggtggatccccccatccggtccactgcggccaccagctaccatatctccttcttggaaagccgccccggttacacggacgtcccgttccaacagcacttccaccgcctgttctctggaaggtgggcctggatggggtcgacaacacacccggcacagccacccctcaaattactttcccaaagttggaaccgggcctccaaggcctagatggtgcctcctgggagaacatttcccctgccagcttcagtctcagcacgtggcaggagatgccggtacctggggcagaaagggacccgaggatgccccagacccacatcccagccttcttccacggctcgtgaacgtgacaatccattttagactgaaaactataaacctgcagagtttaataaacaacgagattcccgattgctacaccttttcagttctgattacatttgataacaaagcccacagcggtcgaatcccaataagcttagaaacacaggcacacatacaagagtgcaaacacccatcagtatttcaacacggggataattctttcagactgctgtttgatgttgtggtgattttgacatgtagtttatccttcctgctatgtgcccgctcactgctgcgcgggtttctgctgcagaacgagttcgtcggcttcatgtggagacagcggggaagagtcatctccctgtgggaaaggctcgagttcgtaaatggttggtatatcctgctggttacctcggatgtgttgactatatcaggcaccatcatgaagatcggcattgaagcaaaaaatcttgcatcatacgatgtctgttcaatactcctcgggaccagtacgcttttggtgtgggtaggcgtaatcaggtacttgactttcttccataactataacattctaatcgctaccctgcgagtggctctgcctagtgtgatgcgcttctgttgttgcgtcgccgtgatttatctggggtactgcttttgtggatggattgtgctcggaccctatcatgtgaaattcaggagtctatctatggtgtcagaatgtctgttcagcttgataaacggtgacgacatgtttgtgacgttcgcagccatgcaagctcagcaggggagatcctcactggtgtggcttttttcacaactgtatctatacagcttcatctcactcttcatctatatggtcctgtctctgtttatcgccctcatcaccggcgcatacgataccatcaaacatccggggggcgctggagctgaggaatctgaactccaagcttatattgcccagtgtcaggattcaccaactagcggcaagtttaggagaggcagcgggtcagcgtgttctctgctgtgttgctgcgggcgggatccatcggaggagcattccctgctggttaactag

SEQ ID NO: 124951 - DNA, 1701 bp, synthetic construct
  misc_feature 1..1701: note = Description of Artificial Sequence: Synthetic coding sequence
  source 1..1701: mol_type = other DNA
atggccaggcaaccatacaggttcccgcaagctagaataccggagcgaggtagcggggtcttcaggctcactgtcagaaacgccatggctcaccgtgattctgagatgaaagaggagtgtttacgggaggatctgaagttctatttcatgagtccctgcgagaaatacagagccaggaggcagatcccctggaaactcggactgcaaatccttaaaatcgtgatggtgacaactcaactggtgcgctttggactctcaaatcagcttgtcgtagcgtttaaagaggacaataccgtcgctttcaagcacctgtttcttaaggggtacagcggcaccgacgaggacgattatagctgttcggtgtatacccaggaagacgcctatgagagtattttcttcgctattaaccagtatcaccaattgaaggatattactcttggaacgctagggtatggagagaacgaggataaccgtattggcctgaaagtgtgcaagcaacactataagaagggcacaatgttcccctctaacgagacccttaatattgacaacgacgtcgaactggactgcgtgcagctggatcttcaggatttatcaaagaagccacccgactggaagaatagctcctttttccggctcgaattttacagactgcttcaagtcgagatttcctttcacctcaaaggtatagacctccagaccattcactctcgggagttgcccgattgttatgtttttcagaatactatcatcttcgacaacaaggctcactctgggaaaattaaaatctattttgattccgacgcaaagattgaggagtgcaaggatttgaatatttttgggagtactcagaaaaacgcccagtacgtgctggtgtttgatgccttcgtaatcgtgatctgcttggctagcctcatactgtgcacaaggtctattgtccttgccctgcgcctcagaaaaaggttcctcaacttctttttggaaaagtacaagcgacctgtgtgcgatacggaccaatgggagttcataaatgggtggtacgtgctggtgattattagtgaccttatgactatcattggcagcatcctgaagatggaaatcaaagcaaagaacctcactaactatgatttgtgttcaatttttcttggtacaagcacactgttggtctgggtcggcgtgatacgttacctgggatattttcaagcctacaatgtcctaattcttactatgcaggcgtccctccccaaagtgctccgtttctgcgcatgcgccggtatgatctacctgggatacacattctgcggatggatcgtcctcggaccctatcacgacaagttcgaaaatctcaatacggttgctgagtgcctcttcagcttagttaacggggacgacatgtttgcaacttttgcgcagatccagcaaaaaagcatcctggtctggctgttcagtcgcctttacctgtactcattcataagtctcttcatctacatgattttgagcttattcatcgcactgattaccgacagctatgacaccatcaagaaatttcagcagaacggcttccctgagacagacctccaggagttcctaaaggaatgcagtagtaaagaggagtatcaaaaagagtcatccgccttcctcagctgcatttgctgtcgtagaagaaagagatcagacgatcacctgattcccatatcctag

SEQ ID NO: 124952 - DNA, 1662 bp, synthetic construct
  misc_feature 1..1662: note = Description of Artificial Sequence: Synthetic coding sequence
  source 1..1662: mol_type = other DNA
atggccgacccggaggtggtagtctcatcctgttcgagtcacgaagaagaaaaccgttgcaatttcaaccaacaaacatccccctctgaagagctactgctagaggaccagatgagaagaaagctgaaattctttttcatgaatccttgtgaaaaattctgggcccgggggcggaagccttggaaattagctattcagatcctcaagattgctatggtcacaatacagctggttctgtttgggctatccaatcagatggtggtcgcatttaaagaggagaacactattgcgttcaagcacttgttcctgaaaggatacatggatcgaatggatgacacctacgcagtgtatacacagtccgacgtgtacgaccagctgatcttcgccgttaatcagtatctgcagctgtataatgtctcggtagggaaccatgcttacgagaacaaggggaccaagcaatcagctatggctatctgccagcatttctacaagcgaggtaatatatacccgggaaatgacactttcgacatcgatcccgaaatcgaaacagaatgcttcttcgtggaacctgacgaaccctttcacatcgggacacccgccgagaataagctcaatttgacactcgactttcatcggttgctcactgttgaactacagttcaagcttaaggccattaacctgcaaaccgtgaggcatcaagaacttcctgactgctatgattttactctgacaatcacctttgataacaaggcccattccggccggattaaaatcagcctagacaacgatatctcaatacgcgaatgcaaagactggcacgtctctggatctatccagaagaacacccactatatgatgattttcgatgccttcgtgatcctgacctgtctggtgtcactcatactgtgcatcagatcagtgatccggggcctccagctccagcaggagtttgtaaacttctttttactccattacaaaaaggaagtttccgtaagtgatcagatggagtttgttaacggctggtacatcatgatcatcatctcagacatcctaacaatcatcggatcaatccttaaaatggagattcaggcaaaatctctgacaagctatgatgtctgctccatcctactggggacctcaactatgcttgtgtggttgggtgtcatccgctatttgggtttcttcgcgaagtataatctgcttattctgacactgcaagcagctctccctaacgtgattcgcttttgttgttgcgccgcgatgatctacctcggttactgcttctgcggatggattgtcctcgggccctaccacgacaaatttagaagcttaaatatggtctcagaatgcctgttttccctcattaacggagacgacatgttcgctacatttgccaaaatgcagcagaagagttatctggtctggttgtttagcagaatttacctttacagtttcatcagtctgtttatttacatgatcctgagcctgtttatcgcccttatcacagacacttatgagactattaagcagtatcagcaagacgggttccccgagactgagctgagaacttttatcagcgagtgtaaggatctccccaactccggcaaataccgacttgaagacgacccacctgtcagcttgttttgctgctgcaagaaatag

SEQ ID NO: 124953 - DNA, 1494 bp, synthetic construct
  misc_feature 1..1494: note = Description of Artificial Sequence: Synthetic coding sequence
  source 1..1494: mol_type = other DNA
atggctgacccagaggtggtagttagcagctgtagctcacacgaagaagagaaccgttgcaattttaaccagcagacgagcccatcagaggagctactgttggaagaccagatgcgccgaaagttgaaattcttctttatgaacccctgcgagaaattctgggctagaggcaggaaaccttggaaactagcaatccaaatcctgaagattgcaatggtcaccattcagtaccttcagttgtataacgtgagtgtgggaaaccacgcatacgagaataaaggaacgaagcagagtgcgatggctatttgtcagcacttttacaaacgtggaaacatttatccaggtaacgacaccttcgacatcgatcccgaaattgaaactgagtgtttcttcgtggaacctgatgagccttttcacatcggtacgcccgcagaaaataagcttaacctaacactcgatttccatcggcttctgacagtcgagctccagtttaagctgaaagctatcaatcttcagacagtacgccatcaggagctcccagattgctatgattttacacttacgataacattcgataacaaagcgcacagtggacggattaagatcagtctggataacgacatttcaatccgcgaatgcaaggattggcacgtgagtggtagcatacagaagaatacacattatatgatgatcttcgacgcatttgtgatcctgacctgtcttgttagcttgattctgtgcataaggtcagtgattagaggacttcaactccagcaggagtttgtcaacttttttctgcttcactacaaaaaggaggtgagcgtctcggatcagatggagttcgtcaacggatggtacatcatgataattattagtgatattctgaccattatcggcagcattctcaaaatggagattcaggctaagtccttaacctcctatgatgtgtgcagcatcctgttaggcactagcaccatgttggtctggctgggcgtgattagatacctgggtttcttcgcaaaatacaatcttctgatactgacgcttcaggcggccctcccgaacgtaataaggttctgttgttgtgccgccatgatctatctgggctactgcttctgcgggtggattgtgctgggaccttatcatgacaagttccgtagcctgaatatggtcagcgagtgccttttctcgctgattaacggcgacgatatgttcgctacctttgcaaagatgcaacaaaaatcgtacctggtttggttgttcagtcggatctatttatacagctttatcagcctgttcatatacatgatattatccctgtttattgctcttatcacagatacctatgaaacaattaagcagtaccagcaagacgggttccccgagactgagctgcggacatttatttccgagtgcaaagacctgcctaacagcggcaagtacaggctcgaagatgatccccccgtctctctgttctgctgttgtaaaaagtag

SEQ ID NO: 124954 - DNA, 966 bp, synthetic construct
  misc_feature 1..966: note = Description of Artificial Sequence: Synthetic coding sequence
  source 1..966: mol_type = other DNA
atggctgacccagaagttgttgtttcctcatgcagctcccacgaagaagaaaaccggtgcaatttcaatcaacagactagcccgtcagaggaactactcctcgaagatcagatgcggagaaaactgaagttcttttttatgaacccatgtgagaagttctgggcccgcggcagaaaaccatggaagctggccatacagatcctgaaaattgctatggtgacaatccagcttgttctgttcggcttgagcaatcagatggtcgtggcctttaaggaggagaacactatcgcttttaaacatttgttccttaaaggctatatggatcggatggatgacacttacgctgtttacacacagagcgatgtctacgaccagctcatctttgccgtaaatcagtacctgcagttgtacaatgtgagcgtcggaaatcacgcctacgaaaataaggggacgaaacagagtgccatggctatctgccagcatttttacaaacgggggaacatctatcccggaaatgacacctttgacattgacccagagatcgaaaccgaatgcttcttcgtcgagccagacgagcccttccatattgggactcctgcggagaacaagttaaatctaacgctggatttccatcgcttgctgacagtagagctccagtttaagctgaaagcgattaacctgcagactgttaggcatcaagaattgccagattgctatgactttactctgaccatcacctttgataacaaagcccacagtggacggatcaaaatttcactggacaatgatatcagcatcagagagtgtaaggattggcacgtctctggctcaatccagaaaaatacccattatatgatgatcttcgatgccttcgtgatacttacttgcctcgtgtctctcatcttatgtattaggagtgtcatccggggattacagctccaacaagtgggcaacgtggcattttag

SEQ ID NO: 124955 - DNA, 1494 bp, synthetic construct
  misc_feature 1..1494: note = Description of Artificial Sequence: Synthetic coding sequence
  source 1..1494: mol_type = other DNA
atggccgatcctgaggtcgtggtctcatcatgttcaagtcatgaggaggagaaccgatgcaactttaatcagcagacttctcctagcgaggagctgctgttggaggaccagatgaggagaaaattaaagttcttctttatgaatccctgcgagaagttttgggctagagggaggaagccttggaagctggccatacagattctcaagattgcaatggtcacgattcaatatttgcaactgtacaatgtgtccgtggggaatcatgcgtacgagaataaggggacgaagcaatccgccatggccatttgccagcacttttacaagaggggcaatatctatcccggaaacgacaccttcgatatcgaccccgaaatcgagactgagtgtttttttgtggagcctgatgaaccgtttcacataggtacccccgcagaaaataagctgaaccttacactagacttccacaggctgttgacagtggagctgcagttcaagctgaaggccattaatctccaaaccgtacgccaccaggagctccctgactgctacgatttcacactgaccattaccttcgacaataaggcacattccggccgaataaagatttccctcgataacgacattagcatcagagagtgcaaagattggcacgttagcggtagcattcaaaagaacacacattatatgatgattttcgacgcttttgtcatactgacttgcctggtgtcgctgatactctgcattcgcagtgtcatcagggggcttcaacttcagcaggaattcgttaatttttttctgctgcactataagaaggaggtgtctgtgagtgaccagatggaattcgttaacggctggtatatcatgatcattattagtgacatattgactataatagggtctatactcaagatggagattcaggcaaaatccctgacatcctatgacgtgtgctccatccttctgggaacaagtacaatgctggtctggcttggggtgatccgatatctaggtttcttcgctaaatacaacctgctaatccttactttgcaagctgcacttcctaatgtcatccggttttgttgctgtgctgcgatgatctatctgggctactgtttttgtggctggatcgttttaggaccataccatgacaagtttcgctccctgaacatggtatccgagtgtttattttctctaattaatggcgatgacatgttcgctacctttgccaaaatgcagcagaaaagttaccttgtgtggctcttcagccggatctacctatacagctttatcagtttattcatatatatgatcctaagtttattcatcgccttgatcactgatacctatgagacgattaaacagtatcagcaagacgggtttcccgagacggagctgcggactttcatctccgaatgtaaggacctacccaactctggtaagtaccggttggaagacgaccctccagtgtccctcttctgttgttgcaagaaatag

SEQ ID NO: 124956 - DNA, 1662 bp, synthetic construct
  misc_feature 1..1662: note = Description of Artificial Sequence: Synthetic coding sequence
  source 1..1662: mol_type = other DNA
atggctgatccggaggtcgtcgtcagtagctgttcctcccatgaagaggagaaccggtgtaactttaatcagcaaacatcgcccagtgaggagctgctgttagaggatcagatgcgtagaaagctgaagttctttttcatgaatccctgcgagaaattttgggcccggggccgcaagccctggaaactggcaatccagattcttaaaattgccatggttactatccagctggttctgttcggcctgtccaaccaaatggtggtggctttcaaggaagagaataccatcgcttttaagcatctgtttctaaaaggctatatggaccgaatggacgatacctatgccgtatatactcagagtgacgtctatgatcagctcatctttgctgtcaatcagtatcttcagctttacaacgtcagcgtgggcaaccacgcctatgaaaataagggtactaagcagtcagcaatggcgatctgtcagcatttttacaagagaggtaatatatacccgggcaacgatacgttcgatatcgaccctgagatcgagaccgagtgcttctttgtggagcccgatgaaccgttccatataggcacgcctgcagagaataaacttaacctcacactggacttccaccggcttctcacagtggagttacagtttaaacttaaggctattaatttgcaaaccgtgaggcatcaggagctgcctgattgctacgactttactctcaccataactttcgacaacaaggctcacagtgggcgcattaaaatcagccttgacaacgatattagcatccgggagtgcaaggattggcatgtcagcggatcaattcagaaaaatacccattacatgatgatttttgatgcatttgtgatccttacctgtttagtatctctgatactgtgcattagaagcgtgatccgcgggctgcagctgcagcaggagtttgtcaatttcttcctacttcattataaaaaggaagtgtctgtgtctgatcagatggaattcgtgaacgggtggtatattatgattatcatctccgatatcctcactattatcgggagcatcctcaagatggagattcaggccaagtctcttacctcgtatgacgtctgctctatcctgctcgggactagtaccatgctggtgtggctaggagtcattaggtacctgggtttctttgctaagtacaacctcctaattcttaccctgcaggctgccctgccaaacgtgatccggttctgctgttgcgccgcaatgatctacctcggttattgtttttgcggctggatagttttagggccataccatgataagttccgttcacttaatatggtcagcgaatgcctgtttagcctgatcaatggcgatgatatgttcgcaacatttgcgaagatgcagcagaaaagctatctcgtgtggctgttctctaggatatacctgtacagttttatcagccttttcatttacatgatactttctctgtttattgctctcatcacggacacctatgaaactatcaaacaatatcagcaagatggcttcccggagactgagttgcggacctttatttctgagtgtaaggacctgcccaactctggcaaataccggctcgaagatgaccctccagtgtctctgttttgctgttgcaagaaatag

SEQ ID NO: 124957 - DNA, 2442 bp, synthetic construct
  misc_feature 1..2442: note = Description of Artificial Sequence: Synthetic coding sequence
  source 1..2442: mol_type = other DNA
atgtctctgctgggcgatcccctgcaggctctcccgccatccgctgcaccaactggccccttgttggccccaccggcgggggccacactgaaccggctgagggaaccactgctgcggcgactgtctgaactcctcgaccaagcgccagagggaagaggctggcgcaggttagcggagctggctggttcccgcggccgcttgcgactctcctgcctcgacctggagcagtgctccctgaaagtgctggaacccgaagggagccctagcctttgcttgctcaagctgatgggtgagaagggctgcactgtgaccgagctctcggatttcctccaagctatggagcacaccgaggtgctgcagttgctctctcctcccggtatcaaaatcacggtgaaccctgagtctaaggcggtgttagcaggtcagttcgtgaagctatgttgtagggcaactggccatcccttcgtccagtatcagtggtttaaaatgaacaaagaaatccctaatggcaatacatctgagctgattttcaatgccgttcacgtgaaagatgccgggttttacgtttgccgtgtcaacaacaatttcacattcgagttttcacagtggtcccagctcgacgtttgtgacattcctgaaagctttcaacgttcggtcgatggtgtcagtgagtcaaaacttcagatctgcgtggaaccaacatcacagaaactcatgcctggttcaaccctggtgcttcagtgtgtggccgtaggatcacctatacctcattatcagtggtttaaaaacgagttaccactcacacacgagactaaaaagctttacatggtcccttacgtcgacctggaacaccaggggacctactggtgccatgtgtacaatgatagggactcgcaggacagcaagaaagtcgaaatcatcatcgatgagctcaacaatctgggacaccccgataataaggagcagaccacagaccagcctttggcgaaagataaagttgcactgctgatagggaacatgaattatcgcgagcatccaaagctcaaggctcccctcgtcgacgtctatgagctgaccaatcttttacgccagctcgacttcaaggtagtgagcctgctcgatctcactgaatacgaaatgcgcaatgcagtggatgagtttttacttctgctggacaaaggggtatacgggctcttgtattacgctggccacggctatgaaaatttcggcaacagtttcatggtgcccgtcgacgcccccaatccatacagaagcgagaactgtctgtgtgtccaaaacattttgaaactcatgcaggagaaggaaactggtctgaatgtgttcctgctcgatatgtgtcggaagaggaacgactacgacgatactatccctattctcgatgctctgaaggtgacagcgaacatagtgtttggctacgccacctgtcagggggccgaggccttcgagatacagcacagcggattagcaaacgggatcttcatgaagttcctgaaagacaggctgttggaagataagaaaattactgtgttgttagacgaagttgcggaagatatggggaagtgtcaccttacaaaaggcaagcaggcgctggaaatccggtcgagcctctctgaaaagagggccctcaccgaccctatccagggcactgaatacagcgctgagagcctggtgcgcaatctgcagtgggcgaaggctcatgaactgcccgagtccatgtgcctcaaattcgactgcggggtgcaaattcaactcgggtttgccgcagagttttccaacgtcatgatcatctatactagcatcgtgtataaacctcctgaaatcatcatgtgtgatgcttacgtgacagacttccctctcgatctggacatcgatcccaaggacgctaacaagggtactcccgaggaaaccggaagttatcttgtgtccaaggacctccctaagcactgtctgtacactagactgagctcacttcaaaagctgaaggaacatttggtgttcaccgtttgcctttcttatcagtattctggtctggaggatacagtggaagacaaacaggaggttaacgtgggcaagcctctgattgcgaagcttgacatgcatagaggactaggccggaagacttgtttccaaacttgtctgatgtccaacgggccatatcaatcatccgcggcaacatctgggggagccggccattatcatagccttcaggaccccttccatggcgtctaccacagtcatccaggtaatccgagcaacgtgaccccggctgacagctgccactgttctcggacccccgatgcttttatatctagcttcgcccaccatgcctcttgccacttctcccgatctaacgtacctgtcgagaccaccgatgaaattcctttctccttttccgatcgactgcgcatttcagagaaatag

SEQ ID NO: 124958 - DNA, 2475 bp, synthetic construct
  misc_feature 1..2475: note = Description of Artificial Sequence: Synthetic coding sequence
  source 1..2475: mol_type = other DNA
atgtcgctcttgggagatcccttgcaagctctgccaccatctgcagcacccacgggccccttgctcgcccctccagccggcgctactctgaatcgcctccgggagccactgctgaggagactgtctgaactcctggatcaggcccccgaggggagaggttggcggcgcttggccgaactcgccggatcaagagggaggctgcgcttgagctgtctcgacttggagcagtgctccctcaaagtgctcgaacccgagggttccccatccctgtgtctgctgaagctgatgggcgagaaggggtgcaccgtgaccgagttgtcagatttcctgcaggctatggagcacacggaagtcctgcagctcctctccccgcctggaatcaagattaccgtgaatccggaatctaaagcggttctggccggtcagttcgtcaagctgtgttgcagggcaacaggacatccctttgtccagtaccaatggttcaagatgaacaaggagatcccaaacggtaatacttccgagctgatcttcaacgccgttcatgtaaaagatgccgggttctacgtgtgccgcgtgaacaataatttcacctttgaattcagtcagtggtcccaactggacgtctgcgatatccctgagagcttccagcggtccgtggacggggtgtctgaatccaaactgcagatctgcgtggagcccacttcacagaagcttatgcctggctcgaccctggtgctacagtgcgtggccgtgggatctcccatccctcactaccaatggtttaagaacgagcttccccttactcacgaaacaaaaaaattgtacatggtaccatacgtggatctcgagcaccagggaacttattggtgtcacgtgtataacgaccgggatagtcaggactccaagaaggttgagattatcattggaagaacagacgaggccgtggaatgtactgaagacgagcttaacaacctgggtcaccctgacaacaaggaacagacaaccgatcaaccactcgctaaggataaggtggctcttctgataggaaacatgaattacagggagcatccaaagctgaaagccccacttgtcgacgtttatgaacttactaatctgctcaggcagctcgatttcaaagtggtttctctattagacctcaccgagtatgagatgcgaaacgcggtcgacgaattcctgctactgctcgacaagggagtatacggactcctctactacgctggccacggatatgaaaactttggcaacagcttcatggtcccggtcgatgcccccaatccctatcgatccgaaaactgtctgtgtgtgcagaacattctgaagttgatgcaagagaaagagacagggctgaatgtgtttctgctggatatgtgtcgcaaacgaaatgactacgacgatacgatccctatactggacgccttaaaggtcacagctaatatagtattcggttatgcgacttgtcagggcgccgaggctttcgagattcagcattccggattggcaaacgggattttcatgaagtttctcaaagaccggctgcttgaggataagaagattacggtattgttggatgaggtggctgaagacatgggcaaatgccacctgacaaagggcaaacaagcactggaaatacggtcaagccttagcgaaaagagagctttgacggatccaatacaagggacagaatattctgccgagagcctggtaagaaacctgcagtgggctaaggctcacgagctgccagaaagtatgtgtctaaagttcgactgcggggtgcagattcagctcggattcgcggctgagttttcaaacgttatgattatttatacttcaattgtgtacaagccgcccgaaataattatgtgcgacgcctacgttacagattttcctctggatttggatattgatcccaaggatgccaacaaggggacacctgaagagacgggctcatacctcgtgagcaaagatctcccaaaacactgtctgtacacacggctgagctctttgcagaagctcaaagaacacctggtgttcaccgtgtgtctttcctaccagtatagcggactcgaagatacagtggaggacaagcaggaggtgaatgtgggcaaacccctgatagccaagttggacatgcacaggggattggggcgcaagacgtgttttcagacatgtttaatgagcaacggcccctaccagtcttccgcagctacatccggaggagcaggccattaccactcacttcaagatccattccacggggtctatcattctcacccggggaacccatccaacgttacacctgctgattcatgtcactgctccaggacccctgatgcgttcatatcatctttcgcacatcacgctagctgccacttctctcgttcaaatgtgcccgtggagaccaccgacgaaatccccttttcattctctgatcggctgcggatctcagaaaagtag

SEQ ID NO: 124959 - DNA, 441 bp, synthetic construct
  misc_feature 1..441: note = Description of Artificial Sequence: Synthetic coding sequence
  source 1..441: mol_type = other DNA
atgacaatgagatctctactccggacgccattcctgtgtggcctcctgtgggctttctgtgcccctggtgcacgagctgaagaacccgccgctagtttttcccagcccggcagtatgggcttagacaaaaataccgtgcacgatcaggagcatataatggaacacctcgaaggagtaatcaacaagcccgaagctgaaatgagccctcaggaattgcagttgcactactttaagatgcacgattacgacggcaataacttactggatggattggaactttctacagcaatcacccatgtccataaggaagagggctctgaacaggcgcctctgatgtcggaggacgagctaattaacattatcgacggagtcctcagagacgacgacaaaaacaacgatgggtatatcgactacgcagagttcgcaaagagtctgcaatag

SEQ ID NO: 124960 - DNA, 441 bp, synthetic construct
  misc_feature 1..441: note = Description of Artificial Sequence: Synthetic coding sequence
  source 1..441: mol_type = other DNA
atgaccatgcggagtcttcttcgaacaccattcctgtgtggcttgctgtgggcattctgtgcacccggcgctcgcgcagaagaacccgcagccagcttttctcagcctgggtctatgggactggacaagaatacagtgcatgaccaagagcacatcatggaacacctagagggagtgattaacaaaccagaagccgagatgtcccctcaggagctgcagcttcactactttaagatgcatgactacgacggcaataatctactagatgggctggaactctccacagccattacccacgtgcataaggaagaaggatccgagcaggccccacttatgtcagaagacgagctgatcaatatcatcgatggcgtactgagggacgacgacaagaataatgacggatatatcgactatgccgagttcgccaaaagcctgcagtag

SEQ ID NO: 124961 - DNA, 285 bp, synthetic construct
  misc_feature 1..285: note = Description of Artificial Sequence: Synthetic coding sequence
  source 1..285: mol_type = other DNA
atggaacacctggagggggtcatcaataagccagaggccgaaatgtctccacaagagctccagttacactacttcaagatgcacgactatgacggtaacaatcttctggatggtcttgagctgtccacagctatcacacacgtgcacaaagaagagggatccgaacaagcccccctgatgagtgaggacgaactcatcaatatcattgacggtgtgctgcgggacgacgataagaataatgacggttatatagactacgccgaattcgccaaatcattacagtag

SEQ ID NO: 124962 - DNA, 441 bp, synthetic construct
  misc_feature 1..441: note = Description of Artificial Sequence: Synthetic coding sequence
  source 1..441: mol_type = other DNA
atgacaatgcgatcattgctgagaacgcccttcttgtgtgggttgttgtgggctttttgtgctcccggtgccagggctgaggaacccgctgcaagctttagccagccgggatcgatgggattggataaaaatacagttcacgaccaggaacatatcatggaacatctggagggcgtgatcaataagcctgaagccgagatgtcaccacaggagctacaactacactacttcaagatgcacgactatgacggcaacaacctgctcgatggcctcgaactcagcaccgcaatcacccacgtccacaaagaagagggaagcgagcaggctcctttgatgtcagaggacgaactgatcaatatcattgacggagtgctgagagacgatgacaaaaacaatgacgggtatatcgactatgccgagttcgccaagtccctgcaatag

SEQ ID NO: 124963 - DNA, 441 bp, synthetic construct
  misc_feature 1..441: note = Description of Artificial Sequence: Synthetic coding sequence
  source 1..441: mol_type = other DNA
atgacgatgaggtctcttctgcggactccttttctgtgcggtctcctgtgggctttttgcgcacctggagcaagggcggaggagccagccgcaagcttttcccagcccgggtctatgggcctggacaagaacaccgtgcacgatcaggagcacatcatggagcacctggagggagtgattaacaagccagaagctgagatgagcccccaggagcttcaacttcactactttaaaatgcacgattacgacggaaacaacctactggacggcctggagctttctactgcaattacccatgtgcataaagaggaaggaagcgaacaggcacccctgatgtccgaagacgagctgattaatatcattgacggggtgctccgcgacgacgataaaaacaacgacgggtatattgattatgccgagttcgccaagtctttacaatag

SEQ ID NO: 124964 - DNA, 285 bp, synthetic construct
  misc_feature 1..285: note = Description of Artificial Sequence: Synthetic coding sequence
  source 1..285: mol_type = other DNA
atggagcatcttgagggagtgataaataagcctgaggcagagatgagtccgcaagaactgcagctgcactattttaaaatgcatgactatgacgggaataacttgctggatgggctggagctctctaccgctataacccacgtgcataaagaagaagggtccgagcaggcccctcttatgagcgaagacgagcttatcaatataatcgacggtgtacttcgagacgacgataagaacaacgatggttacattgactacgccgagttcgcaaagagcctgcagtag

SEQ ID NO: 124965 - DNA, 285 bp, synthetic construct
  misc_feature 1..285: note = Description of Artificial Sequence: Synthetic coding sequence
  source 1..285: mol_type = other DNA
atggagcatctcgagggggtgattaacaagccagaggcggagatgagcccccaggaactgcagcttcattatttcaagatgcacgactacgacggtaataacctgctggacggacttgagctaagcacagcaatcactcacgtgcataaggaggaaggctcggagcaagcacccttgatgtctgaggatgagctcattaacataatcgatggcgttctgcgcgacgacgacaagaacaacgatggatacattgattatgccgaattcgctaagagtttgcagtag

SEQ ID NO: 124966 - DNA, 441 bp, synthetic construct
  misc_feature 1..441: note = Description of Artificial Sequence: Synthetic coding sequence
  source 1..441: mol_type = other DNA
atgactatgcgctccctgctgcggacgccttttctatgcggattgctgtgggcattctgtgctcccggtgctagagctgaggagcccgccgcgtcctttagtcagcccggctccatgggactcgataaaaacaccgtacatgaccaggaacacattatggagcacttggagggtgtgatcaacaagccggaagccgaaatgtctcctcaggaactgcagcttcactatttcaaaatgcatgattacgatggcaataatctcctcgatggcctggagctgagtactgccatcacacacgtgcacaaagaagaaggctctgagcaagcgccactaatgtcagaggacgagcttattaacatcatcgatggcgtcttaagggacgatgataaaaataacgacggctatatcgattacgctgagttcgcaaagtcgctgcagtag

SEQ ID NO: 124967 - DNA, 441 bp, synthetic construct
  misc_feature 1..441: note = Description of Artificial Sequence: Synthetic coding sequence
  source 1..441: mol_type = other DNA
atgaccatgcgcagcctacttcgaaccccattcctgtgtggactgctctgggcattctgtgcccctggggcccgggcagaggaacccgccgcttcgtttagtcaacccggctccatgggccttgataaaaataccgtgcacgatcaggaacacatcatggaacaccttgaaggcgttattaataaacctgaggcggaaatgagtcctcaggaactgcagctgcattattttaagatgcatgattacgacggcaacaatctgcttgatggactggagctgagcactgcaatcacgcatgtacacaaggaggagggctcggagcaggctcccctaatgtccgaagatgagctgatcaacattatcgatggagtactgcgggacgacgataagaataacgacgggtacattgattatgcggaatttgccaagagtcttcagtag

SEQ ID NO: 124968 - DNA, 186 bp, synthetic construct
  misc_feature 1..186: note = Description of Artificial Sequence: Synthetic coding sequence
  source 1..186: mol_type = other DNA
atgaccatgagatcgctgcttaggaccccatttttatgcggtcttctctgggccttctgcgcccccggagcccgcgcagaagaacctgctgcatcattttctcagccaggcagcatgggattagataagaatactgtccacgatcaagagcatatcatggaacaccttgaaggggttatcaattag

SEQ ID NO: 124969 - DNA, 384 bp, synthetic construct
  misc_feature 1..384: note = Description of Artificial Sequence: Synthetic coding sequence
  source 1..384: mol_type = other DNA
atgttatcggtctgttcatgtcgcacctctagcggtatgcggagccaatggccctccgctcgtcagaggtcttcttccctgagcacatttcgccatattatggagcatctggagggggtaatcaacaagcccgaggctgagatgtcccctcaggagctccagcttcactattttaaaatgcatgattatgatggcaacaatctccttgatggcctcgagctgtcaaccgcaatcacccacgtccataaggaggagggatcagagcaagcccccctgatgtccgaggacgaactgatcaacatcattgatggcgtgctgcgagacgacgataagaacaacgacggctacattgactacgccgagttcgcaaagtcactccagtag

SEQ ID NO: 124970 - DNA, 3423 bp, synthetic construct
  misc_feature 1..3423: note = Description of Artificial Sequence: Synthetic coding sequence
  source 1..3423: mol_type = other DNA
atggtcatcagccttaatagttgcctgagttttatctgcttattgttgtgtcactggatcggaaccgcatccccactgaacctggaggaccccaacgtgtgtagccattgggaatcttatagcgttaccgtgcaagaaagttatccacatccgttcgatcagatctactacaccagctgcacggatatcctcaactggtttaaatgtacgcgtcacagagtcagttatagaaccgcttataggcatggcgaaaagaccatgtacagacgcaaatcccagtgctgccccgggttctatgaatcaggcgaaatgtgcgtccctcattgtgccgataagtgcgtgcacgggcgctgtatcgctcccaatacctgccagtgtgaacctggatggggagggactaattgttcatcagcctgcgatggcgatcactggggtcctcactgcacatcaagatgccagtgcaaaaatggagctctgtgtaaccccatcaccggcgcctgccattgcgcagccggcttccgggggtggagatgcgaagatcgctgtgaacaggggacttacggcaatgactgtcatcagagatgtcagtgtcaaaacggcgcaacatgcgaccatgttaccggagagtgtcgttgccctcctgggtataccggtgcattttgtgaagatttatgcccccctggcaagcacggaccccagtgtgagcagcgatgcccctgtcagaacggcggagtgtgccatcacgtgacgggggaatgctcctgtccctctgggtggatgggcaccgtgtgtggacaaccctgcccagagggaagattcggaaaaaactgctctcaggaatgccaatgccataatggcggaacatgcgacgcagcaactgggcaatgtcactgctctcccgggtacactggcgaacgttgccaggacgagtgtcccgttggaacctacggagtgctttgtgcggagacttgtcaatgcgttaacggcggcaaatgttatcatgtatccggggcctgtctttgcgaggctgggtttgccggcgagagatgcgaagcacggctgtgtcccgagggcctctacggaattaaatgtgataaacggtgtccatgccacctggagaatacccacagttgccaccccatgagcggcgagtgcgcttgtaagcctggctggtcaggactatattgcaacgaaacgtgcagccccggattttacggagaagcctgccagcagatatgttcttgtcagaacggggcggattgcgactctgtcaccggcaaatgtacttgtgccccaggttttaagggtatcgactgcagcacaccttgtccacttggcacatacggcataaactgctcttcgcgctgtgggtgcaagaacgacgccgtctgttccccagttgatggttcttgcacttgtaaggctggatggcatggggtggattgtagcatacggtgcccaagtggcacatggggcttcgggtgtaatcttacatgtcaatgcctcaacggcggcgcctgtaatacgctagacgggacctgtacatgcgcacccggatggaggggggagaagtgtgagctgccatgtcaggatggtacttatggcctgaactgcgcagaacggtgcgactgttctcatgccgatgggtgccaccccactaccgggcattgtcggtgtttgcccggttggtctggggtgcactgcgactctgtgtgcgcagagggacgctggggtccaaattgttccctgccctgctattgcaaaaatggggcatcgtgctcacccgacgacggcatctgcgagtgtgcgccggggttcaggggtactacctgccagaggatatgctctcccgggttctacggtcacagatgcagccagacctgtcctcagtgtgtgcactcatcaggcccgtgccaccacatcacgggactctgtgattgcctcccaggattcacgggcgccctctgtaacgaagtttgcccaagcggacggtttggcaaaaactgcgccggaatctgcacttgtaccaacaacggaacctgcaatccaatcgaccggtcatgtcagtgttatcccggctggattggcagtgactgtagtcagccctgtccgcctgctcattggggaccaaattgcattcatacttgtaactgtcacaatggcgctttttgttctgcatatgatggagagtgtaaatgcacacccgggtggacaggcctgtactgcactcagagatgcccgctggggttctacgggaaggattgcgctctcatttgtcagtgtcagaatggcgccgattgcgaccatattagcggccaatgtacttgtagaaccgggtttatggggcgccattgtgagcagaaatgcccgagtggcacatacggatacggctgccgacagatctgcgattgcctcaataattcaacatgtgatcacatcaccgggacctgttattgcagtcctggctggaaaggggccaggtgtgaccaagccggggttatcatcgtgggcaatttgaatagcctcagtaggaccagcaccgccctccccgcggattcctatcagattggtgcaattgccggtatcattatcttggttctcgtggtgctctttctattggcattattcatcatctaccgtcataagcagaaggggaaagaatcttcgatgccagctgttacctacacccctgcaatgagagtcgttaatgccgactacactataagcgggactctcccacacagcaatggtggtaacgcaaacagccactacttcaccaatcctagctaccacacactgacgcagtgcgcaacctctccacacgtgaataatcgcgaccgaatgacagttactaaatcaaagaataaccagcttttcgtcaacctaaaaaacgtcaacccagggaagagaggtcccgtcggcgactgcaccgggacacttcccgccgattggaaacacggcgggtatttaaacgagttgggggcatttggactggatcgatcttatatgggcaagtcacttaaagacctgggcaaaaactctgaatacaattcttctaattgtagcctgtccagctctgaaaatccatatgccacaattaaagatccccctgtcctcattcccaagtctagtgaatgcgggtacgttgaaatgaaaagccccgctagaagagactcgccatacgctgagatcaataacagcacctccgccaatcgtaatgtttacgaagtggagccaaccgtcagcgtggtgcagggcgttttcagcaataatggccgtctgtctcaggatccctacgatctacctaaaaactctcacatcccctgccactacgacctgttacctgtaagagattcctcctcatcccccaaacaggaggatagcggcggatcatcttctaacagcagttcctcctcagaatag

SEQ ID NO: 124971 - DNA, 1704 bp, synthetic construct
  misc_feature 1..1704: note = Description of Artificial Sequence: Synthetic coding sequence
  source 1..1704: mol_type = other DNA
atggtcatttccctcaattcctgcctcagctttatctgtcttctgctctgccactggattggtaccgctagcccccttaacctggaggatccaaatgtgtgctcccattgggaatcttactccgtcacagtgcaggaaagctatcctcacccttttgaccaaatttattatacctcctgtaccgacattctcaactggttcaagtgtacgcgacatcgagtcagttaccgcaccgcatatcggcacggagagaagaccatgtaccgtcgcaaatcgcagtgttgccctggcttctacgagagtggcgaaatgtgcgtgccccactgcgccgataagtgtgtgcacgggcgatgcattgcccccaatacatgccagtgcgaaccaggttggggggggaccaattgcagctccgcctgcgacggagaccattgggggccgcactgcaccagtaggtgtcaatgtaagaacggagctctctgcaaccctatcacgggcgcctgccactgcgcagccggattcaggggctggcggtgcgaagatcgctgtgagcaggggacatatggcaatgattgccatcaaagatgtcagtgccaaaatggggccacttgtgaccacgtgacaggagagtgtagatgtcctcccgggtatactggcgctttttgcgaggacctatgccctcccgggaaacacggaccccagtgtgagcaaagatgtccgtgccagaacggcggggtgtgccaccacgtgactggtgagtgttcttgtccctcagggtggatgggcaccgtttgtgggcagccttgtcccgagggaagattcggaaagaattgttcgcaggaatgccagtgtcacaatggtgggacctgtgacgcggcaaccggtcaatgccattgttctcctgggtataccggtgaacgatgccaggatgaatgccctgtgggaacatatggggttttgtgcgccgagacttgccagtgcgtgaacggtggcaagtgctaccacgtgtctggcgcatgcttatgtgaggctggcttcgccggcgaaaggtgcgaagcgcgcctgtgtccagaaggcctctatgggattaaatgcgataagagatgtccctgccacttggagaacactcatagttgtcatccaatgagtggcgaatgcgcttgtaaaccaggatggtctggattgtattgtaacgagacatgctcccctggtttttatggggaggcttgtcagcagatatgctcttgtcaaaacggcgccgactgtgatagcgtcacaggtaagtgcacctgcgctcctgggtttaaaggcatcgactgctcaacaccatgcccactgggcacctatggaatcaactgctctagtcgctgtggatgcaagaacgacgccgtgtgcagcccggtggacggttcctgcacatgtaaagccggctggcatggggtggattgttccatcagatgcccctctggcacgtggggctttggctgcaatctaacttgtcaatgtcttaacgggggcgcttgcaacacactggacgggacctgcacttgcgcccccggatggagaggagagaagtgcgaactgccctgtcaggatgggacatacggcctgaattgcgcggagcgttgtgactgtagccatgcagacgggtgccaccctacgactgggcattgtcgatgtctgcccgggtggagcgggttgttttag

SEQ ID NO: 124972 - DNA, 3423 bp, synthetic construct
  misc_feature 1..3423: note = Description of Artificial Sequence: Synthetic coding sequence
  source 1..3423: mol_type = other DNA
atggtgatcagtctcaactcctgcttgtccttcatctgcctgctcctctgtcattggatcggaacggcaagccccttgaacttggaagacccaaacgtttgtagtcactgggaatcgtatagcgttacagttcaggaatcatacccacatccattcgaccaaatctattacacctcttgcactgacattttgaactggtttaagtgcacacggcatagagttagttataggaccgcatatagacacggcgagaaaaccatgtatagacggaagtctcagtgctgcccaggcttttatgaatccggcgagatgtgtgtcccccactgcgccgacaagtgcgttcatgggcgatgtattgctccgaacacctgtcagtgcgagcctgggtgggggggcaccaattgctcctcagcctgcgacggcgaccattgggggccccactgtacctctaggtgccagtgcaaaaatggtgccctctgtaacccgatcaccggggcttgtcattgcgcagcgggttttcgagggtggaggtgcgaggacagatgcgaacagggaacgtacggtaacgactgccatcagagatgtcaatgtcagaacggcgcgacatgtgatcacgtgactggagaatgccgatgcccccctggatacacaggagcattctgtgaagatctctgtccaccaggaaagcatggacctcaatgtgagcagagatgcccgtgtcagaatggcggggtatgtcatcatgtgaccggtgaatgttcctgccctagtggctggatgggcactgtttgcgggcagccttgtccagagggacgcttcggcaagaactgcagtcaggagtgccagtgccataacgggggcacatgtgacgcagccacagggcagtgtcattgcagccccggttataccggagagcgatgccaggacgagtgccctgtcgggacatatggggtgctgtgtgcagaaacctgccagtgcgtgaacggaggaaagtgttaccatgtgagcggagcctgcctgtgtgaggccgggttcgctggcgagagatgtgaggcaaggttatgcccggaaggactatatgggatcaagtgtgataaacgctgtccctgccacctggagaatacgcacagctgtcaccctatgtctggcgaatgcgcatgtaagccagggtggtccggcctctactgtaatgagacatgttcccccgggttttacggtgaagcctgccaacagatttgttcctgccaaaacggagccgactgcgattccgtcacgggcaaatgcacctgtgccccagggttcaaggggatcgattgcagcactccttgcccactgggtacgtacggaataaactgctcctctaggtgcggttgtaagaatgatgccgtttgcagtcccgttgacggcagttgtacttgcaaagccgggtggcacggcgtggactgctctataaggtgtccatctggaacgtggggattcggatgtaaccttacatgccagtgcttgaacgggggagcttgcaataccctggacggcacgtgtacatgcgctcctgggtggcgtggagaaaaatgtgaactgccctgtcaggacggcacctatggtctgaattgtgctgaaaggtgcgattgcagccacgccgacggctgccaccctaccacaggacattgtcgttgcctgcctggatggtctggtgtgcactgtgatagcgtttgcgctgagggccgttgggggcccaactgctcattgccgtgctactgcaagaacggcgcgagttgttcccccgacgatggcatttgcgagtgtgccccagggtttcgggggacgacttgccagcgtatctgctctcctggattctatggacatcgatgttctcagacttgcccccagtgcgtgcactcttctggcccttgtcatcacatcaccggtctctgtgattgtctgccaggtttcactggcgcactttgcaacgaagtgtgtccttcgggtcgcttcggcaaaaactgtgcaggcatttgcacgtgcactaacaatggaacatgtaatcctattgatagaagttgccagtgttacccaggctggatcggatctgactgctcccagccctgccctcctgcgcactggggccctaattgcatccacacctgtaactgccacaatggcgccttctgcagcgcttatgatggcgagtgtaagtgcactccaggctggaccgggctttactgcacccagagatgccccctgggcttctacggcaaggactgtgccctcatctgccagtgtcagaatggagctgactgcgatcacatctctgggcagtgcacttgtcggaccggatttatgggtagacactgcgagcagaaatgccctagcgggacatacgggtacggttgtcgccaaatatgcgactgcctgaacaattctacctgtgaccacattaccggtacttgctactgttccccaggttggaaaggggccaggtgcgaccaggctggcgtgatcatcgtgggcaatcttaattctctgagcaggaccagcactgctctgccagctgattcatatcagatcggggctatcgctggaattattattctggtgcttgtggtgctctttctgctggctctttttatcatctacaggcacaagcagaagggtaaggagagctctatgccggccgtgacttacacacctgctatgagggtagtgaacgcggactatactatcagcggcacccttccacatagcaacggaggaaacgcaaattcacactattttaccaacccatcctaccacacacttacacagtgcgcaacaagccctcatgtgaacaaccgggacagaatgacagtcacaaagtctaagaataatcagttattcgtcaatctaaagaatgtcaacccagggaagaggggacccgtcggtgactgtacaggaactcttcctgccgactggaagcacggaggatatctgaacgaactgggcgcctttggccttgataggtcctatatgggcaagagtttgaaggacctgggaaagaatagcgaatataacagctcaaattgttctttgagttcatcggaaaacccatatgcaaccatcaaagatcctcccgtgctgatccccaaatcttccgaatgcggctacgtggaaatgaagtctcctgcgcgaagagactctccttatgctgagatcaacaattcaacctccgcaaaccgcaacgtgtacgaagtggagcccacggtgagtgtcgtccaaggcgtattttcgaacaatggtcggctgtcacaggacccatatgacctgccaaaaaattcccatattccctgtcattacgatctcctccccgtgcgcgatagctcgagctcgcctaaacaggaagactctggggggagctcttctaacagttcaagcagcagtgagtag

SEQ ID NO: 124973 - DNA, 2910 bp, synthetic construct
  misc_feature 1..2910: note = Description of Artificial Sequence: Synthetic coding sequence
  source 1..2910: mol_type = other DNA
atgcacaccccctccatccgtagcataacccacgacgcgcagacttccagtactgggtcctctgccccaggcacagctctttgcaccgaagagtgtgtgcatggccgttgtgtatcgcccgacacctgccattgtgagccaggttggggcgggcctgactgttcttctggttgcgactcagaccactggggtcctcactgctccaataggtgtcagtgtcaaaatggagccctgtgtaatccaattacaggcgcttgtgtttgcgccgcagggttccgaggatggagatgcgaagagctctgcgcccccggcacccacggtaagggctgccagctcccttgccagtgtagacacggcgcgtcctgtgacccaagagcaggggaatgcctgtgtgctcctggttacacaggcgtgtactgtgaggagctttgtcctcctgggagtcatggagcacattgcgaactccgctgcccttgccagaatggtggaacctgtcaccacattacgggcgagtgtgcctgtccacccgggtggactggggccgtgtgcgcccaaccttgcccacccggtacatttgggcaaaattgcagccaagactgcccatgtcatcatggggggcagtgtgatcatgtaaccgggcagtgtcattgcaccgccgggtacatgggcgatagatgccaggaagagtgtccgttcggctctttcgggttccagtgctctcagcactgcgactgtcacaacggggggcagtgctctcccacaactggagcctgtgagtgcgagcccggttataaggggcctcgctgtcaggagcggttgtgccctgaaggactccatggtcctggatgtactctaccttgtccgtgcgatgccgacaacacaatctcatgccaccccgtgacgggtgcgtgcacctgtcaacccggctggtccggccaccattgtaatgagtcgtgcccggtcggatactacggcgacgggtgtcaactgccatgcacatgtcagaatggcgctgattgtcactcgatcaccggtggatgtacatgtgctcccggattcatgggcgaggtgtgtgcagtctcctgtgcagccggcacgtatggccccaactgttccagcatctgctcatgtaacaacggtggcacgtgcagtcccgtcgacgggtcatgcacttgtaaggaaggttggcagggcctggattgcacgctcccttgcccatcagggacatggggactgaattgtaatgagagttgtacgtgcgctaatggggccgcctgctccccaatcgacggctcttgcagctgtaccccaggttggctgggtgatacatgtgaattaccttgccctgatggcacatttggcctaaattgcagtgagcactgtgattgctctcacgcggatggctgcgatccagttacaggacactgctgttgcctggccggttggacggggattcgctgtgactccacctgtcctcccggcaggtgggggccaaattgttccgttagttgttcttgtgagaacggaggcagttgctcgcctgaagatggcagctgtgagtgcgcccccgggttccggggcccgctttgccagagaatctgtccacctggcttttacggtcatggctgcgctcagccatgccctctctgcgtccacagcagcagaccttgccaccacatctccggcatctgtgaatgcctgccaggattttcaggcgcactatgtaatcaggtatgtgcagggggttacttcggacaggattgcgcccagctgtgtagctgcgctaataacgggacttgtagtcctattgatggttcatgccagtgttttcccggatggattgggaaggattgcagccaggcttgtccccccgggttctgggggcccgcttgctttcacgcctgctcctgccataacggcgcctcctgttctgcagaggacggagcctgtcactgcacccctggctggacaggccttttttgcacccagagatgccctgcagcattctttggaaaggattgtggaagagtatgtcagtgccagaacggggcttcctgtgatcatatctccgggaaatgtacctgcagaacggggtttaccggccagcactgcgagcaaagatgcgctccagggacttttggatacggatgccagcaactttgtgagtgtatgaacaatagcacatgcgatcatgttaccgggacttgttactgttcccccggctttaagggcatccgctgcgatcaggcggctctcatgatggaggaacttaacccttacacaaagatcagtcccgcactgggcgcagagaggcactctgttggagccgttacaggaattatgctgctgctcttcctgatagtggtgctgctgggcctgttcgcatggcataggagacgccaaaaagagaagggcagggaccttgctccccgggtcagctatactcccgctatgagaatgactagcacagattatagcctgtctggagcttgcggcatggaccgccgccaaaacacttacatcatggataagggatttaaggactatatgaaagagtcggtgtgcagcagctcaacatgcagtctgaatagctctgaaaacccctatgcaaccatcaaagatcctccaattcttacatgtaagcttcctgaatcctcctacgtggagatgaagtctccagtgcacatgggttccccttataccgatgtgccatctctcagtacctcaaacaagaatatatacgaagtcgagccgactgtatcagttgtccaagagggatgtgggcacaatagttcatacattcagaatgcatacgatctgcccagaaattctcatatccctggacactacgatctgctgccggtgcgacagtctcccgctaacggaccttctcaagataaacaatcctag

SEQ ID NO: 124974 - DNA, 2628 bp, synthetic construct
  misc_feature 1..2628: note = Description of Artificial Sequence: Synthetic coding sequence
  source 1..2628: mol_type = other DNA
atggttttgagcctgactggcctcatcgcattcagcttcctccaggcaactctggctctcaatccagaagatcctaatgtttgttcacattgggagtcttatgccgtgacagtccaggagagctacgcacatcccttcgatcagatctactacaccaggtgtacagacatcctaaattggtttaaatgtacccgccatagaattagttataagactgcctatcgtcggggactccggactatgtatagaagaaggtcacaatgctgtcctggttactatgagtccggggacttttgtatccccctctgcaccgaagagtgcgtacacgggcgctgcgtttcacccgatacctgccattgtgagcccggttggggcggacctgattgctcttccgggtgcgactcagaccactggggcccccattgcagcaatagatgccagtgccagaatggtgctctctgcaatcccatcacgggggcgtgtgtctgtgccgcaggtttccgcggatggcgatgcgaggaactgtgcgcacccgggacccatggtaaggggtgtcagctcccctgtcagtgtcggcatggcgcatcctgcgaccctcgcgcaggggaatgcctgtgtgctcctggatataccggcgtatattgcgaagaactctgtccccccggcagtcatggagcccactgtgaactccgctgtccctgtcagaatgggggaacttgccatcatatcactggagaatgcgcctgtcctccagggtggactggagccgtctgtgcgcagccttgccccccagggacgttcgggcagaattgttcccaagactgtccctgccatcacggcggacagtgcgatcatgtaaccggccagtgccactgcactgcaggctacatgggagacagatgccaggaggagtgcccgtttggctccttcggctttcagtgcagtcagcactgtgactgccacaatgggggccagtgttcaccaacaacaggcgcgtgtgaatgcgaacccggctataagggtcctagatgccaggaaagactatgccccgagggactccatggccccggctgcacgttaccatgcccatgcgacgcggacaatacgatttcctgccacccagtgactggcgcctgtacgtgtcagccaggctggagtggccatcattgtaatgaaagctgccctgtgggatattatggagatggatgccagctgccctgcacttgccagaacggagccgactgccactccatcaccggggggtgcacatgcgccccaggcttcatgggcgaggtttgcgccgtaagttgcgcagccggcacttacggccctaactgcagttcaatttgttcttgtaacaatggaggcacatgttcaccagtcgacggcagctgtacatgtaaagaaggttggcagggcctggactgtaccctaccctgtccctctggcacttgggggcttaattgcaatgaaagctgtacttgcgccaatggggcagcttgctctcctatagatggcagctgtagctgtacacctgggtggctcggcgacacctgtgaactgccttgtcccgatggaacttttggactaaactgtagcgagcactgtgattgctcccatgcggatggttgtgatcccgtaactgggcactgctgctgtttggccggctggactgggattaggtgtgatagcacatgcccacctggccgatggggacctaattgttcagttagctgcagttgtgagaacggcggctcttgttccccagaagacggttcatgcgaatgcgcccctggattccgggggcccctctgccagaggatctgccccccaggcttctacggtcatggatgcgcccaaccatgccctctgtgtgtgcactcttcacggccatgccaccacatatcaggaatctgcgaatgtctccccggcttctcaggggctctgtgcaatcaggtgtgtgctggtgggtatttcggacaagattgtgcacagctgtgcagttgcgctaataacggtacatgctccccaatagacgggagctgtcagtgctttccaggatggatcggtaaagactgttcacaggcatgtccgccaggtttctggggacccgcatgcttccacgcatgcagctgccataatggagctagttgttcagcagaggacggcgcatgccactgtaccccgggctggaccgggctcttctgtactcaaagaaaacctcatcttctggcgagccagccactccgaatcccgtgctgtggcttgctcgctacagtgggtatcgtacagaccagccgcgagggagggatgcaggccgcccctgggcttgtggttcctgatagctgtccgaccagaactgaggagctgtgccggggatcgtcaaggccagactggattcagggaattgacaagcctaaggtactcgaagggcagggatgcaaagcggctcaacagcactttctcggccgcactgtgggggcatacgctagtgttcgcatggcacccgctgtcacaacctccgtggctagtgcccctgcagctcaggctagccctgggaatacagtgtctagagacgtaccgcaggagccactcgccatgggagtatcttcatacgtcagcgcgtag

SEQ ID NO: 124975 - DNA, 414 bp, synthetic construct
  misc_feature 1..414: note = Description of Artificial Sequence: Synthetic coding sequence
  source 1..414: mol_type = other DNA
atgatggaagagctaaacccgtacaccaagatcagcccagcgctgggggcagaaaggcatagcgtgggcgcagtcaccggcattatgctgctgctcttcctgatagtggtgctgctcggcctgtttgcctggcacaggcgtcgtcagaaggagaagggacgcgatctggctccacgtgtttcctacacccctgccatgcgaatgacttctactgattacagcttaagtgcaagtacaaccccttggtggcccgttatggagcatctagctagaccatttagccaacgtccaagaacacagctttctaacaagtcgctggacagagacacggctgggtggaccccttattcgtatgtaaatgtgttggatcagtgtcccggagggcaagtccccgctagaggtctgctccattag

SEQ ID NO: 124976 - DNA, 2910 bp, synthetic construct
  misc_feature 1..2910: note = Description of Artificial Sequence: Synthetic coding sequence
  source 1..2910: mol_type = other DNA
atgcacacccctagcattcggtctatcacccatgacgcccagacctcttctactggctcaagcgctcctgggaccgcgctatgcaccgaagaatgcgtacacggtcgttgtgtttccccagacacatgtcattgcgagcccggttggggtggccccgactgttctagcggctgcgactcagaccattggggaccccattgtagcaacagatgtcagtgccagaacggggctctctgtaatcccattacgggagcatgtgtgtgtgccgctgggttccggggatggcgttgtgaagaactgtgcgctccaggaactcatggaaagggatgccagctgccatgccagtgtagacatggagcctcatgcgatcctcgagccggtgagtgcttgtgtgctccaggatatactggcgtttactgcgaagaattgtgtccccccggtagccatggcgctcactgtgagctgcgttgtccatgtcagaatggaggaacatgccaccatattactggagagtgcgcctgtcctcccggctggaccggggccgtgtgtgcacagccttgccctcccgggacattcggccagaattgcagccaggactgtccatgccaccacgggggccagtgtgaccacgtgacaggtcagtgtcactgcaccgcaggttatatgggtgatcggtgtcaggaagaatgcccctttggctcctttggattccaatgcagtcagcattgtgactgccacaacggtggccaatgctcaccaactactggagcttgtgaatgtgagcctggctataagggtccccggtgtcaggagcggttgtgccccgaaggactgcatgggcctggctgtacactgccatgcccgtgtgatgccgacaacacaatttcttgccaccccgtgacgggcgcctgtacctgtcaacctggatggtctgggcatcactgcaacgaatcttgccccgtcggctattacggggatggatgccaactgccatgcacctgccagaatggagccgattgccactcaatcactggcgggtgtacttgcgcccccggtttcatgggagaggtgtgtgccgtctcatgtgctgctggcacctacggcccaaattgctcctccatctgttcttgtaacaatggaggtacttgctctccagtcgatggatcgtgcacttgtaaggagggatggcagggtctcgactgtacccttccgtgtccaagcggtacgtggggattgaactgcaatgaatcctgcacatgtgctaacggtgcagcctgcagtccgattgacggatcttgctcatgtaccccaggttggttaggagatacatgcgaactcccctgcccagacggaaccttcggtcttaattgcagcgagcactgtgactgctcccacgctgatggatgcgatcctgttactggtcactgctgttgtctggctggttggactgggatcaggtgcgattcgacatgtccaccgggacgttggggtccgaactgtagtgtcagctgtagctgcgagaacggtggcagttgtagccctgaggacgggtcatgtgagtgcgcccccggatttcgcggacctttatgccagaggatctgtccacctggattttatggacatggctgcgcccagccctgtcctctgtgtgtccactcctcccgtccgtgtcaccatatcagcgggatttgcgagtgtctccccggatttagcggagcgctgtgcaatcaggtctgtgccggtgggtattttggccaggactgtgctcagctgtgtagctgcgccaataatggaacctgtagccccattgatggctcctgtcagtgttttcccggctggattgggaaagactgcagtcaagcctgccctccagggttctggggaccagcctgctttcacgcctgcagttgtcacaacggcgcttcttgctccgccgaagacggagcttgccattgtacacctggctggaccgggcttttttgtacccagagatgtcctgctgccttctttggaaaggattgtgggcgggtctgtcagtgtcagaacggcgcatcatgcgatcatataagcggaaagtgcacttgcaggaccggcttcacgggtcagcactgcgagcagcgatgcgcgcctggtaccttcggctacggctgccagcagctttgtgagtgcatgaacaatagcacgtgcgatcatgtaaccggaacctgttactgtagcccaggcttcaaaggaatccgttgcgatcaagctgccctcatgatggaagagctgaacccctatacaaagatcagccccgctctgggagccgaacgtcactccgtgggcgccgtgacagggatcatgttactgctcttcctgatcgtggtgttgctcggcctcttcgcttggcaccggcgccgccagaaagaaaaggggagggatctcgccccaagggtcagctatacccccgcaatgcgcatgactagcacagactattccttgagcggggcctgtgggatggatcggagacaaaacacgtacatcatggacaaggggttcaaggactatatgaaggaaagcgtatgttcctcttccacgtgctccttaaattcatccgagaatccctatgctaccataaaagaccctccaattctcacctgtaaactgcccgagagctcatacgtcgagatgaagtcgccggtgcacatggggtccccctacaccgatgtcccttcgctcagtactagtaataagaatatatatgaagtcgagccaaccgtgagcgtcgtgcaggaagggtgtggtcacaattctagctacatccagaatgcgtatgatttgccaaggaattcccatatccctgggcattatgacctccttcctgtcagacagtctcccgccaacggtccgtctcaggacaagcaatcatag

SEQ ID NO: 124977 - DNA, 3135 bp, synthetic construct
  misc_feature 1..3135: note = Description of Artificial Sequence: Synthetic coding sequence
  source 1..3135: mol_type = other DNA
atggttctttccctgacgggactaattgccttctcttttctgcaggcaactctggcactgaaccctgaagacccgaacgtgtgttctcattgggagtcctacgcggtgacggtacaagaatcttatgcccacccatttgatcagatttattatacaagatgtaccgacatccttaactggttcaagtgtacccgccaccggatctcctacaagaccgcataccggcgcgggctccgaactatgtaccggcggcggtctcagtgctgccctggatactacgagagcggcgacttctgcattcctctatgtacggaggagtgcgtccatggacgttgtgtctcccctgatacatgtcactgtgagcctgggtgggggggaccagattgtagcagcggttgcgattcagaccactggggccctcactgctctaaccgctgccagtgtcagaatggcgcgctttgcaatccgatcactggtgcttgcgtatgcgccgccggctttcgggggtggagatgcgaggagctgtgcgcacccggcactcatggcaagggctgccagctgccttgtcagtgtcgccacggagcctcctgtgatccacgagctggagagtgtctttgtgctcctggctacactggggtgtactgcgaagaattgtgtccccctggatcacacggcgcccattgtgagctgaggtgtccttgccaaaacggtgggacttgtcatcatatcaccggggagtgcgcttgcccccccggttggactggcgcggtgtgcgcccagccttgccctccaggaaccttcggacagaactgttcacaggactgtccctgccaccacgggggccaatgcgaccatgttaccggacagtgccactgtactgcaggctatatgggggaccggtgtcaggaagagtgcccattcggttcctttggcttccagtgcagccagcactgcgattgccacaacgggggccagtgctcacctaccacgggagcctgtgaatgtgagcctggatacaagggtccgaggtgtcaggagaggctatgccctgaaggactgcatggcccgggctgcaccttgccatgcccatgcgacgccgacaacacaatcagttgtcaccccgtcactggagcatgcacatgccagccagggtggagcggccaccattgcaacgaatcttgccctgtggggtattacggcgacggctgtcagctcccgtgtacttgtcaaaatggagctgattgtcattctattaccggcggctgcacttgcgcgcccggtttcatgggcgaagtgtgcgcagtgtcctgtgcagctggcacttatgggccaaactgctcaagcatctgttcatgtaacaacggtgggacgtgtagtcctgtggacggtagctgtacttgcaaggaaggttggcagggtttagattgcactctgccttgccccagtgggacatgggggctgaactgcaacgagtcttgtacatgtgccaacggagccgcttgcagccctatcgacggctcctgcagttgcactcctggctggttgggagatacctgcgagctcccttgtcccgacggcacctttgggttgaactgttcagaacattgtgactgctctcatgccgatgggtgtgaccccgtgaccggtcattgttgttgtcttgcaggatggactgggattcgctgcgatagtacatgccctccaggccgctggggccctaactgtagtgtgtcctgctcctgtgagaatggcggttcttgcagcccggaggatgggtcatgcgagtgtgcacccggctttcgcggcccactgtgccaaagaatttgtccccccgggttttatgggcacgggtgcgcccagccgtgtcccctctgcgtacactcatccaggccatgccaccacatcagcggtatctgtgaatgcctgcccggtttctctggggccttatgcaatcaggtttgtgcgggggggtactttggacaggactgcgctcagctgtgttcttgtgcaaacaacggcacctgctcccccatcgacgggtcgtgtcagtgcttcccgggctggatcggtaaagattgctctcaggcctgtccaccaggcttctggggtcctgcttgctttcatgcctgcagctgccacaatggagcgagctgctcagccgaggatggcgcctgtcactgtactcccggttggactggactcttttgcacgcagcggtgtcctgctgcattttttggcaaggattgcggaagggtctgtcagtgtcagaacggggcctcttgtgaccatatcagtggaaagtgtacgtgtcggactggcttcaccggacagcactgcgaacagaggtgcgcccccggtacttttggctatggttgccaacagttatgcgagtgtatgaataactcgacttgcgaccacgtgaccggaacttgctactgctcgcctggcttcaaagggattagatgcgaccaggctgccctaatgatggaagaacttaacccttacaccaagattagccccgctctcggggccgagcgccacagcgtgggcgccgtgacggggattatgcttttactgtttctgattgtggtattactgggtctgtttgcatggcatcgccggcgtcagaaggaaaagggaagggatcttgcccctagggtctcctatacccccgcaatgcgcatgaccagcactgattattccctgagtggcgcttgcggaatggacagacgccagaatacatacattatggataagggtttcaaggactatatgaaggagtctgtgtgctcatcctcaacatgttccttgaacagctctgagaatccttatgcaacaatcaaggatccaccaatactaacttgcaagctacccgagtcgagctacgtggaaatgaaaagtcctgtacatatgggttctccctacaccgacgtaccaagcttgtcaaccagtaacaagaacatctatgaggtagagccaactgtgtcagttgtgcaagaaggatgcggccataattccagctacatacaaaacgcctacgatctgcccagaaattctcacattccgggccactatgaccttctcccagtgcgtcagtctccagcaaatggcccatcccaggacaaacagagctag

SEQ ID NO: 124978 - DNA, 3135 bp, synthetic construct
  misc_feature 1..3135: note = Description of Artificial Sequence: Synthetic coding sequence
  source 1..3135: mol_type = other DNA
atggtcctgtccctgacaggtttgatagccttcagcttccttcaggcgaccctcgctttgaatcccgaggaccccaatgtctgcagccactgggagtcatatgccgtgaccgtgcaggagtcttacgctcatccttttgaccagatttactacacacggtgtacagatattttaaactggtttaagtgtactcggcaccggatcagctataaaaccgcataccgcagaggacttcgcactatgtatcgaaggagaagtcagtgctgtcctgggtattacgaatccggggatttttgcattcccctgtgtactgaggaatgcgtacatggacgatgtgtttctcctgacacatgtcattgtgaacctggctggggcggtcctgattgtagcagcgggtgtgatagcgaccactggggccctcattgtagtaaccgttgccagtgtcagaacggcgcgctctgtaatccgatcactggggcttgtgtgtgcgcagccggttttcgcgggtggaggtgtgaggaactttgtgcaccaggtacgcacggaaaggggtgccagttgccctgtcaatgcaggcatggtgctagttgcgaccctagggccggggagtgtctgtgtgcaccgggttacacaggggtatactgtgaagagctgtgtcctcccggttcacatggagcccattgcgaactcagatgtccctgtcagaacggaggcacatgtcaccacattaccggggagtgcgcctgccctcctggatggacgggcgccgtctgcgcccagccctgtcctcccggcacttttggccaaaactgctcccaggattgcccctgccaccacggggggcagtgtgaccacgtgactggccagtgccactgtacagcgggttacatgggagaccgatgtcaggaggagtgccccttcggctcattcggatttcagtgctctcaacattgcgactgccacaatggcggccagtgtagccccacaacaggagcctgcgagtgcgagcctggatacaagggtccgagatgtcaggagaggctttgtcctgaaggactccacggccctggatgcacattaccgtgtccttgcgacgccgacaacacaatcagttgtcaccctgtgaccggtgcctgcacttgccagcctggttggtccgggcatcattgtaacgagtcatgtccagtgggttactacggagacggctgtcagctgccgtgtacttgccagaacggagctgattgtcattctatcaccggcggatgtacatgcgcgccgggcttcatgggcgaagtgtgcgccgtgtcctgtgccgcaggaacctacggcccgaactgctcttccatttgttcctgcaacaatggcggaacgtgtagccccgtggacgggagctgtacttgtaaagagggttggcaaggtctggactgtaccctgccatgtccgagcgggacttggggactgaattgcaacgaaagctgtacttgtgccaatggggctgcatgttcacctatagacgggagctgctcctgtacaccgggatggctaggtgatacgtgcgaacttccatgccccgatggaacatttgggctgaattgttcggagcactgtgactgttctcatgccgacggatgcgacccggttactggccactgttgctgcctggccggatggaccggtatccgctgtgattccacgtgtcctccaggcagatggggccccaactgttcggtcagctgtagttgcgaaaacggtggtagctgttcaccagaggacggctcatgtgagtgcgccccaggcttccgcgggccactgtgtcaacgcatctgccctccaggcttttacggacacgggtgtgcccagccatgtcctttgtgtgtgcattcatcccggccctgccaccacatctctggcatctgtgagtgcctccctggcttctcgggggcgctttgtaatcaggtgtgtgccgggggctatttcggtcaggactgcgctcaactgtgttcctgcgccaacaatggaacatgctctcccattgatgggtcgtgtcagtgcttccctgggtggattgggaaagattgcagccaggcatgcccccccgggttttggggacccgcttgcttccacgcttgtagttgccataatggagcgtcctgttcggcagaggacggtgcttgccactgcacgccagggtggaccggactcttctgtacccagaggtgcccagcagcgttctttggtaaagattgtggccgcgtatgtcagtgccagaacggggctagttgtgaccatatctcagggaagtgtacctgtaggactgggttcaccggtcagcattgcgagcaaaggtgtgctcctgggacatttgggtacggctgccagcagctgtgtgaatgcatgaacaactcgacatgcgaccacgtcactggaacctgctactgttcacccggctttaaaggaatccgttgtgatcaggccgccctgatgatggaggagctcaacccctatacaaagattagcccggccctgggcgctgaaagacattctgtgggggccgttaccggcatcatgctgctgctgttcctgatcgttgtgctgctggggctctttgcctggcaccgtaggagacaaaaggaaaagggcagagatctggctcctagggtctcctatacccctgctatgcgaatgacctctactgattactcactgagtggtgcctgcgggatggatagaagacagaatacatacatcatggataaggggtttaaggattatatgaaggagagtgtgtgttcctcatctacatgtagcttgaacagcagcgagaacccctacgcgacgattaaagatccgcccatcctgacgtgtaaactgccagagtcgtcgtatgttgagatgaaatcccctgttcacatgggctccccttacacggatgtgccgtctctgtccacttccaataaaaatatctacgaagtcgagcccacggtctctgtggtgcaggaagggtgcggacacaattcctcatatattcagaatgcttatgatctgcctcggaactcccacatcccaggccattacgaccttctccccgttaggcagtcacccgctaacggaccgtcacaggataagcagagctag

SEQ ID NO: 124979 - DNA, 3690 bp, synthetic construct
  misc_feature 1..3690: note = Description of Artificial Sequence: Synthetic coding sequence
  source 1..3690: mol_type = other DNA
atgggtgcatcaagggacaggggtcttgcggcactttggtgcctcgggctgctagggggtctcgcacgggtggcgggcacacactaccgctatctctggcgaggctgctacccatgtcatttggggcaggcgggctaccccgtgtccgccggggatcaacggcctgatgtcgatgagtgtcgaacgcacaatggaggttgtcagcatagatgcgtgaacacacctggcagctatttatgtgaatgcaagccgggcttccgcctgcatacagattcacgcacctgcctggctataaatagttgcgccctcgggaacggagggtgtcagcatcattgcgtgcagctgactataaccagacaccgctgtcagtgtagacctggctttcaactgcaggaagacgggcggcactgcgttcgacgatctccttgtgctaataggaacggcagttgcatgcatcggtgtcaggttgtcaggggcctcgcacgctgcgaatgccacgtcgggtatcagctcgcagctgatggaaaagcgtgcgaggacgttgatgagtgcgccgcaggactcgcccaatgtgcacatggctgtcttaacactcaaggatctttcaaatgcgtctgtcatgctggctacgaacttggagctgatggtcggcaatgctaccgcatcgagatggagatcgtcaactcatgcgaggcaaacaatggcggctgttcccatggttgttcccacacctctgcgggacccctttgtacctgccccagaggatatgaacttgacaccgaccagagaacctgcatcgatgtggacgactgtgcggactccccctgctgccagcaagtgtgtaccaacaatccaggggggtatgagtgtggctgctatgccggataccggctgagcgccgatggttgcggctgtgaagatgtggacgagtgcgcgtcttctaggggcggctgtgaacatcattgtactaacctcgcggggtcatttcagtgttcttgcgaagccggttacaggttacacgaagaccgtcgcgggtgctcacctcttgaagaaccgatggtggacctcgacggcgagctaccttttgttaggcctctgccacatatagctgtactgcaggacgagctcccacagttgtttcaggacgatgacgttggcgcggatgaggaggaggccgaattgcgcggagagcacactcttactgaaaaatttgtctgtctagatgattcattcgggcacgattgcagtttgacatgcgatgattgtcggaacgggggcacctgtttactggggttagacggctgtgactgtcctgaagggtggacaggcctgatctgcaatgaaacctgccccccagatacttttggtaaaaattgttcattttcctgcagttgtcagaacggcggcacttgcgatagcgtgaccggtgcatgccgctgtccccccggggtgtcggggacaaattgcgaggacggatgccctaaaggttactatgggaagcactgtaggaaaaagtgtaactgtgccaatagggggagatgccatcgcctgtatggggcctgtctatgcgaccctggattgtatggtcggttttgtcatctcacttgcccgccctgggcgttcggccccgggtgctcagaagagtgccagtgcgtgcagccgcatacccagagctgtgacaaaagggacggcagctgttcatgtaaagctggcttccggggagagcggtgtcaggccgaatgtgaattaggctatttcggcccgggatgttggcaggcctgcacatgcccagtcggggtagcatgcgattccgtaagtggagaatgcggcaagcgctgccctgcagggtttcagggcgaggactgtggccaggaatgccccgtcggaacgttcggagtgaattgctcttcgtcttgttcctgtggaggtgcaccctgccatggagtgaccggccagtgtcgttgcccaccgggccgaaccggtgaagactgcgaggcagattgccccgaaggtagatgggggcttggttgtcaagagatatgcccagcttgtcagcatgcggcccggtgcgatcctgagaccggcgcttgcctatgtctgcctgggttcgtcgggagcagatgccaggatgtctgtccggcggggtggtatggtccctcatgtcagacacgatgttcttgcgcgaatgacggacactgccacccagccaccggtcactgctcctgcgctccagggtggactggtttctcctgtcagagagcttgtgacaccggacactggggccccgattgctctcatccttgcaattgttccgctggacacggctcttgcgatgccatctccgggttatgtctctgtgaggcaggctacgtagggccgaggtgcgagcagcagtgtccccagggccatttcggcccaggatgcgagcagagatgtcaatgtcaacacggagcggcttgtgatcatgttagtggcgcatgcacctgtcccgccggatggagagggactttctgtgaacatgcctgcccagctggattttttggacttgactgcaggagtgcttgtaactgtactgcaggggccgcatgtgacgctgtgaatggatcctgtttgtgtccagcagggcggcgaggaccaagatgcgccgaaaagtgcctgccgcgtgacgtcagggcaggctgccggcattcaggcggctgcctgaacggcggcctctgtgatcctcacaccggaagatgcctgtgtcctgccggctggacaggcgataaatgtcagtctccctgcctgaggggctggtttggcgaggcatgtgcacagcggtgttcttgccccccgggcgctgcatgccaccatgtaactggtgcttgccgttgtccacccggtttcaccggctcaggatgtgaacaggggtgccctcctggcaggtacggcccggggtgcgagcagttgtgcggttgtcttaatggcgggtcttgcgacgccgcaaccggtgcgtgccgctgcccaacaggctttctggggaccgattgtaacttgacatgccctcagggacgcttcggtcctaattgcacacatgtgtgtgggtgtggccaaggcgcagcgtgtgacccggtgacagggacctgcctttgtccacccgggagagctggggtacggtgtgagagaggttgtcctcagaatcgttttggagtgggctgtgagcatacctgcagctgcaggaatggcggtctttgccatgcgagcaacgggagttgctcatgtgggctcggctggaccggacgacactgtgaacttgcttgtccgccagggagatacggggccgcctgccacctggaatgtagctgccacaataattctacatgtgaacccgccacggggacatgtcgctgcggtcctggcttctacggccaggcttgcgagcatcgccggagtggggccacttgcaacctggactgcaggcgtggtcagttcggtccttcgtgcacattgcactgtgattgtggggggggggccgactgtgaccctgtgtcaggtcagtgtcattgcgtagacgggtacatgggacccacttgcagggagggtgggccactgaggttaccagaaaatcccagtctggcgcagggctcggctggaactctgccggcatcttctcggccaacaagccgcagcggaggtccggcacgtcattag

SEQ ID NO: 124980 - DNA, 4626 bp, synthetic construct
  misc_feature 1..4626: note = Description of Artificial Sequence: Synthetic coding sequence
  source 1..4626: mol_type = other DNA
atgtcctttttggaggaagcccgggcagctggtagagctgttgttctggccttagtcctcctgctgttaccagcagtccctgtgggcgctagtgttcctcctcggcccctgttgcctctccagccaggaatgcctcacgtgtgtgcagagcaggagctgactttggtgggaagacggcagccgtgtgtgcaagccctgagccataccgtgcccgtttggaaggccggctgcggttggcaggcttggtgcgtgggccatgagcggcggaccgtatactatatgggctaccggcaggtgtataccacagaggcgcgaacagtgctcaggtgttgccggggttggatgcagcagcccgacgaggagggctgcctctcagctgagtgcagcgcatcactgtgtttccatggcggacgctgcgttcctggctctgcccaaccatgccattgtcctccggggtttcagggtccacgctgtcagtacgatgttgatgaatgtaggacgcacaatgggggatgtcaacatcggtgtgtcaacaccccaggatcctatttatgtgaatgtaagcccgggttccgactacacactgacagccgaacctgtttggcgattaactcttgtgctctggggaatggcgggtgccaacatcactgtgtccagcttaccattacccgccatcggtgccaatgccggccaggattccagctacaggaggatggtcggcattgcgtgcgtaggtcaccctgcgccaaccgcaatggtagttgcatgcaccggtgccaagtcgtgcgaggcttagcgagatgtgagtgtcatgtgggataccagcttgctgcagacggcaaagcatgtgaagatgtggacgagtgtgctgcagggctcgcccaatgtgcgcacggctgtcttaatacgcagggcagttttaaatgtgtctgtcatgcaggttatgagttgggagccgacggacgacagtgttaccggatagagatggaaatcgtcaactcctgtgaggccaacaatgggggatgtagccatgggtgcagccacacatcggctgggcctctgtgtacttgcccacggggttatgagcttgatactgaccagcgcacttgcatcgatgtggatgactgtgccgactccccatgttgtcagcaggtgtgcacgaacaatcctggcgggtatgaatgcgggtgctacgcagggtaccgcttgagtgcagacggctgcggctgtgaggatgtagacgagtgcgcctctagtcgcgggggatgtgagcatcactgcacgaatctggccggttcctttcaatgtagttgcgaggccggataccgcctgcacgaggaccgcagggggtgttcaccattggaagagccaatggtggatctagacggcgagctgcctttcgtgaggcctctaccgcacatagcggtgcttcaagatgaacttccccaactattccaggatgatgacgtaggtgccgatgaagaagaggctgagttaagaggcgagcatactcttacagagaagttcgtctgtcttgatgatagctttggccacgactgtagcctgacctgcgacgattgccggaacggtggaacatgcctgttggggctggacggctgcgattgtcctgagggctggacggggctcatctgcaacgaaacatgtccccctgacaccttcggaaagaactgcagcttctcgtgcagctgccaaaatggtggaacatgtgactccgtgacaggcgcatgtcggtgcccacctggtgtatcagggacgaactgtgaagacggttgtcccaagggctattatggcaagcattgccgaaaaaaatgcaattgcgcgaacagaggacgctgccataggctatacggagcatgcttatgcgatccaggtctgtatggacgattctgtcatctgacctgccccccttgggccttcggcccagggtgcagcgaggaatgccaatgcgtacagccccacacgcagtcctgcgataaacgggacggatcctgctcttgcaaggccggatttcgcggtgaacggtgtcaggccgagtgcgaattggggtacttcggccctggttgttggcaggcttgcacatgtccggtcggcgtcgcatgcgattccgtatctggagaatgcgggaaacggtgccccgctgggttccaaggagaagactgcgggcaggagtgtccggtcggaacatttggagtcaattgctcatctagttgctcttgtgggggagcgccctgtcatggcgtcaccgggcagtgtaggtgtcccccaggtcgtaccggcgaggactgcgaagcagattgccctgagggacggtggggcttagggtgccaggagatttgtccagcttgtcaacacgcggcccgatgcgatccagagacgggcgcctgcctgtgtctgccaggctttgttggctctagatgtcaagatgtttgtcctgcgggctggtatggcccctcttgccagactcggtgctcttgcgctaatgacggacattgtcaccctgctacaggccactgctcttgtgccccggggtggacggggttctcctgtcagcgcgcttgtgatacaggacactggggacccgattgctcccatccatgcaactgttctgcaggacacggctcctgtgacgccatttctgggctgtgcttgtgtgaagcaggatatgtcggcccccggtgcgagcaacagtgtccccaaggccattttggccccggctgtgaacagcgctgccagtgccaacacggagcagcctgcgaccatgtatctggagcatgcacttgccctgcggggtggcgggggacattctgtgagcatgcatgccctgcgggtttttttggtctcgattgcagatcagcttgcaactgtaccgcaggcgccgcttgtgacgccgtcaatggctcttgtctgtgccctgcagggcggagaggcccgagatgtgcagagacgtgtccggcgcacacctacggtcacaattgtagccaagcatgcgcttgtttcaatggagccagctgcgaccccgtgcacggccagtgccattgtgcccccggctggatggggccgtcctgtctacaggcgtgccccgccggactgtacggggacaactgtcgacacagctgcctatgtcagaacggtggcacatgtgacccggtatctggacactgcgcctgtcctgaaggttgggccggactggcctgtgaaaaggaatgtctcccgcgcgacgtacgcgccggctgtcgccactcgggaggctgtctaaatggagggctgtgtgaccctcatactggtaggtgcctgtgccctgccggatggacgggcgataaatgccagtcaccttgcctccgggggtggtttggggaagcctgcgcccaacgctgttcctgccccccgggcgcagcctgccaccatgttaccggcgcgtgccgttgcccacccggctttactggaagtggatgtgagcaggcctgtcctcccggatcatttggggaagactgcgcccagatgtgtcagtgtccaggcgagaatcctgcctgtcaccccgcaacaggtacttgctcttgcgctgcgggctaccacggtccttcttgtcagcagagatgtccccccggacgctatggccctggctgcgaacagctttgcggatgcctgaacgggggatcttgtgatgccgctacaggggcctgtcggtgcccaactgggtttttggggacagactgcaacctgacatgtccacagggccgctttggacctaattgcactcacgtctgcgggtgcggacagggcgccgcatgtgatcccgtgacaggaacgtgcctgtgcccccccgggcgcgccggtgtcaggtgcgagagggggtgccctcaaaatagattcggcgtaggttgcgaacatacgtgcagctgtcgaaatggaggactgtgccacgcgtccaacgggtcctgcagttgtgggcttggatggacaggcaggcactgtgaactggcgtgtcccccgggaaggtatggggcagcatgccatctcgagtgctcttgccataacaacagtacctgtgaaccagcaaccggcacctgcaggtgcggacccggcttttacgggcaggcgtgtgagcatccttgccctccaggttttcatggggccggttgccaggggttatgttggtgtcagcacggcgccccctgcgaccctatctctgggcgttgtctctgtccagcgggcttccacgggcacttctgtgagagaggctgtgagcccggcagcttcggcgaaggctgtcaccagcgatgtgattgtgatggtggcgccccatgcgatcctgttaccggcttatgcctgtgccctcctggtaggagtggagccacatgcaacctggactgccgacgggggcagttcgggccatcctgcacactgcactgtgactgcggagggggcgccgattgtgatccagttagcgggcaatgccactgtgttgacggctacatgggaccaacttgcagagaaggaggccccttgagactgcccgagaatccaagcctcgcccaaggcagtgcaggaactctgcctgcctccagccgcccaacttctagatcgggaggacccgctaggcactag

SEQ ID NO: 124981 - DNA, 8538 bp, synthetic construct
  misc_feature 1..8538: note = Description of Artificial Sequence: Synthetic coding sequence
  source 1..8538: mol_type = other DNA
atggcactcggcaaagttttggccatggcgctggttctggcgctggctgttttgggctcgctgtctcctggcgcacgcgccggggattgtaaaggacaacgccaggttctgcgcgaggcacctggattcgtgacagacggagcagggaactattccgtgaacggcaactgcgaatggctgatcgaagccccctctccccagcaccggattctcctcgattttttgtttttagacactgagtgcacctatgattatctcttcgtgtacgacggcgactcaccccgggggccattactggcctctctctccggcagtacgagacccccaccaattgaggcatcgtccggtaagatgctgctacatttattcagtgacgctaactataatctgctagggttcaacgcttccttcagattttcactgtgcccaggcggatgccagtcacacggccagtgccagccacccggcgtttgcgcttgtgagccgggctggggtgggcccgactgtgggctgcaagagtgctctgcctactgcggctcccatggtacctgcgctagcccactcggaccttgcaggtgtgagcccggattcctcgggcgagcctgtgatcttcacctgtgggagaatcagggggccgggtggtggcataacgttagcgccagagacccagcgttttccgcgcgaataggcgccgccggcgccttcttaagtcctcctggcctactcgccgtattcggagggcaggatctgaacaacgccctgggcgatctagtgctatacaacttttctgcaaatacttgggaatcctgggacctgtcacctgcgccagccgccaggcattctcacgttgcagtcgcctgggcaggatccctcgtattgatgggcggagaactcgccgatggatctctcactaatgacgtttgggccttttcacccctgggaagaggccactgggaactcttagctcccccggcaagcagttcgtccgggccccctggtctggccggacacgccgcagcgctggtggatgatgtctggctatatgtgtcaggaggcaggacgccccatgacctcttttcttctgggctctttagatttaggctggactccacctctggaggatattgggaacaggtgattcccgctgggggccgccctccagccgccactggtcactctatggtgttccatgctcccagcagggctttgttagtacacggtgggcatagacctagcactgcccgattctccgtgcgagttaattccacagaactgttccacgtggacaggcatgtatggaccaccctgaaaggccgcgacggcctccagggcccaagggaacgggcatttcatactgcatctgtgctcggaaactatatggttgtttatggcggcaatgtgcacactcactatcaggaggagaagtgctatgaagacggaatatttttttaccacctcggctgccaccaatgggtttccggtgcagagttggcgccacccggcacccccgagggtagggccgctcccccttcaggacgctactcacacgttgctgccgtattgggaggaagcgtgttgctggttgccgggggatactctggacgtcccaggggcgacttaatggcctataaggttccaccattcgtattccaggccccagctcccgactaccatctggactattgcagcatgtataccgatcactccgtgtgctctagagatccagagtgtagctggtgtcagggggcctgtcaggccgccccccctcccggcacgcccttgggtgcctgtcctgcagctagctgtctgggcctggggcgcttactgggcgactgtcaggcctgcctggctttcagcagtcctactgctccaccacgggggccgggcaccctcggatggtgcgttcacaatgaatcatgcttgcctagacctgagcaggcaaggtgtcgtggagagcagataagtgggaccgttggatggtggggccctgctcctgtttttgtcacaagcctggaggcctgtgttactcagtcctttctgccaggcctgcatttgcttacatttcagcagccacccaacacaagccagcccgataaagtctccatcgttcgcagcacgacgattactctgacacctagcgcagaaactgacgtaagcctagtttacagaggtttcatttatcccatgctgccagggggcccaggcgggcccggcgctgaagatgtcgccgtttggactagggcgcagcgactgcatgtgctggccagaatggcccgaggccccgacaccgagaacatggaagaggttgggagatgggtcgcccatcaggagaaagagactaggcgcctacaaaggcccggaagcgctaggttgtttcctctgcccggcagggaccacaaatatgctgtggagatccagggtcagctgaacggcagcgccggacccgggcatagtgagctcacgctattgtgggacaggacaggcgtgcctggaggcagcgagatttccttcttctttttggagccctaccgtagttctagctgcacaagctactcttcctgcctgggctgcctggctgaccagggatgcgggtggtgtctcacttcggccacctgtcatctgcggcagggcggggcccattgcggcgacgacggcgccggaggcagtctgcttgtcctggttccaactctgtgcccactatgcgaagagcaccgggactgtcacgcctgcactcaggatccgttttgtgagtggcaccaaagtacctctagaaaaggtgacgccgcatgttcacggcgcggaaggggaagaggcgccctcaaaagccctgaagaatgcccccccctatgcagccaacgcctgacatgtgaggattgtttggccaatagttcccaatgcgcttggtgtcaaagtacgcatacttgttttctgttcgccgcctacttagccaggtacccacatggaggttgcaggggatgggacgacagcgtccactccgaaccacggtgcaggagttgtgatgggtttttaacgtgccacgagtgtctccagagccacgagtgcggctggtgcggcaatgaggacaacccaaccctcggtcgctgcctccaaggcgatttttccggacccttagggggggggaactgcagtctgtgggtgggcgaggggctcggcctgcccgtggccctgcctgctcgttgggcctatgcaaggtgcccagacgtggacgagtgccggctcgggctcgctcgatgtcatccccgcgctacatgcttgaatacacctctcagttatgagtgccattgtcagagaggttatcagggcgacggaatctcacattgcaaccggacctgcctcgaggactgtgggcatggagtgtgttctggcccaccagattttacttgtgtatgtgatttgggatggacgtcagatctgcccccccccactcccgcgccagggccccccgctccacgctgctcccgggattgcggatgttctttccacagtcactgtcggaaacgagggcccggtttctgcgacgagtgtcaggactggacatggggcgagcattgtgagagatgtcggcccgggagctttgggaacgccacagggagccgcggttgcagaccttgtcaatgcaacggacacggggaccccaggcgcggccactgcgacaacctctcaggcctgtgtttttgtcaggatcacaccgagggcgctcactgccagctgtgcagcccagggtactacggcgatccaagagctggcggctcctgcttccgcgaatgcgggggtagagccctgcttacaaatgtcagctctgttgccctgggctcacgccgagtgggcggacttcttcctcctggcgggggggcggcacgggctgggccggggctctcttattgcgtgtgggtggtgtcggctacagaagagttacagccctgtgctccggggactctttgtcctccactgacacttacctttagccccgacagctctaccccttgtactttgtcttacgtgttagctttcgacgggtttccccggttcttggatactggagttgtacagagtgatcgatctcttatcgctgcattttgcggccaacgccgcgaccgcccgctgacagtgcaagccctatctgggctgcttgttcttcactgggaggcgaatggctcatcgtcctggggctttaacgcaagtgttggatccgccagatgcggtagtggagggccaggatcctgtcctgtaccacaggaatgtgtgcctcaagatggcgctgctggggcaggactgtgtcggtgcccgcagggctgggcagggcctcactgcaggatggcactgtgcccagagaactgtaatgcacataccggggccggtacatgcaaccagagcctgggtgtttgcatttgcgccgaaggattcgggggccccgattgtgcaacaaagctggatggcggtcaactcgtgtgggaaactttgatggatagccgcctgtctgccgatacagcatccagattcctgcacaggctcgggcatacaatggttgacggccccgacgcgacactctggatgttcggaggcttaggcctaccccagggcttactgggaaatctgtacagatatagcgtttccgaaaggcgctggacgcaaatgctcgccggggctgaggatggagggccaggtccctcacccagatctttccacgctgctgcctatgtccccgccggcagaggtgccatgtacctgctgggcggcctcactgctggcggagtcaccagggacttctgggtgctaaatctgacaacacttcagtggcggcaggaaaaggccccacagactgtcgagcttcccgccgtggccggacacaccctgacggcacggcgtgggctgtccttgctgcttgtcggtggctacagccctgaaaacggttttaaccaacagttactggaataccagctggccaccggcacttgggtgtccggcgcccagtccggcacccccccaacaggcttatacgggcattcagctgtgtaccacgaagccaccgactctctttacgtcttcgggggatttcgcttccatgtggaactcgctgccccgtccccagagctgtactctctccactgccccgatcgcacctggtcacttctggctccctctcagggcgccaaaagggatcgcatgcgtaatgttcgaggctcctctagaggcctcggccaggtacctggggagcagcctggttcgtggggcttccgagaagttcgaaaaaaaatggccctgtgggcagctctggcgggtacaggagggtttctggaggagatttccccccacctcaaagagccacgcccacgcctgttccatgcgagcgctttgctcggagatactatggttgttttgggtggacgaagcgacccagacgagttcagctctgatgtactgctataccaggtgaactgcaatgcctggctgctgccagacctcactcggtctgcctccgtcgggcctccaatggaagaaagtgttgctcacgctgtggccgccgtcggctcccgactctatatcagtggaggctttgggggcgttgccttaggaagactcctggcactcacactgccgcccgatccatgtagactacttagctccccagaggcctgcaaccagtccggggcctgcacctggtgccacggcgcctgcctgtccggagaccaggcccataggttgggatgcggcggctccccctgctctccgatgccacgtagcccggaggagtgtcgtcgtctccggacatgttcagagtgcctggcaaggcacccccgaacactgcagccaggtgacggcgaggcttccacccctcggtgtaagtggtgtacaaactgtcctgaaggggcttgcatcggtaggaatggctcctgcaccagcgagaacgactgtagaatcaatcaacgggaagtgttctgggctggaaattgctctgaggcggcctgtggcgcagcagattgtgagcagtgcacaagggaggggaaatgcatgtggactaggcaattcaagagaacaggagaaacccggcggattctgtctgtacagcctacatacgattggacatgtttttcccacagcctcttaaacgtctcccccatgccagttgaatcatcaccccccctcccttgcccgacaccctgccacttgctgccaaattgtaccagttgcttggacagcaaaggtgcggatggaggctggcagcactgtgtttggtctagctccctgcagcaatgtctctctccaagctacctgcccctacggtgcatggctggagggtgcggccgcttgctgagagggcctgagtcctgctctttgggctgcgcccaggcgacccagtgtgccctttgcctcaggagaccacattgcgggtggtgcgcttggggaggacaggatggtgggggaaggtgtatggaaggtggcctgtcaggcccccgtgacgggctgacctgcgggaggcctggcgcttcctgggcatttctcagctgccccccggaggatgagtgcgctaacggccatcacgattgtaacgagacacagaactgtcacgaccagccccatgggtacgaatgcagctgcaagacagggtacaccatggacaacatgacaggcctgtgtagaccagtgtgtgcgcagggatgcgttaatggatcctgcgtagaacctgatcattgtcggtgccatttcgggttcgttggtaggaattgttccactgagtgccggtgcaaccgccattcagagtgtgcaggagttggcgcccgagatcactgtctcctatgtagaaaccacacaaaaggctctcactgcgaacaatgtttacccctgtttgtcggtagcgccgtgggcggtgggacgtgccgcccctgtcacgcattttgcaggggtaacagccatatttgtatctcacgcaaagagctccagatgtctaagggggagccgaaaaaatactctttggacccagaggaaattgagaattgggtaaccgaggggccaagcgaagatgaggctgtctgtgttaactgtcagaacaacagttacggcgaaaagtgcgaaagttgtctgcagggctactttctgctggacggcaaatgcaccaagtgccagtgtaacggccacgcggatacatgtaatgagcaggatggaaccggctgcccatgtcagaacaacactgagacaggaacctgtcagggcagttccccgagtgacagaagagactgttataaatatcagtgtgcaaagtgtagggagtccttccacggcagtcctctgggggggcagcaatgttatcgtcttattagcgttgagcaggagtgctgtcttgaccccacgtcacaaaccaattgttttcacgagccgaagcgaagagcactgggacccggacggacagtgctgtttggagttcagcccaaatttaccaacgtcgatatccggctgaccctagatgttacttttggcgctgtcgacttgtacgtcagcaccagttatgacacatttgtggtccgagtagcacccgataccggggtgcacacagtgcacatccagcctccccccgcccccccccccccccccccaccagccgacggtgggccaagaggggccggcgaccctggtggagccggcgctagttccggccccggtgctccagctgagccaagggtgcgagaagtgtggccgcgcggactaattacttatgtaactgtcactgaaccctcggccgttctggttgtccgaggcgtccgggatcgccttgtgataacctacccccacgaacatcacgccctgaagtcgtctcgtttttaccttcttctgctcggcgtgggcgacccgtcaggaccaggggccaacggttccgctgactcccagggcctactgttcttccggcaggaccaggcccatatcgacctgttcgtgttctttagtgtcttctttagctgtttcttcctattcctgtccctgtgcgtcttgctgtggaaggccaaacaggctctggaccagcggcaggagcagcgccgacatctgcaggaaatgacaaagatggcgagtagacctttcgccaaagttacagtctgttttccgcctgatcccacagccccagcttcagcctggaagcctgccgggctcccaccacctgcatttagaaggtccgagccttttctcgctcctctactccttacaggtgctggtggcccgtggggtcctatgggcggcggatgttgccctccagcgatcccagccacaaccgccggcctgcgcgcaggaccaattactctggaacctaccgaggacggtatggccggggttgccacactgctgctccagctgccaggtggtccacacgccccaaatggagcctgccttgggtcagcactggtgaccctccgccatagattgcacgaatattgcggtgggggcggtggggctggaggaagcgggcatggaacgggcgccgggcgtaaaggcctgttgagccaagataatctgacatccatgagcctctag

SEQ ID NO: 124982 - DNA, 8337 bp, synthetic construct
  misc_feature 1..8337: note = Description of Artificial Sequence: Synthetic coding sequence
  source 1..8337: mol_type = other DNA
atggcgctcgggaaagtgctcgccatggcccttgtgctagccctggccgtgctgggatccctcagccctggggctagagcgggtgactgtaagggtcagaggcaagttctgagagaggcccccggctttgtgaccgacggcgctggtaactactccgtcaacggcaactgcgaatggctgatagaagcccccagccctcagcatcgtatcctcctcgatttcctgttccttgacacggagtgcacatatgattatctctttgtatacgacggggacagtccacgggggcccctcctggcgtccctcagcggatcgacacgcccacctcctatagaggccagctcaggaaagatgctgctccacctgttctcggacgctaactacaatcttcttggatttaacgcatcattcagattcagtttgtgtcctggcggatgccagagtcacggtcagtgtcagccaccgggtgtgtgtgcctgcgaacccggatggggaggtcccgattgtggccttcaggagtgctcagcttattgtggctcccacggcacatgtgctagtccactaggtccgtgccgctgcgagcccgggttcttagggcgggcctgcgacttgcacttatgggaaaaccaaggcgccggttggtggcacaacgtgtccgctcgcgatcctgccttttctgctagaatcggcgccgctggcgcgtttctctcaccaccagggctgcttgcagtgtttggtggtcaagacctgaataatgctctgggcgaccttgtgctttacaacttctctgccaatacatgggagtcctgggatttgtccccagcacccgccgcacggcacagccacgtggcggtggcatgggcgggaagtctggtcctcatgggaggggagcttgccgatggaagccttactaacgatgtgtgggcctttagccccctaggcaggggccattgggaactgctggccccaccagcaagctcttcttccggtccaccaggcctcgcaggccatgctgctgccttggtagacgacgtctggctttatgtgagcggaggtcgaaccccacacgacctctttagctctgggttgtttcggttccgcctggattcgacaagtggcggatactgggaacaagttattccagccggggggcgcccccccgctgccacgggccactctatggtgtttcacgctccgtcccgggccctgttggtgcacggagggcacaggcccagtacagcccggttctccgtgagagtgaatagtaccgaactttttcacgtggatagacacgtttggacaactctgaaaggacgggatggacttcaggggccacgcgagcgagcctttcatacggcgtcagtgcttggcaactatatggtagtgtatggaggcaatgtgcatacccactatcaggaagagaagtgttatgaagacggaattttcttttaccacttggggtgccaccaatgggtatctggtgctgagttggccccccctggcacccccgagggaagagcggctcctccaagcggccgatacagccacgtggcagctgttttaggcggttcagtccttctagttgccgggggatattctggcagaccgcggggcgatctcatggcctacaaggtgcccccatttgtgttccaggcacccgcccccgattatcatctagattattgttctatgtatacggatcactccgtctgctctagggatcccgagtgttcatggtgccagggcgcttgccaggctgctcctccacccgggacacctttgggcgcctgccctgcagctagttgcctgggcttagggaggctcctcggtgactgtcaggcctgtctggctttttcctcgcccactgcccccccaagaggcccaggaaccctcgggtggtgtgtacacaacgaatcttgcttgcctagaccagagcaggccagatgtcgaggagaacagatatcaggcaccgtcgggtggtgggggcctgcaccggtgttcgtcactagcctcgaggcctgcgtgactcaatctttcctccctggcctgcatctgcttacctttcagcagcctcccaacacctctcaaccagacaaggaggaagtaggtagatgggtagcacaccaggagaaagagacccgcagactgcagcgccccgggagtgcaaggctcttcccactcccaggccgtgaccacaaatacgccgtggagatccagggccagctaaacgggtcagccggtccgggccatagtgagttgacgcttctgtgggacaggaccggcgtgcctggcggttctgagatttctttcttctttcttgaaccttatcgctcctctagctgtacctcgtactcgtcgtgtttaggatgtcttgctgaccagggttgtgggtggtgtttaacatctgccacatgccaccttcgacagggcggtgctcactgtggcgatgatggcgcaggaggctctcttctagtccttgtgcccacattgtgtcctctctgcgaggaacatagagactgccatgcctgtacgcaggatcctttctgcgagtggcatcaatccaccagtagaaaaggagatgctgcttgctccagacgaggccggggacggggagctctcaagagtccagaagagtgcccccccctctgcagtcaacggctgacatgcgaggattgtctggccaattctagtcagtgcgcatggtgccaatctactcatacctgcttcttattcgcagcatatctagctcgatatccacacggcggatgccgcggctgggatgattctgtgcattctgaaccacggtgtagatcctgcgatggtttccttacttgtcacgaatgtttgcagagtcacgagtgtggctggtgtggcaacgaagacaatccaacattagggcgatgtctgcaaggggactttagtggacctctgggaggtgggaattgtagtctgtgggttggagaaggcctcgggttgcctgtggccttgccggcgaggtgggcctacgctcggtgtcctgatgtggacgagtgtagactgggcctcgcgcgctgtcatccccgcgccacttgtctgaacactcctctctcttacgagtgtcactgccagcgtggatatcagggggatggcattagccactgtaatagaacatgcctagaagactgcgggcacggggtttgtagcggtcctcccgacttcacatgcgtctgcgatttgggctggactagcgatctccccccaccaaccccagctccaggaccccccgctccgcgatgctcacgggattgtggatgctccttccactcgcactgccgcaaacggggacccggtttctgtgatgaatgtcaagattggacatggggcgaacactgcgagagatgcagacctggttcgtttggaaacgcgaccggatcacgggggtgtagaccgtgtcagtgtaatggccacggcgatccccgcagagggcattgtgacaacctcagcggcctctgtttctgccaagaccacacagagggcgcccattgtcagttatgtagccccggttactatggagacccccgcgccggcggcagttgcttccgggaatgtggtggtagagctctgttgaccaacgtgtcatccgtggcactggggagtagacgcgtgggcggactcctgccccccgggggtggcgcagcacgcgcagggcccggcttatcctactgtgtctgggtcgtctctgcaaccgaagagctccagccttgcgcgccaggcacgttatgtccaccactgacgttgactttcagccccgattcttccacaccatgtaccctgagctatgtgcttgcctttgacggatttccgcggttccttgataccggcgttgtgcaatcggacagaagtttgatcgccgccttctgtgggcaacgccgggaccgtcctctgaccgtgcaggccctctctggcctgctggtactacactgggaggccaatgggtccagttcctggggatttaacgcatcagtcgggtcagcccggtgcggaagtgggggtcctggcagttgtccagtccctcaggagtgtgtccctcaggatggggccgcaggtgcggggctgtgtcggtgcccccagggttgggcaggcccccactgccggatggctctgtgtcctgagaactgcaatgctcacacaggggctggcacctgcaaccagagtcttggcgtatgtatttgtgcggaagggttcggcgggccagactgtgcaacgaagctggatggaggacagctggtgtgggagaccctgatggactcacgcttgtctgctgatactgcaagtcggttcctccaccggttgggacatacaatggttgacggtccggatgccaccctatggatgtttggcggactaggactcccacaggggctgctaggcaatctttacaggtactccgtgagtgaaaggaggtggacacagatgctggccggagctgaggatggcggaccaggaccatcaccgcgctctttccacgctgccgcctatgttcccgcaggacgcggcgctatgtacctgttgggcgggctgactgcagggggcgttacaagagatttttgggttctgaacttaacgaccctccagtggcgacaggagaaagccccgcaaaccgtggagcttccagcagtcgctggacacacccttaccgcccgaagaggactctcactgctattggtgggagggtacagcccagagaatgggtttaaccagcagttgcttgagtatcaattagccaccgggacctgggtgtctggtgctcagagcggtacacctcccacgggcctctatggtcattctgccgtctatcacgaagccacggattccctgtacgtgttcggtggatttcggttccacgtggagttagccgcccctagcccagaactctacagccttcattgtccagaccgcacatggtctctgcttgcgccctcgcagggggctaaacgagatagaatgcggaacgtgaggggcagctccagaggactcgggcaggtgccaggagaacagcctggttcttggggttttagggaagtacggaaaaaaatggcattgtgggctgcactggcaggcaccggcggattcctagaagaaatttcaccccacctcaaggagcctcgccctcgtctattccacgcgagcgccctgctcggagataccatggtcgtgctgggaggtagaagcgatcctgacgagttcagctcagacgtgttgctttaccaggtgaactgcaatgcctggttgctgcccgatttaacccgcagcgcaagtgtgggcccccctatggaggaaagtgtggcacacgctgtggcagccgtgggctccagactgtacatctccggcgggttcggaggagtggctctgggaaggctcctggctctcacgctacccccagacccctgtcgattgctgagttcccctgaagcatgtaatcagagtggtgcttgcacatggtgccatggcgcctgtctgagcggagaccaggcacacaggctgggttgcgggggcagtccctgttctcctatgccgcggagccctgaggagtgtagaaggcttcggacttgctccgagtgtttagctcggcatcccagaactttacaacctggtgatggcgaggcatcaactccaagatgtaagtggtgtacgaactgcccagagggcgcttgtattggacggaacggttcttgcacatcggaaaacgactgccgcattaatcaacgtgaagtgttctgggcaggaaattgctccgaggctgcctgtggggctgctgattgcgaacagtgcaccagagaggggaaatgtatgtggactagacaattcaagcggaccggcgaaaccaggaggatactgagtgtccagcccacctacgactggacctgcttcagtcattctctgctgaacgtctcacctatgcccgtcgagagcagcccaccattgccgtgtccgacaccttgccatttactgccaaattgtacatcatgtttggatagtaaaggagcagacgggggatggcagcactgtgtgtggtcctcatcactgcagcagtgcttaagtccgagttacttaccactacgatgcatggccggaggttgtggccgtcttcttcgcggcccagagagttgctctctgggctgtgcacaggctacccaatgtgctctgtgtttgcgcaggccacactgcggatggtgtgcctgggggggacaggacggcggaggcagatgcatggaaggtggtctctcgggaccacgcgatggactgacctgtgggagacccggcgccagctgggctttcctcagctgcccacctgaggatgagtgtgccaacggccaccatgactgtaacgaaactcaaaattgtcacgaccagcctcacggttatgaatgtagctgcaaaactggatatacaatggataacatgactggcctctgtaggcctgtgtgtgcacaaggttgtgttaacggctcctgcgtggaaccggaccattgtcggtgtcactttgggtttgtagggcgcaattgctctacggagtgcagatgtaaccgccatagtgagtgcgccggcgtgggggccagggatcactgtcttctgtgccgtaatcatacaaagggctcgcattgtgagcagtgcttacccctcttcgtcggaagcgcagttggtggcggaacatgcaggccctgtcacgccttctgtaggggaaacagccatatatgcatcagccggaaagagctgcaaatgtccaagggggaaccgaaaaaatacagtttggacccagaagaaattgagaattgggtcacagaaggaccatccgaggacgaggcggtgtgtgtgaactgtcagaataatagttacggggaaaaatgtgagagctgcctgcaggggtatttcctcctagacggaaagtgcaccaagtgccaatgcaacggccacgcggacacttgcaatgagcaagacggaacggggtgcccatgtcaaaacaatacggaaactggtacttgccaagggtcatccccttccgaccgtagggactgctacaaataccaatgcgctaagtgtagggagtccttccacggaagtccgttggggggccagcagtgctacagactaattagcgtcgaacaggaatgttgcctggatcccacctctcaaactaactgctttcacgagcccaaaaggagggcccttgggcctgggaggacagtgttattcggggtgcagcccaaatttacaaacgttgatatcagactgacactggacgtcacctttggagctgtggatctctacgtcagcacatcctatgacacatttgtggtgcgagtcgccccagatactggggttcatacagtgcacatacaaccccccccagctccccctccgccacctcctcccgctgacggcggccccaggggagctggggatcccgggggtgccggagctagttctggtccgggagcccccgccgagccgcgggtccgggaggtgtggccgagaggtctcattacctatgtcactgttactgagccctccgccgtcctggttgtgcgtggggttagagaccgtctggtcatcacttacccgcatgagcatcacgccctcaaaagcagcagattttaccttttgctactgggagtgggcgatccatcgggtcccggcgctaatggctcagctgacagtcagggactcctgttcttccgccaagatcaggcccacattgatctgttcgtgtttttctccgttttttttagctgtttttttctctttttgagtctctgcgtcttactatggaaagcaaaacaggctctggaccagagacaggaacagagacggcacctgcaagaaatgaccaagatggcttctagacctttcgccaaggtgacagtttgtttcccacccgatcccactgcgccagcctcggcctggaagcccgcaggactaccgcccccggcttttagacgatccgagccatttctggctccccttcttctgacaggcgctggcggaccctggggcccaatgggcggcgggtgctgtcccccagccattcctgccactacagccggcctacgggccgggcctattacactggaaccaaccgaagacggcatggccggtgtggcaaccctgctactgcagctaccaggaggtcctcacgcccctaatggcgcttgccttggatccgcattggtgacccttaggcaccgcctgcacgagtattgtggggggggtggtggtgctggtggctcaggccatggtaccggagccggacgcaaggggctcttatctcaggacaatcttaccagcatgtccctgtag

SEQ ID NO: 124983 - DNA, 1320 bp, synthetic construct
  misc_feature 1..1320: note = Description of Artificial Sequence: Synthetic coding sequence
  source 1..1320: mol_type = other DNA
atgagagaactcccagctggcctgttgccacccgggagagaagtgcaccagtgcgcgaagtgccgagagtcttttcatgggtcacccttgggcgggcagcagtgttatcggctcattagcgtggaacaggaatgctgtctggacccaacgagccagacaaattgttttcacgaaccaaaaaggagggccctgggccctggtcgcacggtcttatttggcgtgcagcctaagttcaccaacgtggatatcagactgaccctggacgtaaccttcggggccgtcgacctctatgtgagcacctcgtatgacaccttcgtggtccgggtagcacctgacacaggcgtccacacagttcatatccaacccccgccagcgccccccccaccccccccccctgcggatggagggcctagaggcgctggagaccctgggggagctggtgcctccagtggccccggcgcccccgcggagccaagagtgcgcgaagtctggcccagaggacttatcacctatgtcaccgttaccgaacctagcgccgtgctggtcgtacggggagtgagagaccgccttgtgatcacgtatccacatgaacatcatgccctgaagtccagcaggttctatttactcctgctgggggttggcgatccttccggaccaggcgctaacgggagcgccgactcccagggactgctgttttttaggcaagatcaggcccacatcgacttgttcgtgttcttcagtgtatttttctcctgtttttttttgtttctcagcctatgtgttctgctctggaaagccaagcaggccttggaccagagacaggagcaacgccggcaccttcaggagatgaccaaaatggcatctcgcccttttgctaaagtgaccgtgtgttttccccccgacccgaccgcccctgcctcagcttggaagcccgccggcctcccaccacccgcattccggcgttctgagcctttcttagcgcctctgttactcacgggagccggaggcccttggggccccatgggcgggggctgttgccctcccgcaattccggccacgaccgccggtttgcgcgccgggcccatcaccctcgagccgaccgaggatgggatggcgggcgtggccacccttctcttgcagctcccaggtggcccgcacgccccaaatggagcatgcctcggcagtgcactcgtaacactgcgacaccggttgcatgaatactgtggaggcggcggaggtgctggcgggtccggccatggcactggcgcaggtcggaagggacttctttcccaggacaatcttacatccatgtctctttag

SEQ ID NO: 124984 - DNA, 1809 bp, synthetic construct
  misc_feature 1..1809: note = Description of Artificial Sequence: Synthetic coding sequence
  source 1..1809: mol_type = other DNA
atgaacggaggggctgaacgcgcgatgcggagccttcctagcctgggcggactggctctgctgtgctgtgctgccgcggctgctgcagctgccgtggcctcagcggcctccgctggaaatgtaacaggaggtgggggggccgctggccaggtggacgcctcccctggccccggactgcgaggagaaccctcgcatccctttcccagagctacagcccctactgcccaggcaccccggaccggccctcctagagctaccgttcaccggcctctggctgcaacgagcccggctcagagtcccgaaactactccactctgggcaacagcagggcccagcagcacgacatttcaggccccccttgggcctagccctacgactccacccgccgcagagagaacctctacgacttcccaggcccccactcggccagctccaacaaccctcagcaccaccaccggcccagcccccactacccctgtcgctacgaccgtccctgcccctaccaccccacggactcccacacctgacctaccatcaagctccaactcgtcagtcctccctacaccacctgccacagaagctccctcttccccaccccccgagtatgtgtgcaattgttctgtggtagggagccttaacgtaaatcgttgcaatcagacaacaggacagtgtgagtgtaggcccggataccaagggctgcactgtgagacttgcaaggagggtttttatctgaattatacaagcggcctgtgtcaaccatgcgactgtagtcctcatggggccttgtctattccttgtaattcaagtggtaagtgccagtgcaaagtcggagtgattggaagcatatgcgacaggtgtcaagatgggtattacggttttagcaagaacggatgcctcccttgccaatgcaataatcgctctgccagctgcgacgccctgacaggggcctgtctcaattgtcaggagaactcaaagggcaaccattgcgaagagtgtaaagaaggattctaccaaagccctgatgctaccaaggaatgcttaagatgtccatgttcagccgtgactagcaccggctcttgtagcatcaagagttcagagttagaacccgagtgtgatcagtgtaaagatggatacatcgggccaaattgcaacaagtgtgagaatgggtattacaatttcgatagcatttgcaggaagtgccaatgccacgggcacgttgaccccgtaaaaaccccaaagatatgcaagccagagtccggggaatgcattaattgtcttcacaataccacaggattctggtgtgagaattgcttggagggttacgtgcacgatctcgaggggaactgtatcaaaaaggaagtgatcctccctacacccgagggatcaactatactcgtgtcgaatgcgtcactcacgaccagtgtcccaactcccgtgattaatagcacattcactcccacgaccctgcagacaatcttctccgtctccaccagcgaaaattcgactagcgccctggccgatgttagttggacccaattcaatattattatactgaccgttatcattattgtagtggtcctgttaatggggttcgtaggagcggtctacatgtacagagaataccaaaatcgaaagctcaatgcacccttttggaccatcgaactgaaggaagacaatatctccttttcatcctatcacgattcaatccctaacgccgacgtttccggattacttgaggatgacgggaacgaggttgcccccaacgggcagctcaccctgaccactcccatccataattataaggcctag

SEQ ID NO: 124985 - DNA, 1920 bp, synthetic construct
  misc_feature 1..1920: note = Description of Artificial Sequence: Synthetic coding sequence
  source 1..1920: mol_type = other DNA
atgaggtcgctcccgtcgcttggcgggctggcactcctctgttgtgcggcagctgccgctgctgcggcagtggcatccgccgcatccgctggtaacgtaaccggaggaggtggcgccgctggccaagtggacgccagccctggaccagggttgcggggggagccatcacatcccttcccccgtgcaacagccccaacagcacaggcaccccggactggaccgcctagggccacagttcatcgcccactggccgctacttcccccgcccagtcccctgagacaacccccctgtgggccaccgcaggcccctcatcgacaaccttccaggctccactgggtcccagcccaaccactcctccagccgctgaacggacttccaccacgtctcaggcacccacaaggcccgctcctaccaccctttctacaacgacaggacccgcccccaccacccccgttgccaccaccgttcccgcgcccactactccaagaactcctactcccgatctgccctctagttctaattcaagcgttctccccacaccgccagctacagaggctcccagttccccccctcctggccaccaatggccagtggcgaagatgcctcagaagtatttgggcaagtatgcgtgtgaatcaaacctgaagtctaagtacttgccactgacgcagcctgtgatgaatctgcgggtctcagaagctgtgaaaactgaatacgtgtgcaattgcagtgttgtcggctccctcaacgtgaaccggtgcaaccagacaaccggacagtgtgaatgtcgtcccgggtaccagggcctccattgcgaaacgtgtaaggagggattctatctgaattatacttctggcctgtgccagccctgcgattgcagtcctcacggagctttgtcaattccttgtaatagttctggcaaatgtcagtgtaaggtcggagtcattggaagtatctgcgacagatgccaagacggctactatggtttttcgaaaaatggctgtttaccgtgccaatgtaacaaccggtccgcttcttgtgacgccctcaccggggcttgtctaaattgtcaagaaaatagcaagggcaaccactgtgaagagtgcaaggaagggttctaccagagcccggatgctacaaaagagtgtctaaggtgcccttgcagtgccgtgacatctacgggtagctgctcaattaagtctagcgaactcgagcctgaatgcgaccaatgtaaggatggctatataggccccaattgcaacaaatgcgaaaatggatattataactttgattctatttgtcgtaagtgccagtgtcacggccacgtggaccctgtgaagactccaaaaatttgcaaacctgagtccggagagtgcattaattgtttacacaacacaactggattctggtgcgagaattgtttggaaggctatgtgcatgatctggaagggaattgcattaagaaggaggttatcctgcccacacctgaaggctccacgatcttggtctccaacgcctccctgaccacgtctgtcccaacaccagtcattaactcaacattcacaccaacaacgctgcagacaatctttagcgtctctactagtgagaatagtacctcagcgttggctgacgtgtcttggacgcagttcaatatcatcatcctgactgtcattattatcgttgttgttctgctcatgggattcgtcggggcagtatatatgtacagggagtatcagaaccgtaagctgaacgctcccttttggacgattgaactgaaagaggataatatctccttttccagctatcacgattcaatcccaaacgcagatgtgtcagggctccttgaagatgacgggaatgaggtcgcacccaatggccagttgacactgaccaccccaatccataactataaggcttag

SEQ ID NO: 124986 - DNA, 939 bp, synthetic construct
  misc_feature 1..939: note = Description of Artificial Sequence: Synthetic coding sequence
  source 1..939: mol_type = other DNA
atgctgcgagcccctgggtgtcttctgagaacgagcgtggcgcccgctgccgctctagccgcggctctcctaagctctctggctaggtgtagcctgcttgaaccacgggacccagtagcctcttctctcagtccctattttgggaccaagacgagatacgaagatgtgaaccccgtgctcctctccggaccagaggccccatggcgcgacccagaactgctggaaggcacctgtactcctgtgcaattggtggcactgatcagacatgggaccagatatccaaccgtgaagcagatccgcaaactgcgccagcttcatggattactgcaggctcgcggatccagagacggtggcgcatcttccacaggaagcagggatcttggcgccgccctggccgactggcctctgtggtatgcggactggatggatggccagctcgttgaaaaaggccggcaagatatgcggcagttggctttgcggttagcctccctgttccccgctttgttttccagagagaactatggacgtcttaggctgatcacatctagcaaacatcgctgtatggactctagcgcagccttcctccagggcctctggcagcattatcatccaggcctgcccccccctgacgtcgctgatatggaattcggacctcctaccgttaacgataagctgatgcgcttttttgatcactgcgaaaaattccttacagaggtcgagaagaatgcaactgccctctaccacgtcgaggccttcaaaactggccccgagatgcagaacatactaaagaaagttgcggccacacttcaagtgcctgttaatgacctaaatgccggcttgtcccagttcctcctccaatcaagttctagcctggtcatgcagcgcctgttcttccattgctttttaagttgggctacatccaaaacaagaaatccgtag

SEQ ID NO: 124987 - DNA, 1464 bp, synthetic construct
  misc_feature 1..1464: note = Description of Artificial Sequence: Synthetic coding sequence
  source 1..1464: mol_type = other DNA
atgttgcgggcaccaggttgcctcttacgaaccagcgtggcacccgcagctgctctggcagctgcgctcttgtcctcccttgcacgctgtagcttgttggaaccccgagatccggtcgccagctctctttcaccgtatttcgggacgaagacaagatatgaggacgtgaacccggtactcctttcagggcccgaggccccctggcgggatcccgaacttttggaaggaacttgcaccccggtgcaacttgttgccttgatccggcacggtaccaggtatcctacggttaagcagatccgaaagctcagacagctccatgggctcctgcaagcacggggatccagggacggtggggcctctagcacagggtcgcgcgacctgggcgcggcgttggccgattggcctctctggtatgcagattggatggatggacagcttgtcgagaagggtagacaggacatgcgccaattagcactgcgcctcgcctccctattccctgccctgttttccagagagaattacgggcggttgcggctgattacttctagcaaacaccggtgtatggactcttccgccgcgttcctacagggcttatggcagcattaccaccccggtttaccaccaccagacgtggctgatatggagtttgggccaccgaccgtgaacgataagctgatgaggttctttgaccactgtgagaaatttttaactgaagtggaaaagaacgctactgcactttaccacgtcgaagccttcaaaacaggccccgagatgcaaaacatcctgaaaaaggttgccgccacattacaagtccctgtgaacgacctcaacgccgatttaatccaggtggcctttttcacctgcagtttcgacctcgccattaagggcgtcaaatccccctggtgtgacgtcttcgacatcgatgatgcaaaagttctagagtatcttaatgacctcaaacagtactggaagcgaggctacgggtacacaatcaactcacgttcttcatgtaccctgttccaagatattttccagcatcttgataaggccgtcgagcagaaacaaaggagtcagcctatctcctccccagtcatcctgcagtttggacacgctgagacgttgcttccgctgctttccctaatgggatacttcaaagacaaggagccgcttacagcctacaactataagaaacagatgcatcggaagtttaggtccggcttaattgtgccctatgccagcaacttgatctttgtgctctatcattgcgaaaacgcgaaaacaccaaaggaacagttccgcgtgcagatgctgctgaatgaaaaggtgctgcctctggcttactcccaagaaactgttagtttctatgaagacctgaaaaatcactataaggacatactgcaaagttgccagacgtcagaggagtgcgagttagctagggcgaattcaacctcagacgagctttag

SEQ ID NO: 124988 - DNA, 861 bp, synthetic construct
  misc_feature 1..861: note = Description of Artificial Sequence: Synthetic coding sequence
  source 1..861: mol_type = other DNA
atgtgtttgttccaactgtgtggacttgtgcgttatatggagtttggccctccaaccgtgaatgacaagctcatgagattttttgatcattgtgagaagtttctcaccgaggtggagaagaacgccacagctctctaccatgtggaggcttttaaaactggccccgagatgcagaatattctgaagaaggttgcagccactttgcaagttcctgtgaatgacctgaacgccgatctcattcaagtcgcattctttacttgctcttttgatttggcaatcaaaggcgtcaagagtccttggtgcgacgtattcgacatcgatgacgccaaggtgctggaatacctcaacgacctaaaacagtattggaagcgaggatacggttacacaatcaatagccggagttcatgcaccctcttccaggatatcttccagcatctggacaaggcggttgaacagaagcagcgttcacagccaatctcctccccagtgatcttgcagttcggccacgcggagactctgttgccgctgctgagtctgatgggatacttcaaagataaggaacccctgactgcttataattacaagaagcagatgcataggaagttccgcagcgggctgatagtgccttatgcgagcaacctcatattcgtgttatatcactgtgaaaacgctaagactcccaaggaacagttcagagtccaaatgctgctcaatgagaaagttcttcccctcgcctacagccaagaaaccgtcagtttttatgaagacctgaagaaccattataaggacattctccagtcctgtcagacttccgaggagtgcgaactggcccgagccaattctaccagcgacgagctgtag

SEQ ID NO: 124989 - DNA, 1041 bp, synthetic construct
  misc_feature 1..1041: note = Description of Artificial Sequence: Synthetic coding sequence
  source 1..1041: mol_type = other DNA
atggatggacagctggtggaaaagggtcggcaggatatgaggcaactggccctccggttggcctccctctttcccgcgcttttctctagggaaaattacggccgtctgagactcatcactagtagcaagcaccggtgtatggactcaagcgccgcatttctgcagggattatggcaacattatcaccctggcttgcctccaccagacgtggcagatatggagtttgggccccccactgtgaatgacaaactcatgaggtttttcgatcattgcgagaagtttctcaccgaagtcgaaaagaacgcgacagcactataccatgtcgaagccttcaagactggccccgaaatgcagaacattctgaaaaaagtggcagccactcttcaggtgcctgttaacgacctcaatgcagacctgattcaagttgccttttttacctgtagcttcgatctggccatcaagggggtgaagtctccatggtgtgatgtcttcgatattgacgatgccaaggtgctcgagtatctcaacgacctgaaacagtattggaaaaggggctacggatataccattaacagtagaagctcatgcactctgttccaggacatttttcaacatctggacaaagccgtcgagcagaagcagaggagccagcccatctccagccccgtgattttacagtttgggcatgccgagacacttctgccactgctcagcctgatgggatactttaaggataaggagcctttgacagcgtataattacaaaaaacaaatgcatcggaagttccggtccggactgatagtcccatacgcttccaacttaattttcgtcctttaccactgcgagaacgcaaagacaccaaaggagcagttcagagtgcaaatgttgctgaacgaaaaagtgttgcccctggcttacagccaggaaactgtgagcttttacgaggatctgaaaaaccattataaagatatcttacaaagctgtcaaacaagcgaagagtgcgaactggcccgagctaactccacatctgacgagctatag

SEQ ID NO: 124990 - DNA, 6213 bp, synthetic construct
  misc_feature 1..6213: note = Description of Artificial Sequence: Synthetic coding sequence
  source 1..6213: mol_type = other DNA
atgctcgaggcaatcgacaagaaccgcgccctccacgccgcagaaaggctgcagacaaaactgagagagagaggagatgtggccaacgaggataagctctctctcctgaagagtgtattgcagagtccactgttttcacaaatcttatctttacagacttcggttcaacagctcaaagaccaggtgaacatcgctacctcagcaacctccaatatagagtatgcacacgtgcctcatctgtcaccagctgtgattccgacgttacagaacgagagcttcctgctcagccccaacaacggtaatttagaagccctgaccggtccaggaataccgcacataaatggcaagccggcttgcgatgaattcgaccagctgataaaaaacatggctcagggcagacacgtcgaggtctttgaattgctgaagcctcctagcggagggctcggctttagcgttgttggcctacgttccgaaaacagaggtgaactaggaatttttgtgcaggagattcaggaaggctcagttgcacatcgggatggccggctcaaggaaaccgaccagatactcgcaatcaacgggcaggcccttgatcagactataacccatcagcaggcgatctcaatccttcaaaaagcaaaggatactgtacagttggtcatagccaggggatccttgcctcagttagtgtcccccattgtgtcccggagtccttccgcagcctctactataagtgctcattcaaatcccgtgcattggcagcatatggaaaccatcgaacttgtgaacgacgggtccggcctgggatttggcatcataggggggaaagctacaggcgttattgtgaagaccatcctgccgggaggagtggctgatcaacatggcagattgtgctctggggatcacatattaaagattggagataccgatctggccgggatgtcctccgaacaggtggcccaagtactccggcagtgcgggaacagagtgaaactcatgatagcccgcggtgctatcgaggagcggaccgcccctaccgccctaggcatcacactgagtagttcaccgacgtccacaccagaactaagagtcgatgcctctacacagaagggcgaggaaagtgagacttttgacgtggagctaactaagaatgttcaaggtctgggaataacaattgcggggtatatcggcgataagaaactggaacccagtgggattttcgtgaaatccatcaccaaaagctctgccgtagagcatgatggcagaattcagatcggcgaccaaatcattgcagtcgatggcactaacttacaggggttcacaaaccagcaggcagtcgaggtgcttcggcacacgggccagaccgttttgctgacccttatgagacgaggcatgaaacaggaagccgagctaatgagcagggaggacgtgaccaaagatgccgacttatctcctgtcaatgccagcattattaaggaaaattacgaaaaggatgaggactttctctccagcaccaggaacactaacatccttccaaccgaggaggaaggctaccccctgctgagcgccgagatagaggaaatagaggatgcacagaaacaggaggccgcgctgctcacaaaatggcagcgcatcatgggaatcaactatgagattgtggtggcccacgtctcaaagttcagcgagaattccgggctggggatctcactggaagccactgtagggcaccatttcatacggtccgtattgcctgaaggacccgtgggacacagcggcaagctattctccggcgacgagctacttgaggtcaacgggattacactgctcggtgaaaaccaccaagatgtcgttaatattctgaaggagttgccaatagaggtcaccatggtctgctgtagacgtaccgtccctcccacgacccagtcagagttggactcgctcgacttatgtgatatcgaactgaccgaaaaaccccacgttgatcttggggagtttataggcagttcggagactgaggaccctgttctcgctatgacagatgcgggacagtccacggaggaggttcaggcacccttggccatgtgggaggcaggtattcagcatattgaattggagaaagggtctaagggccttggtttttccatcctggactaccaggaccccatcgatcccgctagtacggtgattatcattcggagtctggtgcccgggggcattgcagagaaggatggcaggttgttacctggagatcgcctaatgtttgtcaacgatgttaacctggagaactccagccttgaagaggccgtcgaggccctgaagggtgccccaagtggaacggttagaatcggggtagcgaaaccgctgcccctgtcccctgaggaggggtacgtcagcgctaaagaggattcttttctctacccccctcacagctgtgaggaagctggcctggccgataaaccattgttccgtgctgaccttgcactcgtggggactaacgacgctgatctagtggacgaatctacattcgagtctccctattctccggagaacgactctatctacagcacgcaagcttccatcctgagcctgcacggtagcagctgtggagatggactgaattatgggtcgtcacttcccagtagccctcccaaggacgtaatagagaattcctgtgaccccgtgctggacctccatatgtctctggaagagttgtacacccagaacttgcttcagcgacaagacgaaaacactccttctgttgacatctccatgggccctgccagtggattcaccatcaatgattacacccccgccaatgccatcgaacagcagtatgagtgcgaaaatacgatcgtgtggaccgagtcacaccttccgtcagaagtgatctcgagtgccgagctcccaagcgtgctgcctgactctgccggtaagggtagtgaatacttactggagcagagttccctggcatgcaatgcagagtgtgtgatgctccagaatgtttctaaggagtcttttgaacggactatcaatatagctaagggaaacagcagcctcgggatgacggtctctgcaaataaagatggattaggaatgatcgtcaggagcatcatccatggaggagccatctcacgagatgggaggattgcaatcggcgattgtattctgagcatcaatgaggagtcgactatttctgttacaaacgcccaggcacgtgccatgctacgaaggcattctctcattggcccagacatcaagataacctacgtgccagcagagcatttagaagaattcaagattagtcttgggcagcagagcggcagggtcatggctctggatattttctcatcgtacacaggccgtgacatcccggagctgcctgagagggaggaaggggagggggaagagtctgagctccagaatactgcgtactctaactggaatcagccgagaagagtggagctctggcgtgaaccatcaaaatccctaggaattagtattgtgggcggacgcggcatgggaagccgcctgtccaatggggaggttatgcgcggtattttcataaaacacgtcctggaggattcccccgccgggaaaaacggaaccctgaagccaggggatcgcattgtagaggtggacggaatggacctgcgggatgcttcccacgaacaggccgtcgaggccatcaggaaggccggtaaccccgtggttttcatggtccaatccattattaaccggccacgaaaaagcccactgcccagcttgctccacaacctgtatcccaagtataacttttcttccaccaatcctttcgcggactctctccagatcaatgccgacaaggccccatcccagtctgagagtgagcctgaaaaggcaccactatgttccgtgccaccccctccaccttccgctttcgctgagatgggttctgaccacactcaatcatccgcatctaaaatttcacaggatgtggataaggaagacgagtttgggtatagttggaaaaatattcgtgaacggtacggcaccttgactggagagttgcatatgatagaactggagaaggggcactcagggctggggctgagtctcgctgggaataaagaccggagtcgcatgtccgtcttcattgtgggtattgatccaaacggcgccgctgggaaggatggtcggctccagatcgctgacgaactgttggagatcaatgggcagatcctgtacgggcgtagccaccagaatgcttcttcaatcattaagtgcgctcctagcaaggtcaaaattatttttatacgaaacaaggacgctgtaaaccaaatggcagtgtgccctggcaatgccgtggagcccttgccctcaaatagcgagaacctgcagaataaagagaccgaaccgacagtcaccacatcagacgcggccgtggatttaagttcttttaagaatgtgcaacatcttgagttgcctaaggaccaaggaggtctgggtattgcaatcagtgaagaggacacgctcagcggtgtcatcattaagtccctgacagagcacggcgtagccgccaccgacggacgtctgaaggttggggaccaaatcctggccgtagacgatgagatcgtggtcggctaccctattgaaaagtttatcagcctgctgaagaccgccaagatgacagtgaaactcaccatacatgcagagaatcccgatagccaggcagtgccttctgctgctggcgcagcctccggggagaaaaagaactccagccagagcctgatggtcccgcagagcggatctccagaacccgagtccatacgcaatacatctaggtcatccactcctgctatattcgcgagtgaccccgccacatgccctataatccctggctgcgaaaccaccattgaaatttccaaggggcgtaccggattgggcctgagcatcgttggaggtagcgatacactgctcggcgcgataattatccatgaagtgtacgaagaaggggctgcctgcaaggatggaagactttgggctggcgaccagatcctggaggtgaatgggatcgacctaagaaaggccactcatgatgaggcaatcaacgtcctgcgacagacccctcaaagggtcagattgaccctttatagggatgaggccccatataaagaggaggaggtttgtgatacgctgacgatcgaactccagaaaaaacccggcaaaggcctgggactctccatagtaggtaaaaggaacgacactggcgtatttgtaagtgatatcgtgaagggagggattgctgacgccgacggtaggttgatgcagggagatcagatcttaatggtgaatggtgaagacgtacgtaatgcaactcaggaagctgtcgcagccctactcaaatgctccctcggcaccgttacccttgaagtcgggaggattaaggccggtccttttcattccgagagaaggccctctcaatcctcccaggtttccgaaggatctctaagcagttttactttccccctcagtggatctagcacttcagagagcctagagagcagttctaaaaaaaatgctctggcgtctgaaatccaaggtttgcgaacagtagagatgaaaaaggggcctacagactcactggggatttccatcgcaggaggcgtcgggtcgccgttgggcgacgtcccaatatttatcgcgatgatgcaccccacgggggtggccgcacagactcagaagctgcgcgtgggggatcgtattgtgacgatttgcggaacaagtaccgaggggatgactcatacgcaggcggtgaatctgttaaaaaatgcctccggctcaatcgaaatgcaggtggtggcaggcggcgacgtatcggttgtgaccggccatcagcaggagcctgcctcaagctccttgtcctttacagggctaacgtcctcctctatttttcaggatgacttggggcccccccagtgcaagtctatcacccttgagcggggaccagatggattggggttttccatcgtaggcggttatggttctccccacggggaccttccaatctacgtaaagactgtgttcgccaagggtgccgcgtctgaggatggccggctgaagcgtggagatcaaattatcgctgtaaacggacagtccttagagggggttacccacgaggaagcagttgccatcctgaaacgaaccaaaggtacggtgactctgatggtactctcctag

SEQ ID NO: 124991 - DNA, 6213 bp, synthetic construct
  misc_feature 1..6213: note = Description of Artificial Sequence: Synthetic coding sequence
  source 1..6213: mol_type = other DNA
atgttggaggcaatcgataagaatagggccctccacgctgccgaacgactgcagaccaaactgcgtgagaggggagacgtcgccaacgaagacaagctcagcctgttaaagagcgtgctgcagtccccactcttctcacagatcctcagcctgcagacaagcgtccagcagctgaaggatcaggtgaatattgccacctccgcaacaagcaacatcgaatatgctcacgtaccacacctgagtcctgccgtgattcccacactgcaaaacgaatcatttctgttgtcaccaaataacggcaacctcgaagccctgaccggccctggtattcctcacatcaacgggaagccagcttgcgacgagtttgaccagctgattaaaaacatggcacagggtcgccacgttgaggtttttgaattactcaagccaccgtcgggtggccttggattctccgttgtgggtctgagatctgagaacaggggagaactgggcatatttgtgcaggagatccaggaggggagtgtggcccatcgcgacggtcgtctaaaagagaccgatcaaatcctggccattaacggccaggctttggaccaaacaatcacccaccagcaggccatttctatcctgcagaaagccaaggatactgtgcagctcgttatcgcccggggctccctcccccagctagtgagtcctatcgtgtcacgtagtcctagcgcagcctccacgatttcagcacattctaatcctgttcattggcaacatatggaaaccattgaactcgtgaacgatggcagtggcctgggcttcgggatcattgggggcaaagctaccggggttattgtcaaaaccatattgcctgggggggtggctgaccagcacgggaggctgtgcagcggtgaccatatcctgaaaattggcgatacagacctggctggtatgagtagtgagcaagttgcccaggttttaagacagtgtggcaaccgagtgaagttgatgatagctagaggcgcaatagaggagagaacagcacctacagccttgggaattactctgtcgtcgtcaccaactagcacacccgagctgagagtagacgcttctacacagaaaggcgaggaatccgagacttttgacgttgagcttactaagaacgtccagggcttaggcattaccatcgccggatatattggagataagaaactcgaacctagcggtatctttgtaaaaagtattacaaagagtagcgccgtagaacacgatggcagaatccagattggggaccagattattgctgttgacggaaccaatctacagggcttcacgaatcaacaggccgtggaggtgcttaggcataccggccagaccgtcttactgactctaatgagaagaggcatgaagcaagaggccgagctaatgagccgggaagacgttaccaaagacgccgacttgagccccgttaatgctagcattatcaaggagaactacgagaaagacgaggacttcttgagcagcacgcgcaacaccaacatactgcccactgaggaggagggttacccactgttgtccgctgagatcgaagagattgaagacgctcaaaaacaggaggccgcgttgctcaccaagtggcagcgcattatgggtatcaactatgagatcgtcgtggctcacgtatctaagtttagcgaaaattccgggctggggatttcattggaggctacagtcggccaccacttcattcggtcagtgctgccggaggggccggttggtcatagtggcaagctcttttcaggcgacgagcttctcgaagtcaatggaattactctgctgggagaaaaccatcaggatgtggtcaacatactgaaggaattgcccatcgaagtcacgatggtctgctgtaggagaaccgtgcctccaactacacagagcgaattggactctctggatctatgtgacattgagctgactgaaaagccgcacgttgacctgggcgaattcattggtagtagcgaaaccgaggatcctgtgctggctatgaccgatgcaggtcagtcaactgaagaagtgcaagcgccactcgccatgtgggaggccgggatccagcacattgaacttgagaagggcagcaagggcctcgggttctccatcctcgactatcaggaccccatcgatcccgccagtaccgtaatcataattaggtcactggtgccaggcggtattgcggagaaggacgggcggctgttgccaggagacagactcatgttcgtcaatgatgtaaacctagaaaacagcagtctcgaggaagccgtggaagccctgaaaggtgccccaagcggcacagtgcgcatcggagtggctaaacctctccctctttcaccggaggagggctatgtgtctgccaaagaggattccttcctttaccccccccacagctgtgaggaagcagggcttgcggataaaccgttatttagagccgatctcgccctagtgggtaccaacgacgctgatttagttgatgagtccacttttgagtccccttatagccccgagaatgattccatctacagcactcaagctagtatcttgtcattacacggctctagctgtggggacgggctgaactacggatcatctctccctagtagcccacctaaagacgtgatcgaaaatagttgtgatccggtcctagaccttcacatgtccctcgaagagctgtacacgcagaacctcctgcagaggcaggatgagaatacacctagcgtcgacatcagtatgggtcctgccagtggttttactataaatgactacacacctgctaatgccatcgagcaacagtacgagtgtgaaaatacaatcgtctggaccgaaagccatcttcccagtgaagtcatctcgagcgcagaactcccaagcgtccttcctgacagcgcggggaagggttctgaatatctgctggaacaatcctccctggcgtgtaacgccgagtgtgttatgttacagaatgtgagcaaagaatcttttgagaggacaattaatattgcgaaagggaattctagcttgggcatgacggtgagtgctaataaggacggcctgggaatgatagttaggagtatcattcacgggggcgccatcagtcgggacggacgaatcgcgatcggagattgcattctgtctataaatgaagagagtaccatttcagtcactaatgcccaagcacgcgctatgcttcgccggcacagcctgataggacccgacattaagataacatacgtacctgctgagcaccttgaagaattcaagatctcattgggccagcagtccgggcgggttatggcacttgatatcttttcatcttatactggtcgggacattcccgaattaccggagcgggaagaaggtgagggcgaggaaagtgaactgcagaatacggcctactcaaactggaatcaacccaggagagtcgagctttggcgtgagccatcaaaatcactggggatttctattgttgggggccgtggaatggggagcaggctctcaaacggcgaagtcatgagggggatcttcattaagcacgtgctcgaagattccccggccggcaagaacggtaccctcaagccaggtgaccggatcgtagaagtcgacgggatggatcttcgggatgcttcacacgagcaagccgtggaggctatccgtaaagctggcaaccctgtagtgttcatggtacaatccattattaatcgtcctaggaaatctcccctgccttccctgctgcacaatctctatccaaaatataatttttccagcacgaacccctttgccgattccttgcaaattaatgctgacaaggccccctcgcaaagcgagagtgaaccggaaaaggctcctctatgtagcgtgccaccgcccccaccatccgccttcgcagagatgggtagcgatcatactcagtcctcagcctctaagattagtcaggatgttgataaggaggatgaattcggctattcatggaagaatataagagagaggtatgggacactgactggcgagcttcacatgatcgaactggaaaagggccactcagggctggggctcagcctcgctgggaataaagacagatctagaatgtctgtttttatcgttggcatagacccaaacggcgcagctggaaaggatggtcgcctgcagatcgccgacgaactgctcgagatcaacggacagattctgtacgggaggagtcaccagaatgccagctcaattatcaaatgtgctccgagcaaggtcaaaattatttttattaggaacaaagatgccgttaaccagatggccgtgtgccccggaaatgctgttgaacctctgcctagtaactccgagaacctccaaaataaagagaccgagccaaccgtgactacctctgacgcagccgttgatctcagctcattcaagaacgtccagcacctggagttaccaaaggaccagggcggcttgggcatcgccattagcgaagaggacactctctcaggggtgattattaaatcgcttacggagcacggagtcgcagcaacggacggacgcctcaaagtgggagatcagatactagctgtagacgacgaaattgtcgtgggctatcctatcgaaaagttcatctcacttctgaaaaccgcgaagatgacagtgaaattgactattcatgcagaaaatccagactcccaagctgtgcccagcgccgcaggggccgctagcggtgaaaagaagaacagctcgcagtcgctgatggtgcctcagtcaggatcccccgagcccgaaagtattcggaacacttccagatcaagcacccccgccatttttgccagcgacccagcaacctgccctattattcctgggtgcgagaccaccatagagatttccaagggccgcacgggactggggttaagcattgtgggggggtctgatacccttttgggagcaattattattcatgaagtttacgaagaaggggccgcctgtaaagatggacgtctctgggctggagatcagatcctggaagtgaacggcatcgacctgcggaaggccacccatgatgaggctataaacgtgctgagacagacaccgcagcgagtgagactgacactctaccgagatgaagcaccttacaaggaggaagaagtctgcgacacgctcacaattgaactacaaaagaagcctggtaaaggactgggactctcaatcgttggcaagagaaacgacaccggtgtcttcgtgtccgacatagtgaaaggcgggatagccgacgccgacggaagactgatgcagggtgatcagatacttatggttaacggagaagatgtgaggaacgcaacccaggaggccgtggccgccctgctgaagtgtagtctgggcacagtcacattagaagttggccgcatcaaagccggcccctttcatagcgaacgcagaccgtcgcagagcagccaggtatctgaaggcagtctgagcagctttacctttcctcttagtggttcctccacatcagagtccctggaatccagcagcaaaaagaatgccttagctagtgaaatacaggggctccgcactgtggagatgaagaaggggcccactgattcactagggatctccatagccggtggcgttggatctcctctgggcgacgtgcccatatttattgctatgatgcaccccacgggagtggccgctcagacccagaaacttcgggtaggagatagaattgtgacaatctgtggaacctcaacagagggaatgacccatacacaggccgtgaacctccttaagaatgcaagcggctctatcgagatgcaagttgtggcgggcggcgacgtgtcagtcgtgactgggcaccagcaggaaccagcgtcgagcagcctctccttcactggactgacgagctccagtatctttcaagatgatttagggcctccacagtgcaagtctatcacacttgagaggggccctgacggtctagggttctcaatcgtaggcggatatggttcacctcacggtgatcttccgatttacgtaaaaactgtgtttgcaaaaggcgcagccagtgaggatggacggttgaagcgcggtgatcagataattgccgtaaacgggcaatcgctcgagggtgttacacacgaagaggctgtggccattttaaagcgcacaaagggaactgtaacactgatggtcctgagctag

SEQ ID NO: 124992 - DNA, 6126 bp, synthetic construct
  misc_feature 1..6126: note = Description of Artificial Sequence: Synthetic coding sequence
  source 1..6126: mol_type = other DNA
atgttggaggccatcgataagaacagagcactgcacgctgccgaacgccttcagacaaaactccgcgagaggggggacgtagccaacgaggataagctgagcctgctcaaatccgtgctgcagtcaccactcttttcccagatcctgagtctgcaaaccagcgtacagcagctcaaagaccaggtgaatattgccaccagcgcaacctcgaatattgaatacgcacacgtcccccacctcagccccgctgtaattcctaccctccaaaacgagagcttcctgctgagtccgaacaatgggaatttagaggcattgactggtcccggtattccccacatcaatggcaagcctgcgtgcgacgagttcgatcagcttatcaagaatatggcacagggcagacacgtggaagttttcgagctcctgaagcctccgagcggaggactgggcttcagtgtggttggactccgctcagaaaacaggggtgaattaggcatctttgtgcaagaaatccaagaggggtctgttgcacatcgcgacggtagattaaaagagactgaccagattctcgctattaacggccaagctctggatcaaacaatcactcatcagcaggctatttcaattcttcagaaagcaaaagatacagtgcagctggtaattgctcgaggctctctgccgcagttagtctcccccatcgtttcacgcagtcctagcgccgccagcaccataagtgcccactccaatcccgtccactggcaacatatggagactattgagcttgtgaatgatgggagcggactgggtttcggcatcatcggggggaaggccaccggggtgatcgtgaaaactatcctccccggcggagtggccgatcaacacggcaggctatgcagtggcgatcacatccttaagatcggcgacaccgacctggccggaatgagttctgaacaagtcgctcaggttctgagacaatgcgggaaccgtgtgaagctgatgatcgcacgaggagccatagaggagcgaactgcccccaccgcgttgggcatcactttgtcaagctctccgacttctacacccgagctgcgagtcgatgcttctactcagaagggcgaggaaagtgagacttttgatgtggaattaacgaagaatgtccagggattgggaatcaccatcgctgggtacatcggggataaaaagctagagcccagcggcatctttgtgaagagtattaccaagagttccgcagtcgaacacgacggtaggatccaaataggggaccagatcattgctgtcgatggaacaaatctccaggggttcaccaaccaacaggccgtggaggtgctgaggcatacaggccagaccgttcttctgacgctcatgcggagaggcatgaagcaagaggccgagctgatgtctagggaagacgtaaccaaggacgccgatctgagcccagttaatgctagcatcatcaaggagaattatgagaaagatgaagacttcctgagctctacaaggaacacaaatatcctcccaactgaggaggagggataccccctgttatctgcagagatcgaagaaatcgaggacgctcagaaacaggaagcagctctgctgacaaaatggcagcgcattatgggcattaattatgagatcgttgttgcacacgttagcaaattttccgagaactcaggtctcggcatctcgctagaagctactgtcggacatcacttcatcagatccgttttgccagaaggtcccgttggccactccggaaaattgttctctggggacgagctactggaagtgaacggtatcactctattgggagaaaaccatcaggacgtcgtgaacatcctgaaagaactccccatcgaggtgacaatggtgtgttgtagacggacagtcccccctacgacgcagagcgagctggattccctcgatctctgtgacatcgaactgactgagaagccccatgtcgatctgggggaattcattggaagcagtgagacagaggatccagtgcttgccatgactgacgccggtcagagtacagaagaggtgcaagccccccttgcaatgtgggaagccggtattcagcacattgaactggaaaaaggctcgaaggggttgggatttagtattctggactatcaggacccaatcgatccagcttccactgtaatcattatccggagtctcgtgcccggaggcatcgctgaaaaggatggacgcctgctacctggcgatcgcctcatgttcgtgaatgacgtgaatctggagaacagcagtctggaggaggcggtggaggcactgaaaggcgcaccctctggtacagtgagaataggtgttgctaagcccctgcccctctcacctgaagaggggtatgtgtccgctaaggaagacagttttctttatccccctcactcttgcgaagaggccgggctagcagataagccgctgttcagagctgatctggcactcgtcggcaccaacgatgcggatctcgtcgatgagagcacctttgagtctccttatagtcccgagaatgatagcatctattctactcaggccagcatcttgtccctgcacgggtcgtcatgtggagatggcttgaactacgggagcagcctgccatcttcccctcctaaggatgtgattgagaactcttgtgaccccgtgctggatttgcatatgtcactcgaagaactgtacacccagaacctgctgcagaggcaggacgagaatacaccaagcgtcgacatttcgatgggtcctgcttccggctttaccatcaacgattacacccctgctaatgccatcgaacaacagtatgagtgtgagaatacaatcgtttggactgaaagtcacctcccatccgaggtgatcagctccgcagagctgccctccgtcctaccggattcagcggggaaaggaagtgaataccttctagaacagagttccctcgcctgtaatgccgaatgcgtgatgctacagaacgtgagcaaggagtcctttgagcggactatcaatatcgccaaggggaacagctccctcggcatgactgtgtccgccaacaaagacggcctgggtatgattgtgaggagtatcatccatggcggagccatctctagggatggcaggattgccatcggagactgtattctatccatcaacgaggagagtaccatctccgtcaccaatgcacaggcaagggctatgctgcggagacactccctcattgggcccgacattaagataacatacgtgcctgccgagcacctagaggagtttaagatctccctcggccagcagagtggccgggtgatggcgttagacattttctcctcctacactggacgtgacatcccagagctgccggagcgcgaggagggcgagggggaagagtctgagctgcaaaacactgcctatagcaattggaaccagccaagaagggtggaactatggagagagccatccaagtccttgggaatttccatcgtcggtggacgagggatgggaagcagattgtccaacggtgaagtaatgagaggcatcttcattaagcacgtgctagaggattcacctgctgggaagaatggaaccttgaaaccaggtgatagaattgtggaagtcgatggcatggatctccgagatgcaagtcatgaacaggcagtcgaagccatcagaaaagcaggaaatccagtagtgttcatggtccagtctatcataaaccgccctcgaaaaagccctttacccagcctgctccacaatctgtaccctaaatataattttagctccaccaatcccttcgccgactctcttcaaattaatgccgacaaggcaccttctcagtcagaatctgagcccgaaaaagcccctctctgtagcgtgccccctcctcctccctccgcctttgccgaaatgggatccgaccacacccagtcttctgcttctaagatttctcaggacgtggacaaggaagatgagttcggctactcttggaagaacatccgagaacgatatggcactctaactggggagctacacatgatcgagctagaaaaaggccattcggggttaggcctctccttagcagggaacaaagatcgcagtagaatgagcgtgtttatcgtgggaatcgacccaaacggggccgccggcaaggacgggcgattgcagatagcagacgaactcttggaaataaacggacagatcctatacggtagaagccaccaaaatgcctcaagcatcatcaagtgtgctccatctaaggtaaaaattattttcataagaaataaggacgccgtaaaccagatggctgtgtgccccggaaatgctgtagaacccctcccaagcaatagcgaaaacctccagaacaaggaaacagagcctacggtgacaacctcagatgcagcggtggatctgtctagctttaagaacgtgcagcatctggagctgcctaaagatcaaggcggattagggatagcgatctcggaagaagacaccctctcaggcgtgattattaagagtctgactgagcatggggttgccgcaacagacggccgccttaaagtgggagaccagatcctggctgtggatgacgaaatcgtggtgggctacccgatcgaaaagttcatcagtttgctgaagaccgcgaaaatgaccgtgaaactcaccattcacgctgaaaatccggattctcaggcggtcccctccgcggctggtgcagctagtggagagaagaagaactccagtcagtcgttgatggttccccagtctggcagtcctgagccagaatccatcagaaacacatcacgttcaagtaccccagccattttcgcaagcgaccccgccacctgtccaatcatccccgggtgcgaaacaaccattgagattagtaaaggtcggaccggacttggcctctcgatagtgggaggatctgacacgctgctgggcgccatcatcatccacgaagtctatgaggaaggggctgcgtgcaaggacggccgcctctgggctggcgaccaaattttagaggtcaatggaattgacctgcgcaaagctacccatgatgaagctatcaacgtcctgcggcaaacgccccagagagtccgcctaacactttaccgggacgaagctccctacaaagaggaggaggtgtgtgacacgctcacaatcgaactccaaaaaaagcctggcaagggtcttggactttcaatcgttggtaagcgcaacgacaccggtgttttcgttagtgacatcgtcaaagggggcatcgcagatgccgacggtaggctgatgcagggcgatcagatcttgatggtcaacggcgaagatgtgaggaatgccactcaggaggccgtcgccgccttgcttaaagtttctgaagggtccctttcttcgtttacgttccccctgtcgggctcgtctactagcgagtctctcgaatcctctagcaagaaaaacgctctggctagcgagatccaagggctgcgcacagtggagatgaagaaaggtcccaccgactccctgggtatctcgatcgctgggggggtcggcagtcccctcggtgatgttcccatcttcatcgcaatgatgcatccgacgggagtagctgctcagacacaaaagctgagagtcggcgataggatcgttactatatgcggcacctctacagagggtatgactcatactcaagccgttaaccttctgaagaatgctagcggatcaattgaaatgcaggtcgtggcaggcggggatgtatcagtcgtgaccggccaccagcaagagcccgctagcagctccctatcttttactgggctgacaagcagctccatcttccaggatgatctgggccccccacaatgtaagtcaataacactggagagaggtcctgacgggctgggcttttccatcgttggcggatatggcagtccacacggtgacctgcccatatatgtgaagacagtgttcgctaagggagccgcctccgaggatgggcgactgaaacggggcgatcagatcatcgccgtgaacggtcagtccttggagggtgttactcacgaggaggctgtggctatcctcaagcgcaccaaaggtaccgtcactctcatggtgctctcctag

SEQ ID NO: 124993 - DNA, 5853 bp, synthetic construct
  misc_feature 1..5853: note = Description of Artificial Sequence: Synthetic coding sequence
  source 1..5853: mol_type = other DNA
atgctggaagcgattgacaaaaatcgggcgctccacgctgccgagagactgcagacaaaattgagagagagaggtgatgtggcaaacgaagacaagctctccttactaaaatccgtgcttcagtcaccgcttttttcccagattctcagtttgcaaacatcagttcagcagttgaaggatcaagtgaatatcgccacctccgccacatctaacattgagtacgcccatgttccccacctctcccctgccgtcatccctacattacagaatgagagtttcctgttgtcccccaataacggcaacctcgaagctctgactggcccagggatccctcacatcaatggaaagcccgcttgcgacgaattcgaccagctgattaaaaacatggcacagggcaggcacgtagaggtgttcgagttgttgaagcctccatctggcggcctcggcttctccgtggtgggcttgagaagtgagaatagaggcgagctcggcatcttcgtgcaagagatccaggaaggctcagtcgcgcaccgggacggacgtctcaaggagacggaccagatcctggcaattaatggacaggcccttgatcagaccatcactcatcaacaggccatttctattctacagaaggctaaggatactgtgcagctagttattgcccgcggcagtctgcctcagcttgtatctcccattgtttcccgctctccaagcgctgcttcaacaatatccgcgcactctaatcccgtacattggcagcacatggagacaatcgagttggtcaacgacggatcgggattgggctttggaatcattgggggaaaagccactggcgtgatcgtgaagactatcctgcccggaggcgtagctgatcagcacggtagactgtgcagtggcgatcacatcttaaagattggcgacactgatctagccggaatgtcttctgagcaggtggcacaagttctgaggcagtgtgggaatcgggtgaagctcatgattgcgcgaggagccatagaagaacggacagctcccacagcactcggaatcacattatcttcctcccccacttctacacccgagctgagagtggacgcatctacacaaaaaggagaagagtccgagacattcgatgttgagctcaccaagaatgtccaaggcctcggaattactatcgccggatacatcggtgataagaaattagagcccagtggaatcttcgtaaagtcgatcacaaagtcaagcgctgtagaacacgatgggcgaatacagattggagatcagatcatagctgtggatgggacaaatttacagggcttcacaaatcagcaggccgtagaggtactcagacacactgggcagaccgtgctgctgactcttatgagacgggggatgaaacaggaagccgagctgatgagtcgggaggatgttacgaaggacgctgacctgtctcccgtaaatgccagtataatcaaggaaaactatgagaaagatgaggattttctgtcctcgacacgaaatactaacatcctccccacagaggaggaagggtacccactgctgtctgcagagattgaggaaattgaagacgctcaaaagcaggaagcagccctcctgactaaatggcagcgtatcatgggcattaactatgaaatcgtggttgctcacgtgagtaaattcagcgagaactccggccttggaatctctttagaagccaccgttggtcaccacttcattcggagtgttctgcctgaaggacccgttggccactccgggaagctgtttagcggtgatgagctcctagaggtgaacggtatcaccttgctgggcgagaatcaccaggatgtcgtgaatatccttaaagagctcccgatcgaagtcacaatggtgtgttgtagacggacggttccccccacgacccagagtgaactggattctctcggcatccagcacatcgaattagaaaaagggagcaagggcctcggcttttccatactcgattatcaagaccctattgacccagctagtaccgtgattatcatccggagcctggttcctggtggcatagccgagaaagacggaaggttactccccggcgaccggctgatgtttgtgaacgacgtcaatctcgagaactccagtctggaggaggccgtcgaggccctgaagggcgcaccctcggggaccgttcggatcggcgttgctaagccgctgccactcagccccgaggagggctatgtctcagcaaaggaagactcgttcttgtacccgccacactcatgtgaggaggcgggcctagcggataaacctctattcagggccgacctagctctcgtgggaactaatgacgccgaccttgtggatgagtcgactttcgaaagcccatattctcccgaaaacgatagcatctactctacacaggcttccatcctgagcctacacggctcatcttgcggggatggcctcaactacggcagcagtctgccctctagccctcctaaagatgttatcgagaatagctgcgaccccgtgttggaccttcacatgagtctagaagaactgtacacgcagaatttgctgcagagacaggacgaaaataccccttccgtggacatttccatgggccctgcctctggatttacaatcaatgactacacacccgccaacgctattgaacagcaatatgaatgtgagaacacgattgtctggacagagagccacttgccttccgaggttatctcttctgctgagctccccagtgttctgccagattccgccggtaagggatccgaatacctgctcgaacagagttctcttgcttgcaacgctgagtgcgtcatgcttcaaaacgtgtctaaagagtccttcgagcgcacaatcaatattgccaagggtaactctagccttggcatgacagtgtccgcaaacaaagacgggctcggaatgatcgtgcgcagtataattcacggtggggccatatcaagagatggtagaattgccatcggcgactgcattctatccattaatgaagagagcacaatctccgtgactaatgcacaggccagagcgatgctgcgccgccacagcttaattggacccgacatcaagattacctacgtacccgccgagcacctggaggaattcaagatctccctcggccagcagtcagggcgggtgatggccttggacatcttttcttcatacaccggaagagacatacccgagcttccggagcgcgaggagggggaaggggaggaatcggaactgcaaaatacagcatacagcaactggaaccaaccacggcgcgtcgagctttggcgagaaccctctaagtcacttggtatatcaatcgtgggtgggcgcgggatggggtcacgcctgagtaacggtgaagtgatgcgtggaattttcattaagcacgtgctggaggatagccctgctgggaaaaatggcacgctcaagccaggtgaccgcatcgtggaagctccttcgcagagcgagtccgagcccgaaaaagctcccctctgtagcgtgccgccccccccgccttccgccttcgccgagatggggagcgaccatacgcagagctccgcatccaagatctcccaggacgttgacaaagaggacgaatttggttatagctggaagaacattcgcgagagatacgggaccctgacaggggagctccatatgattgaattagagaaagggcacagtgggctcggcctgtctcttgccggaaacaaggaccgttcacggatgtccgtgttcattgttggcattgaccctaatggggctgcaggaaaagatggccgccttcagattgcggatgagctgctcgagattaacggacagatcttatacggcagatctcaccagaatgcctcttctatcataaagtgcgcccctagtaaagtcaaaatcattttcattagaaacaaggatgcggtcaaccagatggccgtgtgtccagggaacgccgtagaaccgctgccctccaatagtgaaaacctgcagaacaaagagaccgaacctacagtcacgacctcagacgccgccgtggacctctcctcctttaaaaacgtgcagcacttggagctacccaaagaccagggaggcctgggaattgcaatctcagaagaggatacgttgtcgggagtgatcataaaaagcctaacagaacatggagttgccgctaccgatgggaggttgaaggtcggtgaccagatccttgcggtcgatgatgagatcgtggtgggataccccattgagaaatttatctctctcttgaagacggccaagatgaccgtgaaacttaccatccatgctgagaatcctgatagccaggcggtgccatccgccgcaggagctgcatctggtgaaaagaagaactctagccagtctcttatggtgccacagtctggcagcccggagccggagagtattcggaatacgtcccggagctccacccccgctatattcgcttccgaccccgccacctgccctatcatcccgggttgtgagaccaccattgaaatcagtaaaggaagaaccgggctaggactgagcatcgtcggaggctctgatactctgctgggtgcaattatcattcacgaggtgtacgaggagggggccgcttgcaaagacggaagactgtgggccggtgatcagattctggaggtgaatgggatagatttacggaaggcaacacacgatgaggctatcaatgtgcttcgtcagacccctcagcgcgtgaggctcaccttgtacagagacgaggctccatataaggaagaggaagtgtgcgataccctcacaattgaattgcagaaaaaaccaggaaagggactgggcctgagtattgtgggcaagcgcaacgacacaggcgtctttgtctcggatatcgtcaagggcggcattgcggacgcagacggaaggcttatgcagggagaccagattctgatggtgaacggcgaagacgtgagaaatgcaacccaggaggctgtggcggctctcttaaaatgcagtctggggactgttacactagaggtcgggagaatcaaagccggcccattccactctgagcgcagaccatctcaatcatcacaggtcagtgagggcagcttatccagttttacattcccactgtcgggttcctccaccagcgagagcctggaaagcagctccaaaaaaaatgcgcttgcttcagagatccaaggactccgtactgtggagatgaaaaagggccctacagactctctcggcattagtatcgcagggggggtcggtagtcccttaggtgacgttcccatcttcatcgctatgatgcacccgacaggcgtcgctgctcagacgcagaaacttagggttggtgaccgtatcgttaccatttgcggcacctctaccgaggggatgacacatactcaggccgtgaatctgttgaagaatgcttccgggtctattgagatgcaggtcgtcgccgggggagatgtatctgtcgtgacgggccaccagcaagagcctgccagctctagcctaagttttacagggctgacaagttctagcatattccaggacgatctggggcctccacagtgtaagtccattaccctggaacgcggaccagacggtctcggattctcgattgtcggaggctacggatcacctcacggggatctcccaatttatgttaaaacggtgttcgccaagggtgccgcttcagaggatggacggctgaaaagaggggatcagatcatcgcagtgaacggccagagcctggagggggtgacacacgaagaagcagtggccattctgaagcggaccaagggtacagtcacactgatggtgcttagctag

SEQ ID NO: 124994 - DNA, 915 bp, synthetic construct
  misc_feature 1..915: note = Description of Artificial Sequence: Synthetic coding sequence
  source 1..915: mol_type = other DNA
atgcaaggcgaccaaattttgatggtcaatggagaggatgtcagaaacgccacacaggaagccgtggccgccctcctcaagtgcagtctgggaacggtaactttggaggtcgggcgaataaaggccggccccttccactccgagcgccggcctagtcaaagctcacaggtgtctgaaggctccctctcttcgtttacatttccccttagtggatcttctacttctgagtcgctggagtcctcctccaaaaagaacgcacttgccagtgaaatacagggcttacggaccgtggagatgaagaaagggcccacggacagtctggggataagcattgctggtggagttggctcccctctgggggacgtaccaatatttattgccatgatgcatcccaccggggttgccgcacagacccaaaagctgagagtaggcgacagaatcgtaactatatgcgggacttccactgaggggatgacccacacccaagccgtgaacttactcaagaatgcaagcggatcaatcgaaatgcaggtggtggctggaggcgacgtgtcagttgtcaccggtcatcagcaggagcctgccagttcgtctctatcatttacaggcctgacctcgagctccatattccaggatgacctcgggcctcctcagtgcaaatccattaccttggaacgtggccccgacggactcggattcagcatcgtcggtggctacggctcacctcacggggatctacctatctacgttaagactgtgttcgcgaagggtgctgcttccgaggacggccggctaaagagaggagatcagattatagccgtgaatgggcagagcctggagggtgtcactcacgaggaagccgtggctatactgaaacgtactaagggtacagtaacattgatggttctatcatag

SEQ ID NO: 124995 - DNA, 6126 bp, synthetic construct
  misc_feature 1..6126: note = Description of Artificial Sequence: Synthetic coding sequence
  source 1..6126: mol_type = other DNA
atgcttgaggcgatcgataaaaacagagctcttcacgccgccgagagattgcagacgaagctgcgcgagcgtggagacgtcgcaaatgaagataagctctctctcctcaaatctgtcctccagagtccactgttctcccagatcctgtccctgcaaacgtcagtgcagcagctgaaagaccaagtgaacattgctacttcagccaccagcaacatcgaatatgcccacgtgccccacttgagcccagccgttattccaactttacaaaacgagagcttcctgctgtcccctaataatggaaacttggaagccctgacaggccccgggattccgcatattaacggaaagcccgcgtgtgacgagttcgaccagctgatcaagaacatggcacaaggccggcacgttgaggtcttcgagctgttaaagcccccatccggaggccttgggttcagtgtagtaggacttcgaagtgagaacagaggggagctcgggatctttgttcaggagattcaggaaggctctgtagcacaccgagacggaaggctgaaggaaaccgatcagattctagcaatcaatggacaggctctggatcagactattacacaccagcaggctatctcaattctccagaaagcgaaggataccgtccagcttgtgatcgctcggggcagcctgccgcaactcgtgtctcccatcgtcagtaggtcaccatcggccgctagcaccatttccgcccatagtaacccggtacactggcagcacatggaaacaatcgaactggtgaacgacgggtctggcctcggatttggaataataggtgggaaagccacgggcgttatcgtcaagaccatcttgcctggaggggttgcagaccagcacggtagactgtgttcgggggaccacatcctgaaaataggagacaccgacctggcagggatgagttccgagcaagttgcacaggttcttcggcagtgtgggaaccgcgtgaagttgatgatagctcgaggcgcaatcgaggagcggaccgctccaacagctctaggcataaccttgagctcatcccctaccagtacgcctgaacttcgagtggatgcctcaacgcaaaagggagaagagagcgagacgtttgatgtagagctcaccaagaatgttcagggcctcggcattaccatagcagggtacatcggcgataagaaacttgaaccatcaggcatttttgttaaatcgatcactaaatcatccgcagtcgaacacgatggcaggatccagataggcgatcagatcatcgccgtggatggcaccaacctccaaggcttcacaaatcagcaagccgtagaggtgttgcgccataccggacagaccgtccttcttactctgatgcgaagaggtatgaagcaagaggcggagctgatgtcccgggaggacgtaaccaaagacgctgacctaagtcctgtcaacgctagcattatcaaagagaattatgaaaaggacgaagatttcttatcctctacaagaaatactaatattctgccaacggaggaagaagggtatcccctgctcagcgcagagatcgaagagattgaagacgctcagaagcaggaggctgccctactcaccaagtggcagcgtattatgggtataaattatgagatcgttgtggcacacgtgagtaagtttagtgaaaactccggcttaggaatctctctggaagctacggtgggacatcattttattagaagtgttttacccgaagggcctgtgggtcacagcggaaagcttttctcaggggacgagctcttagaggtgaacgggatcaccctgctgggggagaaccaccaggatgttgtgaacattctgaaagagctgcccatcgaagtgacaatggtgtgttgccggaggactgtgccacctactacgcaatccgagctggatagcctggatttatgcgacattgagctcaccgagaaaccccacgtggacctcggggaatttatcggttcctccgaaaccgaagaccctgtgctggctatgacagacgcaggtcagagcacagaggaagtgcaggcccccctggccatgtgggaagccggtattcagcatattgagctagaaaaaggttccaagggtctgggcttttccattttagactaccaggatcctattgacccagcatcaacggtcatcatcatcaggagtctagtgcccggcggaatcgctgagaaggacggtcgccttttaccgggtgataggctgatgttcgttaacgacgtgaacctggagaattcctcactcgaagaggccgtcgaagctctaaaaggcgctccatctggcacagtgagaatcggagtcgcgaagccacttccattatcacccgaggagggctatgtctcagccaaggaggactccttcctgtaccctccccattcatgtgaggaagcaggactggcagacaagcctctgttccgtgctgatctagctttggtgggaacaaacgatgcagaccttgtcgacgaaagcacctttgaatccccatattccccagagaatgattcgatttacagcacccaggcctcgattctgagtctgcatggatctagttgcggcgatgggctgaattatggttcaagtctgccatcatctcctcccaaagatgtcattgagaactcatgcgaccccgtgctagacttgcacatgagcctggaagagctttatacccaaaatctgctgcagaggcaggacgagaacacacccagcgtggacattagcatgggaccagcatccgggtttactattaatgactacacaccagcaaatgccatcgaacaacagtatgagtgcgaaaatacaatcgtgtggaccgagagccacctaccttcagaggtgatctccagcgctgagctcccatctgttctccccgattccgctggtaaaggttctgagtacctccttgaacagtcaagcttagcctgtaacgctgagtgcgtcatgctccagaacgtgagcaaggagtccttcgagagaaccataaatattgccaagggtaactcctcactgggcatgacggtttctgccaataaagatggtctgggtatgatcgtcagaagcatcatccacggcggagctatctcccgagacggtcgtattgctatcggggattgcatcctctcgatcaatgaggagagcacaatcagcgtgactaacgcccaggcccgcgccatgctgaggcggcacagtcttataggaccagatatcaaaattacttacgtgccggcagagcatcttgaagagttcaagatctcacttgggcagcagagcggccgagtcatggcactcgatatcttttcttcatacaccgggagagatattccggaactccctgagagagaggaaggtgagggcgaagaatccgaactgcaaaacacagcatattccaattggaaccagccacgccgggtggaactgtggagggagccgagtaaatcccttggcatatctatagtaggagggaggggaatgggtagccgtctgagtaacggcgaagtgatgaggggcatttttataaagcatgtgctggaggattctcctgcagggaaaaatggtaccctgaagcccggcgacagaatagtcgaagtggatggaatggacctgagagacgcatcccatgagcaggccgtggaggctatccgcaaagctggcaaccccgtggtcttcatggttcagtccattatcaatcgacccagaaaatctccactcccgtctcttctccataacctttacccaaagtataatttttcatccacaaatccttttgcggactccctgcaaatcaacgccgacaaggcaccaagtcagtcagaatcagagccagaaaaggcgcccctctgctctgtcccgcctccacctccatcagcatttgctgaaatgggatcagaccatacccagagcagcgcatctaaaatttcgcaagacgtggataaggaggatgagttcggttattcttggaaaaacatcagagaaagatacggcaccctgaccggcgaactgcacatgatagagctcgaaaagggacatagcggacttggcctcagtcttgctggcaataaggaccgttctagaatgtccgtgttcattgtgggaattgatccgaacggagccgcaggcaaggatgggcggctccagatagctgatgaactcctagagattaatggacagatcctttacggtcgaagccaccagaacgctagttccataattaagtgcgctccctctaaagtcaagatcatttttatacggaacaaggatgctgtgaatcagatggctgtgtgtccggggaacgcagttgagccactgccttccaacagcgagaacctccaaaacaaggagaccgagccaaccgtcacaacgtcggatgccgccgttgatctgagctcttttaagaatgtccagcacctggaattaccaaaagatcagggcggacttggtattgctatcagcgaagaagacaccctctccggggtgatcataaaatctttgaccgagcatggcgttgcagctacagacgggcgcttgaaggtaggggatcagatccttgccgttgacgatgagattgtcgtgggctacccaatcgaaaagtttatcagtttactcaagactgcaaagatgacagtgaaactgactatccatgccgagaacccggatagtcaggcggttccatccgcggcaggagccgcttcaggggagaagaagaactccagccagagcttaatggttcctcaaagtgggtctccagagcctgagtcgattcgcaatacctctcggagcagcacacccgcaatcttcgccagtgatccggccacatgccccatcatccccgggtgcgagacaaccatagaaataagcaaagggcggaccggactgggcctctcaattgttggcgggagtgatacattactgggcgctatcattattcacgaggtgtacgaagagggtgctgcgtgtaaagacgggcgtctttgggccggtgaccagatcttagaggtgaatggcatcgacctccggaaggcaacccacgacgaggctataaacgtgctgagacagaccccccagcgtgttcggttaacactgtaccgcgacgaggcgccatacaaggaggaagaagtctgcgatactttgacgatcgagctccagaagaagcccgggaaaggcctgggcttgtctatcgtaggtaagagaaacgataccggcgttttcgtgtcggacattgtcaagggcggaatcgcagatgcagatgggcggctgatgcagggcgaccagatccttatggtgaatggagaggacgttcggaatgcaacccaagaggccgtggctgcacttttaaaagtctccgaggggtcactcagttcctttacctttcccctgagcgggtcttccacctcagaatctctggaatctagcagcaagaagaatgccctggcttccgagatccagggcctccggacggtggagatgaagaagggaccgaccgactccctgggaatcagcattgcaggaggcgttggatctccactcggagatgttcccatctttattgcaatgatgcaccccactggggttgcagcacagacccagaaactcagagtaggcgaccggatcgtaacaatttgcggtacaagcactgaaggaatgacccatactcaggctgtgaacctgctgaagaacgcgtcggggtccatcgaaatgcaagtcgtggccggcggtgatgtgagcgtggtgacagggcatcaacaggagccagcaagctcttctctctctttcaccggcctgacgtcctcctctatcttccaggacgatctggggcccccccagtgcaaatcaattaccctggagagagggcccgatggcctaggcttctctatcgtgggcggctacggcagtccccatggcgatctacccatctatgtaaagaccgtttttgctaagggagccgcctcagaggatggccggttgaaaagaggagaccagatcattgcggtcaatgggcagtcccttgagggggttacccacgaagaggcagtggctattctgaagagaacgaaagggacagtgaccttaatggttcttagctag

SEQ ID NO: 124996 - DNA, 6114 bp, synthetic construct
  misc_feature 1..6114: note = Description of Artificial Sequence: Synthetic coding sequence
  source 1..6114: mol_type = other DNA
atgctcgaggccatcgataaaaatagagccttgcatgctgccgaacggctgcaaaccaagttacgcgaaagaggagacgtggctaacgaagacaagctgagcctgctgaaatccgtgctgcagagccctctattcagccagattctgtccctccagacgagtgtgcagcagctgaaggatcaggtcaacattgccacaagtgctacgagtaacatcgagtatgcacacgtgcctcacctgagcccagccgtcattccaaccctgcagaatgaatccttcctgctgagtcctaacaacggtaacttggaggctctcacggggcccggcatcccacatatcaacggcaaacccgcgtgtgatgagtttgatcagctgattaaaaacatggcacaaggacggcacgtggaagtgtttgaattgcttaaacctccctccggcggtcttggtttcagcgtagtgggtctgagatctgagaaccgtggggagctcggaatctttgttcaggaaatccaggaggggtccgtggcacatagggacggacggttgaaagaaaccgaccaaatcttggccatcaatggccaagcattggaccagactatcactcatcagcaggcaatttcaattttacagaaggcaaaagatacagtacagctggtcatcgcaaggggatcactcccccagcttgtctcaccgatcgtgagcaggagcccatctgcggcttcgacaataagcgcccacagcaaccctgtgcattggcaacacatggagacaatcgaactggtgaacgatggaagtgggctgggatttggcattatcggggggaaagcaaccggcgtcatagttaaaaccatacttcctgggggggtggccgaccagcatggccgcctgtgttccggggatcacattctcaaaattggggacacagacttagcaggcatgagctcggagcaggtagctcaggtgctccggcagtgtggcaatagagtgaaactgatgatagcccgtggtgcgatcgaggagcggacagcgcctacggccctggggataacactgtcttcatcaccaacctctacacccgaattacgtgtcgacgcttccactcagaaaggcgaagagagcgagacttttgatgtagaattgaccaagaatgtgcaaggcttgggcatcaccatcgctggatacatcggggacaagaaactcgaaccctctgggattttcgtaaagtctataaccaagagctctgcagtggagcacgatgggagaattcagatcggcgaccagattatcgcagtcgacgggacaaacctacagggcttcacaaatcagcaggcagtcgaagtgctacggcacaccggccagacagtactactaacattaatgcggcggggaatgaagcaggaggccgagcttatgagcagagaagacgtgactaaggacgcagatctctcaccagtgaacgcatccataattaaggagaactacgagaaggacgaagacttcctaagctccacacggaatacaaatatccttccgaccgaggaggaggggtaccccttactgagtgcagaaattgaggaaattgaggacgcccagaaacaggaagcagctttgcttactaagtggcagaggattatggggattaattacgaaattgtcgtcgcccacgtctcaaaattcagcgagaattccggcctgggcatatcccttgaggcaacagtcggacaccatttcatcaggagcgtcctaccagagggaccagttgggcattcaggcaaattattcagcggcgacgagttgcttgaagtcaatggtatcacactgctgggtgagaatcatcaggatgtcgtcaacatcctgaaggaactgcccatcgaggtgaccatggtctgctgtagacgcactgtacccccaacaacccagtccgaacttgacagtttggacctttgtgatatagagttaacagaaaaaccccacgtggacctcggagagtttatcggaagcagcgagaccgaggacccagttctggctatgacagacgcagggcaaagcacagaggaggtccaggctccattagccatgtgggaggctggcatccagcacatagagcttgaaaagggatccaagggcctgggcttttccatactcgattatcaggacccaattgacccggcctcaactgtgatcatcattcgctctttggtgcccggtgggattgctgaaaaagacgggcgactgctgcccggtgatagactgatgtttgtgaacgacgttaatctggaaaattcgtctctcgaggaggcggtggaggccctcaagggtgcacctagtgggacagtccgaattggagtggccaagcctctgccccttagtcccgaggaggggtatgtgtcagccaaggaggacagcttcctttacccaccccatagctgcgaggaggctgggctggccgacaaacctctgttccgagcggacctcgccctggtggggactaacgacgccgatttggtggacgagtccactttcgagtcaccctactctcccgaaaacgactctatttactccacgcaggcgagcatcctcagcctgcacggatccagttgcggtgacggactgaactatggaagctcacttccctcttctcctccaaaagacgtaatcgaaaactcatgcgatcctgtcttggacctgcatatgtcattagaggaactgtatacacaaaacctattgcagaggcaggatgaaaacactccttccgttgatatttctatggggcctgcgagcgggtttaccataaacgactacacccccgctaacgctatcgaacagcagtatgagtgcgaaaacaccatcgtgtggaccgagtcacacctcccctccgaagtaattagcagcgccgagcttccttcagtgctgcccgatagcgccggaaagggcagcgaatacttgctggaacagtcctcactcgcctgtaatgctgagtgtgtaatgctgcaaaatgtgagcaaagagagtttcgagcggaccattaacatagcgaagggaaattcatcactgggaatgacagtctctgccaataaagacggactgggcatgattgtgaggagcatcattcacgggggggcaatctcacgggacggacgcatcgccatcggagactgcatactgtcaatcaacgaggaaagcaccatatctgtgacgaatgcgcaagccagagctatgttgcgacggcacagcctcataggacccgacatcaaaatcacatacgtgcctgctgagcatctggaagagtttaagatttctttaggtcagcaatcaggcagggttatggctctggacatcttctcttcttatactgggagagacatcccggagctacccgaacgagaagagggtgagggcgaggagagcgagctgcagaacacagcatacagtaattggaatcagccacgcagggtggagttgtggcgtgagccttcaaagtctctcggtatctctattgtgggcggaaggggcatgggcagccggttgtcaaatggggaggtgatgcgcggtatctttataaagcacgtgctggaggactcccctgcgggcaaaaacggcaccctgaaacctggggatcggatcgtagaagtggatggaatggacctgagggatgcttctcatgagcaggcagtagaggccattcggaaagctggcaacccagtagtgtttatggttcagagcattattaatagacccagggccccatcccagtccgagagcgagccagaaaaagcacctctctgctcggtaccccctcctcccccaagcgcttttgctgaaatgggtagtgaccacacccagtccagcgctagtaagattagccaggacgtcgataaagaagacgagttcggatattcttggaagaatatacgagaacgatacggtactctcactggcgagctgcacatgatcgagctggaaaaggggcacagtggtttagggctcagcttagcaggtaataaggaccgctctcgtatgagtgtgttcattgttgggatcgatcctaacggtgcggctggcaaggatggacggctgcagattgccgacgagttgctggaaatcaatgggcagatcttatacggccgaagtcaccaaaacgctagctctattataaagtgcgcgccatctaaagtgaaaataatcttcatccggaataaagatgccgtcaaccagatggcagtgtgtcccggtaatgcagtggaaccactgcccagtaactccgagaatctccagaataaggaaacagaaccaaccgtgactacatcagacgccgcagtggacttgagctcctttaaaaacgtgcagcatctggagttgcctaaggaccagggagggctgggcattgccatctctgaagaggatactctcagcggtgtgatcataaagtcactgacagaacacggggtggctgccaccgatggaagattgaaggtgggagaccagattctggcagtggatgatgagattgtggtcgggtaccctatagagaagtttatctccctcctgaaaacagcaaaaatgactgtcaagctcacaatccacgcggagaatcctgactcccaggcagtgcctagcgccgccggtgccgcctcaggggaaaagaaaaacagcagtcaatccctgatggttccacagtccggaagtccggaacccgagtctatcaggaatactagcagatcaagcacacctgcaatctttgcctctgaccccgccacctgcccaatcatacccggctgcgaaaccacaatcgagattagcaagggaaggaccggtctcggcctctccatagtggggggctccgacaccttactgggagcgattatcattcacgaggtctatgaagaaggagccgcatgcaaggacggacggctctgggccggcgaccaaatccttgaggtcaatggcatcgatctgaggaaagcgacgcacgatgaggctatcaacgtattaaggcagacaccgcagcgcgtccgcttaacactgtatagggacgaggccccctacaaggaggaggaggtatgcgacacactaaccattgagctgcagaaaaagcctggaaagggccttggactgtcgattgtggggaagaggaacgacaccggggtctttgtgtctgacatcgttaagggtggaatcgccgatgctgacggtagattgatgcaaggggatcaaatcctgatggtgaatggcgaggatgtcaggaatgccactcaggaggctgtggcggcgctcttgaagtgcagcctcggcaccgtgaccctggaggttggcaggatcaaagccggaccttttcattccgagaggaggccaagtcagtccagccaggtgtcagaggggtccctgtcctcattcaccttcccccttagtggatcttctacctccgaaagcctggagtcatcgagcaagaaaaacgccttggcctccgagatacaaggactgcggacggtagagatgaagaagggtcctacagactctctgggtatctcaatcgctggcggggttggctcccccctgggggacgtgccaatcttcatcgcaatgatgcatccaactggggtggctgcacagacacagaagctcagggttggtgaccggatcgttacaatctgcggaacttccactgagggaatgactcacacccaggccgtcaacctgctgaagaacgcctctggtagtattgaaatgcaagtggtagccggaggtgacgtcagtgtggtgaccggccaccaacaggaaccggcctctagctctctgagctttacaggactcacctcctctagtatctttcaagatgatcttgggccaccacagtgtaagtctattacactcgagcgcggccccgatggccttgggttcagcatcgtgggagggtatggatccccccacggtgacctcccaatatacgtcaagaccgtgtttgccaagggagcggcctctgaagatggtcgtcttaagcgcggcgaccagattatagcagtgaatggacagtctttggaaggtgtgacccacgaagaggccgtcgctatcttaaaacgcaccaagggtacagttaccctcatggtgctgagctag

SEQ ID NO: 124997 - DNA, 6027 bp, synthetic construct
  misc_feature 1..6027: note = Description of Artificial Sequence: Synthetic coding sequence
  source 1..6027: mol_type = other DNA
atgcttgaggccatcgacaaaaaccgcgcactccacgctgccgaaagacttcagactaagttgcgcgagcggggcgacgtggccaatgaggacaagctgtctctgttaaaatctgtgctgcagtcccccctattttcacagatactgtcactccagacatctgttcagcagctcaaagaccaagttaacatcgccactagcgcgacatccaatattgagtacgcccatgtgcctcatcttagtccagcagtcatccctaccctgcaaaatgagagttttctcctgtcacccaataatggtaatttggaagcactaactggccctggaatcccccatattaacggcaaaccggcatgcgacgagtttgatcaactaatcaaaaacatggcccaagggagacacgtggaagttttcgagctgttaaaacctccctccggaggccttggattttcagtggtgggcctgcggagcgaaaacaggggagagctcgggattttcgtgcaggagatacaagagggcagtgtcgctcacagggatggacggctaaaggagactgatcagatccttgcaatcaacggtcaggccctggatcagacaataacacatcaacaagccatcagcatcctacagaaagccaaggatacggtacaacttgtcatcgccagaggcagcttaccccagctggtgtcccccatagtgagtagatcacccagtgccgctagcacaatcagcgcccattccaatcccgtacattggcaacatatggaaaccatagaactcgtaaacgacggctcggggttaggtttcggcataatagggggcaaggctacgggggtgattgtgaaaaccattctgccgggaggagtggccgaccagcacgggcgcctgtgctcgggggatcatatcctcaagatcggcgatacagatttggcaggcatgtcctccgagcaggttgcacaggtccttcgccagtgcggaaatcgagtgaaactgatgattgcccgaggcgccatcgaagagcggacggctcctactgccttaggtatcactctgtctagctccccaaccagtacacctgaacttcgtgtcgatgcctcgacacagaagggggaggagtccgagactttcgacgtggagcttacaaagaatgttcagggattgggaatcaccattgcaggctatataggcgacaagaagctcgaaccatccggtatcttcgttaagtcaattactaagagttccgctgtagagcacgacggccgtatccaaattggcgaccagatcatagctgtagatgggacaaatctgcaggggtttaccaatcagcaagccgtcgaagtattgaggcacaccggacaaaccgttctcctgaccctcatgcgacgaggcatgaagcaagaggcagaactgatgagcagggaagatgtcaccaaggatgccgatctcagtccagtgaatgcgtccataattaaagagaactacgagaaagacgaagactttttgagctcaacacgaaatacaaatattctccctaccgaggaagaaggctatcccctcctgagtgccgagattgaagaaattgaagacgctcagaagcaagaagcggccctgcttacgaaatggcagcgtatcatggggattaattatgaaattgttgtcgcccacgtcagtaaattctctgagaacagtggactgggaatctccctcgaagccacagttggccatcattttatcaggtccgtcttgcccgagggcccagtgggccattctggtaagctgttctctggagatgagctcctagaggtgaatgggatcaccctgctgggagagaaccatcaggatgtggtgaatatcctcaaggaattgccaatagaagtaacaatggtatgctgccgccgcacagttcctcccacgacccagtcggagctggatagcctcgatctgtgcgatatcgaattgacagagaaacctcatgttgatttgggcgagttcatcggtagcagcgagaccgaagatccagtcctggccatgacagacgcaggccagtcaacagaagaagtccaggcgccgctcgctatgtgggaggccggtatccaacacatcgagttggagaaggggtccaagggccttggcttcagtatcctggattatcaggaccctatcgaccctgcttccaccgtcatcatcattaggtccttggtacctggaggcatcgctgagaaagatggccggttactacctggtgatcggctcatgttcgtgaatgatgtcaatttggagaattcaagcctcgaagaggctgtggaggcactgaagggagctccatccggaacggttagaatcggagtggcaaaacctcttccactgtcacctgaagagggctatgtcagcgcgaaggaagactcatttctgtatcccccccatagttgcgaagaagcggggttagccgacaaacccctgttcagagctgacctggccttggtaggtaccaacgatgcagatcttgtggatgaaagcacctttgagagcccttacagcccggagaacgacagcatttattctacacaggctagtatactatccctccacggatcgtcatgtggcgatggattgaactacggttcaagcttgccatcttctcctccgaaggatgttatcgagaactcatgcgaccccgtgctggaccttcatatgtccttggaagagctttacacccagaatctcttgcagcggcaggacgagaacacaccatctgtggatatcagcatgggtccggccagtggtttcaccattaatgattacacacccgctaatgctatcgagcagcagtatgaatgcgaaaacactattgtatggacggagtcccatctcccctccgaggtgataagctctgcggaattgccaagtgtcctcccggactctgctggtaaaggctctgaatatctcctcgaacagagttccttggcatgcaacgccgaatgcgtgatgctccagaacgtgagcaaagagtcgtttgaaaggactatcaatatagctaagggaaattcttccttgggcatgaccgtaagcgccaacaaggacggactgggtatgattgtcagatccatcatacatggcggcgctatcagcagagatggacgcatcgctataggcgactgtatcctgagcattaacgaggaatccaccattagcgtaaccaatgcccaggccagggctatgctacgacgacactcgctcataggtcctgacataaagattacatacgtccccgccgaacacctcgaagaatttaaaatcagccttggccagcagtccggccgggtcatggcacttgacatattctcatcctacacaggaagagacatccctgagctgccagagagggaggagggggagggggaggagagcgaactccaaaacaccgcatacagtaactggaatcaaccaaggcgcgtggaactctggcgagagccctccaagagcctgggtatcagcatcgtgggtggaaggggtatggggagtcggctttcaaatggagaggttatgaggggcatcttcattaagcacgtgttggaggactccccagcaggcaaaaacggtactttaaagccgggagatcggattgtggaagtggacggcatggatctgcgagacgcctctcacgaacaggccgttgaggcaattcgtaaagccgggaatcctgtggtgtttatggtgcagtcaataattaacagacccagggccccatcccaaagtgagtcggagccagaaaaggcaccattgtgctccgttcctccccctcctcccagcgcattcgcagagatgggctctgatcacacccagtcctcagcttccaagattagccaagacgttgacaaggaggatgaattcgggtattcatggaaaaacatcagggaacggtacggcacactcacaggcgagttacacatgattgaactggaaaaaggccattccggtctcggcctctccctggccggcaacaaagacaggtctcggatgagcgtgttcatagtgggaattgaccccaacggagcggccggaaaagatgggcggctgcaaattgctgatgaacttttagagattaatgggcagatattgtacggtcgctcacatcagaacgcctctagcatcattaagtgtgcgccatctaaagtgaagatcatctttatacggaacaaagacgccgtcaaccagatggccgtctgccctgggaatgctgtggagcctctgccctctaactctgaaaaccttcaaaacaaggagaccgagcctaccgtcaccacgtccgatgctgccgttgatctgtcctcatttaaaaacgtccagcacctcgagctgcccaaggatcagggagggctggggatcgcaatctccgaggaagacactttgtcaggcgttatcatcaaaagtttgaccgaacacggtgttgccgctacggacggtagactgaaggttggagaccaaatcctcgccgtggatgacgagattgtggtcggttaccctatcgaaaagtttatcagcttacttaagaccgccaagatgaccgtgaaactgaccatacatgcagagaaccctgacagccaagctgtaccctcagccgccggggctgccagtggagagaaaaaaaactcctcgcagagcctgatggtcccacagagcgggtccccagaaccggaatctattcgaaacacctcaagatcctcaacccccgcaatattcgcttccgaccccgccacctgccccatcattcctggttgtgagacgactatagaaatcagtaaaggccgcaccggtctgggactgtcaatcgtgggtggctcagacaccctcctgggcgcaatcatcattcatgaagtgtatgaagagggcgcagcgtgcaaggatggccggttgtgggcgggagaccagatcttagaggtgaatggaatagatctgcgaaaagccacacacgacgaggccattaacgtgctgaggcagacacctcaaagagttaggctcacattgtacagagacgaggctccgtacaaggaggaagaagtatgcgacaccctcacaatcgagctccagaaaaaacctggaaagggcctggggctctctatcgttggcaagaggaacgacactggagtcttcgtgagtgatatcgttaaaggcggtatcgcggacgccgacgggcggctaatgcagggtgaccagatcctcatggtcaacggggaggatgtccgaaatgcaactcaagaggctgttgcagctttattgaaggtgtctgagggctcactgtcctccttcactttcccactgagtgggagttccacctccgaaagcctagagtcgtcctcaaaaaaaaatgctctcgcgtccgaaattcaggggttgcggaccgttgagatgaaaaagggaccgacggatagtctcggaatttcaatcgctggcggagtcgggagccctcttggagatgtgcccattttcatcgccatgatgcacccaaccggggtcgcggctcagacacaaaagcttcgcgtcggagataggatcgtcacaatctgtggaacaagtaccgagggcatgactcacacccaggccgtgaaccttctgaaaaacgccagcggctcgatcgaaatgcaggtcgttgctggcggcgatgtcagtgtggttactggtcatcagcaggaaccagcttcttcctcgctgtccttcactggcctgacctcatcctcaatctttcaggatgacctaggccctccccagtgcaagagtatcaccctggaaagaggaccagatgggttggggtttagcatagtgggaggctacgggtctcctcatggcgatctgcccatctacgtgaagacagtgttcgcgaagggcgcagccagcgaggacggacggctgaaacggggggatcagattatcgcggtgaatgggcagagcttagagggagttacacacgaggaggctgtagcaatactcaagcggactaagggtacagtgacgcttatggttctctcgtag

SEQ ID NO: 124998 - DNA, 1089 bp, synthetic construct
  misc_feature 1..1089: note = Description of Artificial Sequence: Synthetic coding sequence
  source 1..1089: mol_type = other DNA
atggagacggacgccccccagcccggcctggctagtccagactcccctcacgacccctgcaagatgttcattggcgggctctcctggcagaccacacaggaggggctccgcgagtactttggccaatttggggaggttaaagaatgcttggtaatgagagaccctctcaccaagaggtctcgcgggtttggatttgtaacctttatggaccaggcgggagtggataaagtgctagcgcaatcccgtcatgagctggatagtaaaactatcgacccaaaagttgctttcccccgccgcgctcagccaaaaatggtaactcgaaccaagaagatttttgtaggaggactttcagtgaacacaacggtggaggacgttaagcaatattttgaacaattcgggaaagtggatgatgcaatgcttatgttcgacaagactacgaatcgccaccgcggcttcgggtttgtcacttttgagtctgaggacattgtggaaaaagtttgcgagattcatttccacgagattaacaacaagatggtggaatgtaagaaggctcagcccaaggaggtgatgtcgcctaccgggtctgcacgtggtcgaagtcgggtgatgccctatggcatggacgccttcatgttggggattggcatgctgggctaccccggattccaagctacgacatacgcctctaggagttatacggggttggcgcccgggtatacataccagtttcctgaattccgggtcgagcggacccctctgccatctgcacctgtgttaccggaattgacagcaatccccctgaccgcctacgggcccatggccgctgctgcagccgccgccgccgtggtgcgaggaacaggctctcacccctggacaatggccccccccccaggcagcaccccatcacggacagggggtttcttaggcacaacctctccaggccctatggcagagctgtatggagcagccaaccaagattcgggcgtgtccagttatatctccgcggcttcacctgcaccgtctaccggcttcggtcattctctcggcggcccacttattgccaccgcttttaccaacggctatcactag

SEQ ID NO: 124999 - DNA, 627 bp, synthetic construct
  misc_feature 1..627: note = Description of Artificial Sequence: Synthetic coding sequence
  source 1..627: mol_type = other DNA
atggccacttccgcagttccatccgataacttgccaacatataagttagtggtggtcggtgacggcggggtgggaaaaagcgcactgaccatccagttcttccagaagatctttgtgccagactacgacccaaccattgaggatagctacctcaagcatactgagattgacaaccaatgggctatcctagatgtactggatacggctggacaggaggagtttagtgccatgcgcgagcagtacatgcgtacgggggatgggttcttaattgtgtattcagtgacggataaggccagtttcgaacatgtggaccggtttcaccagctgattttaagagtgaaggatagggagagcttcccaatgattcttgtcgctaataaagtagacctgatgcaccttcgtaaaatcacaagagagcaggggaaagaaatggctacaaagcacaacataccatacatcgaaacgagcgctaaggatccgcctctgaacgttgacaaggcttttcacgatttggtaagagtaattaggcagcagatccccgagaagtctcaaaaaaagaagaagaaaaccaagtggcggggcgatcgggcaacaggcactcacaagctgcagtgcgtcatactgtag

SEQ ID NO: 125000 - DNA, 627 bp, synthetic construct
  misc_feature 1..627: note = Description of Artificial Sequence: Synthetic coding sequence
  source 1..627: mol_type = other DNA
atggctacaagtgccgtgccatccgataatctgcccacgtataaactcgtggtggtcggtgatggtggagttggaaaaagtgcgctgacaatccagttcttccagaaaatcttcgtacctgactatgaccctaccattgaggacagctatctcaaacacaccgagatcgataatcagtgggctatccttgatgtcctcgacaccgccggccaggaagagttctcagcgatgcgcgagcagtacatgaggaccggtgatggatttctaatcgtgtactcagtgaccgacaaggctagttttgagcatgttgaccggttccaccaattgattcttcgcgtcaaagatcgggagagttttccaatgatcctcgtggcaaacaaggtcgatctgatgcacctgcggaagataactagagaacagggaaaagaaatggcaacaaaacataatataccatatatagagacatccgctaaagacccgcctctgaacgttgataaggcattccatgatctcgtacgtgtgatcaggcagcaaattccggaaaagagtcagaagaaaaaaaagaagaccaaatggcgaggcgatagggcaacgggaactcataaacttcagtgcgtgatcctgtag

SEQ ID NO: 125001 - DNA, 399 bp, synthetic construct
  misc_feature 1..399: note = Description of Artificial Sequence: Synthetic coding sequence
  source 1..399: mol_type = other DNA
atgcgggaacagtacatgagaacaggagatggattcttaattgtgtacagtgttactgacaaggcctcctttgagcatgtggaccgctttcaccagctgatcctgagagtgaaggatagagaatcttttcccatgatcctcgtagccaataaagtggatttaatgcacctgcggaagatcacaagagaacagggcaaagaaatggctacgaaacacaacataccatatattgagacatccgccaaagaccctcctcttaatgtggataaggccttccatgacctcgtcagggttattaggcaacagatacccgagaaaagccaaaaaaagaaaaagaagaccaagtggaggggggaccgcgccaccggtacccataaacttcaatgcgtgatcctgtag

SEQ ID NO: 125002 - DNA, 627 bp, synthetic construct
  misc_feature 1..627: note = Description of Artificial Sequence: Synthetic coding sequence
  source 1..627: mol_type = other DNA
atggccacaagcgctgtaccttccgacaatcttccaacgtataagctcgttgtggtgggagacgggggggtcggaaagtctgcacttactatacaattctttcagaaaatcttcgtaccagattatgatcctacaatcgaagacagctacctgaaacatactgaaattgacaatcaatgggcaatcctggatgttctcgataccgctggacaggaggagttctcagccatgagggaacaatacatgagaaccggggacggttttctcatcgtgtattcagtcacggacaaagcctctttcgagcacgtggatcgttttcatcagctgatactaagagtgaaggatagggagtccttccctatgatcctcgtagccaataaagttgatctcatgcacctgcggaaaatcacgcgggaacagggaaaagagatggcaacaaaacacaatatcccgtatatcgaaacatccgccaaggacccccccttgaacgtggataaagcttttcatgacctcgttcgtgttatccgccaacagataccagagaaaagccagaaaaagaagaaaaagactaagtggagaggggacagagcaacaggcacgcataagttgcagtgtgtgatcctttag

SEQ ID NO: 125003 - DNA, 72 bp, synthetic construct
  misc_feature 1..72: note = Description of Artificial Sequence: Synthetic coding sequence
  source 1..72: mol_type = other DNA
atggccacgtccgctgttcctagcgacaatcttccaacctacaaactcgttgtggtgggcgacgggggatag

SEQ ID NO: 125004 - DNA, 2628 bp, synthetic construct
  misc_feature 1..2628: note = Description of Artificial Sequence: Synthetic coding sequence
  source 1..2628: mol_type = other DNA
atgagagagctagtgaacatccctttggtccatatcctgacactggttgcttttagtggtactgaaaagctgcctaaggcacctgttatcaccaccccactcgagacagttgatgcccttgtcgaagaggtagccacgtttatgtgtgccgtcgaaagctatccgcagcctgagatatcctggactcgcaacaaaatactgatcaaactttttgacacacggtactccattcgcgaaaatgggcaactgcttaccatcctaagtgttgaggacagcgacgatgggatttattgctgtacagctaacaacggagtcgggggagcggttgagagttgtggcgccctgcaggtcaaaatgaaacctaaaattacccggcctcccattaacgttaaaatcattgaagggcttaaggctgtgctgccttgcactacaatggggaaccccaagccgtccgtcagctggataaagggcgattccccattacgagaaaatagccgaattgcagtgctggaatcaggctccctccggatccacaatgtccagaaggaggacgcaggacaatatcggtgcgttgccaagaattctctgggcaccgcatacagcaaggttgtcaagctggaagtggaagtgttcgcgcggatcctccgagcgccagaaagccataacgtcacttttgggtcctttgtgacccttcattgtaccgcgactgggatacctgttccgaccatcacatggattgagaatggaaacgcggtttcatcaggatccatccaggagtccgttaaagatcgcgtcatagacagtaggttacaattgtttattaccaagcccggtctttatacttgtattgcgactaacaagcacggggaaaaattcagcacagctaaagctgcggcaaccatctcgatcgctgaaatgcttttcatcagcagcttttctaaaccacaaaaagataataagggctattgcgcacagtaccgcggggaggtctgtaatgcagttctcgccaaagatgccctggtctttcttaatacgtcatatgccgacccagaggaagcacaggagctgttggtccacacagcctggaatgagctgaaagtggtatctcccgtgtgccgccctgccgccgaagctttactgtgcaaccacatctttcaagagtgctcccccggggtggttcctactcctattcctatctgtcgagaatattgtctggccgttaaagagctcttctgtgcaaaagagtggctggtgatggaagaaaaaactcacagaggcctctatcgcagcgagatgcatctgctgagcgtgcccgaatgctccaagctgccaagcatgcactgggacccaactgcttgcgctcggttgccgcatctggattataataaagagaatctaaaaacattccctcccatgacgtcaagtaaacccagcgtggacatcccgaatctaccttcctcttcaagctcgtctttcagcgtcagtcccacctactcaatgaccgtgataatttcaattatgtcgagtttcgccatctttgtgctgctcacgatcactaccctgtactgctgccgcaggcgaaagcaatggaaaaacaagaaacgtgaaagcgcggctgttactcttaccaccctgccttcagagctcctgttagacaggctgcacccaaacccaatgtaccagagaatgccattactgctgaaccccaagctcctctctttagaatacccacgcaacaacattgagtatgtccgcgatatcggtgagggcgcgttcggccgagttttccaggcaagagcccctggactacttccctatgagccctttactatggtggccgtcaaaatgcttaaggaggaagcctcagccgacatgcaagccgacttccaaagagaggctgcccttatggcagaattcgataatccaaacattgtgaagcttctaggcgtgtgtgccgtggggaaaccaatgtgcctgctcttcgaatatatggcctacggcgatctgaacgaattcctgcgatcaatgtcaccacacactgtgtgttctctcagtcattccgatttaagcatgagagcccaggtgtcatcacccggaccccctccactgtcttgcgctgagcagctgtgcattgcaaggcaagtggccgccggcatggcctacttatcggaacgaaaattcgtacaccgagacctggcaacaaggaactgcctagtaggtgagaatatggtcgtcaagatcgcagattttgggcttagcagaaatatttatagcgctgattactacaaggctaatgagaatgatgcgattcccatacgatggatgcctcctgagagtatcttttataatcggtataccacggagagcgacgtgtgggcctacggagtcgtattgtgggagatattcagttatggactccaaccatattatggaatggctcacgaagaagtcatttattatgtccgggatggtaatatactgtcttgccctgaaaattgtcctgtcgaactttacaacttaatgcgtctctgctggtccaaactgccagcagaccgcccttcgttcacctccatccataggattctcgagaggatgtgtgaacgcgcggaaggtactgtgtctgtgtag

SEQ ID NO: 125005 - DNA, 570 bp, synthetic construct
  misc_feature 1..570: note = Description of Artificial Sequence: Synthetic coding sequence
  source 1..570: mol_type = other DNA
atggctggcaacggtagggaggaccctcagcggacacttcaaatccgcgacgcattcgcagtccgcgcgcggatgcagcaggcatctcagcatgccctcggcccgcatggtttatgccagactgccacatcccgcgagtccgcagctgtcacgctcaccacactgcctagtgaacttctactggataggctgcacccaaatcctatgtatcagcgaatgccgttgttactgaaccccaagttactctctctggagtacccccgcaacaacatcgagtatgtacgggatatcggagaaggggcattcgggagagtattccaggcccgggcgccagggttactgccctatgagcccttcaccatggtagcagtgaaaatgcttaaagaggaagcctccgcagatatgcaggctgactttcaacgggaggctgccctgatggcagaattcgacaaccccaatatcgtaaaactgctcggtatgaaaattcaggtgagaatctgcataagcagtgagaacaggggatttccaagttttagccccctggtgcgagccttttccttctctccgtag

SEQ ID NO: 125006 - DNA, 351 bp, synthetic construct
  misc_feature 1..351: note = Description of Artificial Sequence: Synthetic coding sequence
  source 1..351: mol_type = other DNA
atgaaacccaaaataacccgaccaccaatcaacgtcaaaatcatcgagggcctcaaggcagtcctaccctgcaccactatgggtaaccccaagcctagcgtttcttggattaaaggggatagccctttgagggagaactcccgcattgcggtactggagagtggctctctccggattcacaatgtccagaaggaggacgccggccaataccgttgcgttgccaagaactcattggggactgcctacagcaaagtcgttaagctggaggtcgaaggcgccaaaggtatccatacgcaattcgttgcttccgcactgcagctgcgcagcttcttgtcatgcccacagatctag

SEQ ID NO: 125007 - DNA, 351 bp, synthetic construct
  misc_feature 1..351: note = Description of Artificial Sequence: Synthetic coding sequence
  source 1..351: mol_type = other DNA
atgaagccaaaaataacaagacccccaattaacgtgaagattattgaagggctgaaagccgtactgccatgcacgacgatgggaaatcctaaaccttccgtctcttggataaaaggagactcacctttaagggagaactctcgaatagctgtcctcgagtccggaagtctgagaattcacaatgtgcaaaaagaagatgccgggcagtaccgttgcgtggcaaagaatagcctcggcacagcttattccaaagtggtgaaattggaggtcgaaggcgccaagggtattcacacacagttcgtcgcttccgctctccaattaaggtcctttctttcatgtccacagatctag

SEQ ID NO: 125008 - DNA, 570 bp, synthetic construct
  misc_feature 1..570: note = Description of Artificial Sequence: Synthetic coding sequence
  source 1..570: mol_type = other DNA
atggcaggcaacggtagggaggatccgcagaggacattgcaaattcgcgatgctttcgccgtgcgtgctaggatgcagcaggcatcccagcacgctctgggccctcatggattatgtcagactgccacgagtagagagtcagcggccgtgacactgactacgctcccatccgagctgctgctggaccggctccaccctaacccgatgtaccagaggatgcccctgctgctgaatcctaagctgttatcccttgaatatcctaggaacaacatagaatatgtgcgtgacattggagaaggggcttttggtcgagtgttccaggctcgcgcacccggcctgttgccgtacgaaccttttacaatggtggcagtgaagatgctcaaggaagaggcatccgccgatatgcaggctgacttccaacgggaggctgccctgatggctgaattcgacaatccgaatattgttaagttacttggtatgaaaattcaggtgcgaatttgtatttccagcgaaaaccggggcttcccgtcgttcagcccattggtgagagctttttctttctcaccttag

SEQ ID NO: 125009 - DNA, 2352 bp, synthetic construct
  misc_feature 1..2352: note = Description of Artificial Sequence: Synthetic coding sequence
  source 1..2352: mol_type = other DNA
atgagggaactggtcaatatccccctggtccatatcctgacactcgtggcattttccggaactgagaaactgcccaaggctccagtgattacaacgcctctggagacagtagacgcattagtcgaggaggtcgccaccttcatgtgcgcggtcgagagctatccacagccagagatttcttggacgcggaataagattctgatcaagctcttcgatacacgctatagtataagggagaatggacagctgctgacaatactgtcagttgaagactctgatgatggcatttactgttgcacagccaacaacggagtcggaggcgctgtggagtcttgcggcgccttgcaggttaagatgaaacccaagatcacccgcccccccataaatgttaagattatcgagggactcaaagcggtgttgccatgcacgacgatgggcaatcctaaaccctctgtttcatggattaaaggagattccccgcttagggagaactcacggatcgccgtactggagtctgggtcactaagaattcacaacgtgcagaaagaagacgctggccagtacagatgtgtcgctaagaacagtcttggaacggcatattccaaagttgtgaaactcgaggttgaagaagaaagtgaaccggaacaagacacaaaggtgttcgctcggatactcagggcacctgaatcccacaatgtgacatttggttccttcgttacactgcactgtacagcaacagggatcccagttcctacaatcacctggattgagaatggcaatgcagtgagcagcggttcaattcaggagtctgtgaaggacagggtgatcgactccagacttcagctgtttatcactaaacccgggttatacacatgtatagctaccaataagcatggcgagaagttttccaccgccaaagccgctgctaccatcagcatagccgattttcgtgagtattgtcttgccgttaaggaactattctgcgcaaaagaatggctggtcatggaagaaaaaactcacagaggactgtatagaagcgaaatgcatctgctctctgtaccggagtgctcaaaactgcccagtatgcattgggatcccaccgcatgcgccaggcttccacacctagcattccctcccatgacctcatcaaagccgtccgtcgatatacctaacctcccctccagctcctcatcgtccttctctgtgtcacccacctactccatgactgtgattatctcaatcatgtccagcttcgccatatttgtgctgctcactataactaccctttactgctgcagacgccggaagcagtggaaaaataagaaacgcgagagcgctgccgtgactctcaccacactgcctagtgaactgttactcgaccgattgcatcccaatccaatgtatcaacgaatgcccctcctcttaaatcctaagctcctatcactggagtatccccggaacaacatcgagtatgttagggacattggtgagggggctttcggtagggtgttccaagccagagcacccgggcttctgccttatgagcctttcacaatggtcgcagtcaagatgcttaaggaagaagcttccgcagacatgcaggccgactttcagagggaagcggccctcatggcagaatttgataatcctaacattgttaagctcctgggtgtatgcgccgtcgggaagccgatgtgtcttctgtttgagtacatggcctacggagatttgaacgaattcctcaggtccatgagccctcataccgtgtgtagcttgtcacactctgacttatctatgagggctcaggtgtcttcgcccgggcccccccccttgtcttgtgctgaacagctatgtattgcgaggcaggtcgcggctgggatggcatatctgtccgaaagaaaatttgttcaccgcgatctggccacaaggaattgccttgttggggagaacatggtcgtgaagatcgctgattttggactgtccagaaatatttatagcgcagattactacaaagctaatgaaaacgacgccatccctatccgctggatgccccctgaatccatcttttacaatcggtacaccacagagagtgatgtgtgggcttacggcgtggtcctctgggaaattttttcttacggtctgcaaccctactacgggatggctcatgaagaagtcatctactacgtccgagacggaaatattctcagttgcccagaaaattgccccgttgagttatacaatctcatgaggctctgctggtccaagcttcccgcagataggcccagctttacatctatacacaggatcctggaaagaatgtgcgagcgggccgagggaactgtcagtgtgtag

SEQ ID NO: 125010 - DNA, 2610 bp, synthetic construct
  misc_feature 1..2610: note = Description of Artificial Sequence: Synthetic coding sequence
  source 1..2610: mol_type = other DNA
atgagggaactggtaaacatcccactggtccacatcctgacgcttgtagctttttccgggactgagaagctgcccaaagcaccagtcatcacaacgcccttagaaaccgtagacgcgctggtggaggaggtggcaacattcatgtgcgccgtcgagagttatccacagccggagatctcgtggacacgtaacaagatcctgatcaaattgtttgacacacggtactctattagagagaatggccaactgttgactattctgtcagtcgaagactctgacgatggaatttattgttgtacggccaataacggagttggtggcgcagttgagagctgcggtgccttgcaggtgaaaatgaagccgaaaatcactcggcctcctatcaacgttaaaattattgagggcctgaaggcagtgctgccatgtactaccatgggcaatcctaagccatctgtttcgtggataaagggcgactcccctctcagggagaattcgcgcattgccgtgctcgaatctggatccttgcgcattcacaatgtgcaaaaggaagacgctggccagtatcggtgcgtcgcaaagaactcacttgggactgcctactccaaggtggtaaagctggaggtcgaggtttttgcccggattctcagggcgcctgagagccataacgtaactttcggctctttcgtcacccttcactgcacggcaaccgggattccggtcccgaccatcacatggatcgagaatgggaacgccgtgagcagtgggtcgattcaagagtcagttaaggacagagtgatcgactcgcgcctgcagctgtttatcaccaagccaggactctacacctgcatcgctactaataaacacggggagaaatttagcacagctaaggccgctgcgactatctccatagccgagtggtcaaagcctcaaaaggataataaaggctactgcgcacagtacagaggggaggtatgtaatgcagtgctggcaaaagacgctttggtctttctgaacactagctatgcagaccccgaggaggcacaggagcttctagttcacaccgcctggaacgagctgaaagtggtatctccggtctgtaggcccgctgcggaggccctgctgtgtaaccacattttccaggaatgctctccgggtgttgtccccacacctatcccaatttgccgagaatactgtcttgcagtcaaggaactgttctgcgctaaggaatggctggtgatggaggaaaaaacacataggggcttgtatcgttctgagatgcatctgctgtctgttccagaatgcagcaaactgccctcaatgcactgggaccccacagcctgtgcgcgactcccacatctggattacaataaggaaaatctgaagacttttccaccaatgaccagctccaaaccctcagtcgatattccaaatctccctagcagtagttcttccagtttctctgtatcacctacatactctatgaccgttatcatttccattatgtcgtccttcgctatttttgtgcttttgactattaccactttatattgctgtcgtaggaggaaacagtggaagaacaagaaacgagaatctgctgcagtgacattgaccacactgccatctgaacttcttctggacagacttcatccgaaccctatgtaccagaggatgcctttattgctcaatcccaaactgctgtcgctggaatatcctcgaaacaatattgagtacgtaagagacatcggggagggagcatttgggagagtatttcaggctagggcacccggtttgctcccctatgagcccttcactatggttgccgtgaaaatgttaaaggaagaagcctccgcagatatgcaggcagatttccagagagaggcagccctcatggccgagtttgacaatcccaacattgtaaaactactgggagtgtgtgccgttggtaaacctatgtgtctgcttttcgaatacatggcctacggggacttaaatgaatttctgagatcaatgtcccctcacaccgtctgtagtctttctcactctgatctgagcatgagagcccaagtgagctctccaggacccccccccctttcttgcgctgagcagttgtgcatcgctaggcaggtcgcagccggcatggcttacctgagcgaacgaaaattcgtgcaccgggatctcgctaccaggaactgcttggtgggagagaacatggtggtgaaaatcgcggatttcggcctgagcagaaatatctacagcgccgactattataaggcgaacgaaaatgatgctattccgataagatggatgcctcctgagtctatcttttacaacaggtacaccactgagagcgatgtatgggcctacggtgttgtgctttgggagatctttagctatggtctgcagccctactatggtatggcccacgaagaagtgatctactacgtccgcgatggcaatatcctcagttgccctgaaaattgccccgtggaattatataatcttatgcgattgtgctggtcaaaactgcctgccgacaggccatccttcactagcatccaccgcatcttggaacggatgtgtgagagggcggaagggaccgtatccgtctag

SEQ ID NO: 125011 - DNA, 2604 bp, synthetic construct
  misc_feature 1..2604: note = Description of Artificial Sequence: Synthetic coding sequence
  source 1..2604: mol_type = other DNA
atgagggaactggtcaacatccctctggttcacatcttaaccctggtcgcattcagcgggaccgaaaaactccctaaggccccggtcattacgacccccctggagacggtggacgccttggtggaagaagttgccacatttatgtgcgccgtagagtcttacccgcagcccgagatttcctggacgagaaataagatcttaattaagttattcgacacaagatattcaatcagagagaatggccagctgttaaccattttgtcagtcgaggatagtgatgacggaatttactgctgcactgccaacaacggggtaggtggtgctgtagagagctgtggagcattacaagttaagatgaagcccaagattacccggccccccataaacgtcaagatcatcgaaggcctcaaggccgtgttgccctgcaccaccatgggaaaccccaaacccagtgtgtcctggatcaaaggagactccccattgcgggagaatagccggattgcagttctggaatcgggatctctgagaatccacaacgttcagaaagaggacgcaggccagtacagatgtgttgccaaaaacagtctgggaaccgcctactcaaaggtggttaagctcgaggtcgaggttttcgctcgaatattgagggctcccgaatcccacaacgtgacttttggttctttcgtcacgctacattgcacagctactggtatccctgtccccacaatcacttggatcgagaatgggaacgccgtctcatctggctctatccaggagagtgtcaaagaccgggttatcgactctagactacagctattcatcaccaaacccggcctgtacacatgcattgctacgaataaacatggagaaaagtttagcacggccaaggccgctgcaaccatttccatcgccgagatgttgtttatctcctcattttctaaaccacaaaaggacaataaagggtactgtgcccagtaccgcggcgaagtctgcaatgctgttctggccaaggacgccctggtgttcctcaacacctcttatgctgatcctgaagaggcccaggaacttctcgtccacaccgcgtggaacgagcttaaagtggttagccctgtgtgcaggccagccgcagaggccctactgtgtaatcacatcttccaggagtgtagccctggtgtggtgcctacacccattccgatttgtagggaatactgtctggcggtgaaggaattattttgtgccaaggaatggctcgtgatggaggagaaaacccatcgaggtttgtaccgttcagagatgcacctgttgtctgtgcctgagtgttccaagctgccgtccatgcactgggatccaactgcctgtgcaagactgcctcacctggccttcccacctatgactagctccaagccatctgtggatatcccaaatctgcccagcagcagctctagtagtttcagcgtgtctcctacttactctatgaccgtcatcatctctattatgtcttcatttgctatctttgtgcttctgaccataactaccctttactgctgtcggagacgaaaacagtggaagaataagaagagggaaagcgctgccgtcaccctgactacacttccctctgagctgctgctggatcgactgcacccgaatcctatgtatcagcggatgcccttacttctgaacccaaagttgctctcccttgagtatccaaggaataacatagagtacgttcgtgatattggggagggcgccttcgggcgggtgtttcaggccagagccccaggtttgctgccctacgaacccttcacaatggtggctgtgaagatgctaaaggaagaggccagcgccgacatgcaggccgactttcagagagaagccgctttgatggctgagttcgataaccctaatatagtaaagctgctgggggtctgtgcagtgggaaagcccatgtgcctcctcttcgagtatatggcctacggagatttgaatgagttcttgaggagtatgtcccctcacacagtgtgttcactttctcatagtgatctgagtatgagggcacaggttagttccccaggacccccaccactgagttgcgccgaacagctgtgcattgcgcggcaggtggcagcaggtatggcttatttgtccgagcgcaagttcgttcatagggatttagctacaaggaactgcctcgtgggagaaaatatggtggttaagattgctgactttggcctaagcaggaacatctatagcgccgactattacaaggcgaacgagaatgacgccattccaatccgctggatgcctccggaaagcatcttttacaaccgctataccaccgaaagtgacgtgtgggcctacggcgtcgtactctgggagattttcagttacggtttgcagccgtattatggaatggcacatgaggaggtgatatactatgtgcgcgatggaaatatcctttcctgtcccgaaaattgtcctgtggagttgtataatttgatgaggctgtgttggtctaaactcccggccgaccggccttctttcacctccatccatcgcattttagaaaggatgtgtgaacgggcggagggcacagtcagtgtatag

SEQ ID NO: 125012 - DNA, 2610 bp, synthetic construct
  misc_feature 1..2610: note = Description of Artificial Sequence: Synthetic coding sequence
  source 1..2610: mol_type = other DNA
atgcgtgaactcgtcaatattccccttgttcatatcctcacactcgtagctttctccgggaccgagaagcttccgaaagctccagtcattacaacgccattggagacagttgatgcgttagtagaagaggtagccactttcatgtgcgcggtagaatcatatcctcagcctgagatcagttggacacggaacaagatcctgatcaaactttttgacacccggtattcaatccgagagaacggtcagttactaaccatactgtccgtcgaggattcggatgatggtatctactgctgtaccgctaataatggcgtgggcggagccgtggagagctgtggcgctctccaagtgaagatgaaacccaaaatcactcgcccacccatcaacgtgaagatcattgaggggctcaaggccgtgctgccatgtacaactatgggcaatcctaagccatccgtttcgtggattaagggcgactcacccctccgggagaattctcgtatcgctgtgctagagagtggctccctgaggatccataatgtgcagaaagaggatgccgggcagtacagatgcgtcgcgaagaattccctcgggacagcttatagcaaagtagtcaagttggaggtggaagtgttcgctcgtattctccgcgcaccagagtcccacaatgtcacattcggctcattcgtcaccctgcactgcactgccaccggcattccagtgccaacaatcacctggatagagaacgggaacgctgtctcaagcggaagcatacaggagtcagttaaagatcgcgtcattgattctagactccagttgtttataactaaaccgggactttatacctgcattgccactaataagcatggagagaaattttccaccgcaaaagctgctgcgactataagtatcgccgcattttctaagccccagaaggataacaagggctactgtgcacaatacaggggagaggtatgtaacgctgttctcgcaaaggatgcactcgtgttcctcaacacgtcctatgcagaccccgaggaggcacaggagctgctggtgcacacagcttggaatgagctcaaggtggtctcacccgtctgtagaccagccgccgaagccctgctttgtaaccatatcttccaagagtgttctcccggtgtagtcccaaccccaattcccatttgtcgggagtactgcctggcggtgaaggagctcttttgcgcgaaggagtggctggtcatggaggaaaaaactcacaggggcttgtaccgatccgagatgcatttgctgtccgtgcccgagtgtagtaagctgccatcaatgcattgggatcccaccgcctgcgcccgattgccccaccttgactacaataaagagaacctcaagacttttcccccaatgacctcatctaagccatcggtggacatcccaaacctccccagctccagcagctcttctttttctgttagtcctacatacagcatgaccgttatcatcagcatcatgtctagcttcgcaatctttgtgctgctaaccatcactactctgtactgctgtcgtcgtcgtaaacagtggaagaataagaaacgtgaatccgcggctgtaacactcactaccttgccttctgaactcctgttggatagactccacccaaatccaatgtaccagagaatgccccttctgctgaaccctaagctgttgtccctggaatacccccgcaataacattgagtatgtgcgcgacattggtgagggggctttcggtcgggtgttccaggcaagagcacccggactgctcccatacgagcctttcaccatggtcgctgtcaagatgctcaaagaagaggccagtgccgacatgcaggcagattttcaacgtgaggcagccctgatggccgaattcgacaaccctaatatcgttaagttgttaggggtgtgtgccgtgggcaagcccatgtgtcttctgttcgaatatatggcttatggcgatttgaacgagttcctccgctctatgtcaccccacactgtctgctccctgagccactccgacctcagcatgagggctcaggtgtcctctcccggaccgccacctctctcttgtgccgagcagctctgcatcgctcgacaggttgctgctgggatggcatacttaagtgagagaaagttcgttcatcgtgacttagccacccgtaattgcctggtcggcgaaaatatggtggtgaagatagctgatttcgggctgtctcggaatatctactccgccgactattacaaagccaatgagaacgatgccatcccaatcaggtggatgccccctgagagcatcttttacaatagatataccacagagtcggacgtttgggcttacggagttgtgctttgggaaatattctcctacggtctacagccctactacggcatggcacatgaggaggtgatctattatgtgcgcgatgggaatatcctgagttgtcctgagaattgtcctgtggaactgtataacctcatgagattatgttggagtaaactccctgctgatagaccatccttcaccagtatccaccgcatcctcgagcgcatgtgtgaaagagctgaggggaccgtttcagtctag

SEQ ID NO: 125013 - DNA, 2352 bp, synthetic construct
  misc_feature 1..2352: note = Description of Artificial Sequence: Synthetic coding sequence
  source 1..2352: mol_type = other DNA
atgcgcgagttagtcaatattcctctagtccacatattaacacttgtggctttctcgggcactgagaaactccccaaggcaccggtcataacaacgcctttggagacagttgatgccctcgtggaagaggttgcaacgtttatgtgcgcggtggaatcttaccctcagccggagattagctggacaaggaataagatcttgataaagttgtttgatacaaggtactccataagagagaacggccagttgctgaccatcctgtccgtagaagactctgatgatggcatttactgttgcaccgccaacaatggtgtcggtggcgccgtggaaagttgcggagcattgcaggtgaaaatgaagcccaaaatcaccaggcctccgattaatgtaaagattatcgagggtctgaaggccgtgctgccttgtacaacaatgggtaacccaaaaccatcagtgtcctggatcaaaggagacagcccactcagggaaaactctcgaatcgccgtactagaaagcggtagcctgcggattcacaacgttcaaaaggaagacgccgggcaatacagatgtgtcgccaagaatagcttgggtactgcctactccaaggttgtgaagctcgaggtagaagaggagtccgaacccgaacaggatactaaggtgttcgcgaggatactgcgggctcccgagtctcacaatgtgactttcgggagttttgtgacattacactgtacggctactggcatacccgtccccacgattacctggattgagaatgggaacgcagtgagcagtgggtctattcaggagtctgtgaaggatcgggttatcgactcccgactccaactctttattacgaaacccggtctttatacctgtattgccaccaacaaacatggagagaagttctctaccgccaaagccgccgccactataagcatagctgcctggaaaaagtactgtctggccgttaaggagttattctgcgctaaagaatggcttgtaatggaggaaaagacccaccgcggcctctatcgcagcgagatgcatctgttgtccgtcccagaatgttccaagctgcccagtatgcactgggatcccacagcttgtgctcgcttgcctcatctcgccttccccccaatgaccagctccaaacccagtgtcgatatccccaatctgccctcaagcagtagcagctcattctctgtatcacctacctattctatgacggtgatcatcagtatcatgtctagcttcgccatttttgtgctgttaaccattaccaccctgtattgttgtcgtagacgcaagcagtggaagaacaaaaaaagagagagcgccgctgtgacactgacgactctgccgtctgaactcctcctggaccggctgcaccccaaccctatgtatcagcgcatgccattgctactgaaccccaaactcctgagcctggaatacccaaggaataacatcgaatacgtcagagatataggggaaggagcctttggacgggtcttccaggcccgcgctcccggactcctgccatatgagcccttcacaatggtggccgtgaaaatgctcaaggaggaggccagcgccgacatgcaggcagattttcaaagagaagccgcactgatggcagagtttgataacccgaatattgtcaagttgttgggtgtttgcgcagtagggaagcctatgtgtcttctcttcgaatatatggcctatggggacctgaatgaattcctgaggtcaatgagtcctcacacagtctgtagcctaagccactccgatctatcgatgcgcgctcaggtcagctctccgggcccgccgcctctaagctgcgctgaacagctgtgcattgctaggcaagtggcggctggcatggcctacttatccgaacgcaagttcgttcatagggatcttgctactcgtaattgtctggtgggagagaacatggtggttaaaatcgccgatttcgggctgtcccgtaatatctacagcgccgattattacaaagcaaacgaaaacgacgccatccccataaggtggatgcctcctgagtctatattctacaatagatatacaaccgaaagcgatgtgtgggcctatggagtagttctttgggaaattttctcatatgggttgcaaccttactacggaatggctcatgaggaagtgatttattacgtgagggatggtaacattctgtcttgtccagaaaactgcccagtagagttatataacctcatgaggctttgctggagtaagcttcccgccgaccggccgtcttttacgagtatccaccgcatcctggagagaatgtgcgaacgcgctgagggcacagtatccgtgtag

SEQ ID NO: 125014 - DNA, 1167 bp, synthetic construct
  misc_feature 1..1167: note = Description of Artificial Sequence: Synthetic coding sequence
  source 1..1167: mol_type = other DNA
atggcagtgtcggttacacccatcagagacacaaaatggctgacattggaagtctgtcgggagtttcagcgcgggacatgttcccgacctgacactgaatgcaagttcgcgcacccatctaagtcctgtcaggtcgagaacgggcgtgtgattgcctgctttgattcacttaaaggtaggtgcagcagagagaactgcaaatacttacaccccccaccccatcttaagacacagctggaaataaacggccggaacaatctgatccagcaaaagaacatggccatgttagcccagcagatgcagctcgccaacgcgatgatgcccggagccccactgcagccagtgcccatgttctctgtagctccgagcctcgccactaacgcttctgcagccgcttttaacccatatctggggcctgtttctccgtctttagtgcctgccgagattctcccaacagcccctatgctggttaccggtaacccgggtgtgcctgtccccgccgcagcagctgctgcagctcagaagctaatgagaaccgatagactggaggtttgcagggagtaccagagaggcaactgtaaccgcggcgagaatgattgccgattcgctcaccccgctgacagtaccatgatagataccaatgacaacactgtcactgtctgcatggactacatcaaagggcgatgtagcagagaaaaatgcaagtactttcaccctccggcgcatttgcaagcgaaaatcaaggctgcacaatatcaagtaaatcaggcagccgctgcacaggccgccgccaccgctgcagctatgactcagtccgccgttaagtccctgaaacgccctttggaggccacttttgacctaggtattccccaagcagttctgcccccactgcccaagaggcccgcactggagaaaaccaatggtgctacagctgtgttcaacacggggatcttccaataccaacaagcgctcgcaaatatgcagcttcagcagcacactgccttcctgccgcctgttccaatggtgcacggagccaccccagcaacggttagtgcagcaaccacttctgccacttccgtgccattcgccgcgacagccacagctaaccagatcccaatcataagtgcggagcatctgacttcccacaagtacgtcacgcagatgtag

SEQ ID NO: 125015 - DNA, 909 bp, synthetic construct
  misc_feature 1..909: note = Description of Artificial Sequence: Synthetic coding sequence
  source 1..909: mol_type = other DNA
atggctgtgtccgttacaccaattcgtgacactaagtggttgacactcgaggtgtgccgcgaatttcagagggggacctgcagtcggcccgatacggaatgtaaatttgctcatccctctaagagctgccaggtcgagaatggcagagtgatcgcttgtttcgactctctgaagggccggtgctccagagagaactgtaagtacttgcaccctcccccgcatctgaaaacgcagcttgaaatcaatggacgcaacaacctgattcaacaaaaaaacatggcaatgctggcacaacagatgcagttggccaatgccatgatgcccggagccccccttcagcccgttgtttgtagagaataccagcgagggaattgtaaccgtggcgaaaacgactgtaggtttgcacacccggccgacagtacaatgattgataccaatgataacaccgtgaccgtttgcatggattatatcaaaggcaggtgtagccgcgagaagtgtaaatactttcacccgcccgcccatctgcaagctaagattaaagccgcgcagtatcaggtcaaccaagcggctgctgcccaagcagctgccaccgcagctgccatgggcatcccacaggccgtactccctccgctccccaagcgtccggcattagaaaaaactaatggcgctaccgctgttttcaacacaggaatttttcagtaccagcaggctcttgcaaatatgcagctacagcagcatactgccttcctgcctcccgtccctatggtacacggtgccacgcccgccacagtttcggctgctacgaccagcgccacttcagtgccattcgctgccacagccacagcaaatcagatccccattatttctgctgagcaccttacgagccataagtacgttactcagatgtag

SEQ ID NO: 125016 - DNA, 1023 bp, synthetic construct
  misc_feature 1..1023: note = Description of Artificial Sequence: Synthetic coding sequence
  source 1..1023: mol_type = other DNA
atggccgtgtcagtgacccccattcgagatactaagtggttgaccttggaagtgtgccgcgagtttcagagaggtacttgtagccgccctgacaccgagtgcaagtttgcacaccccagtaagagttgtcaggtcgagaacgggcgggtgatagcttgtttcgattccctcaagggccgctgcagccgagaaaactgtaaatacttacaccctccccctcatcttaagacccagctggagatcaatggacgcaacaacctgatccaacaaaagaatatggcgatgctggcccagcagatgcagctggcaaatgccatgatgccaggcgctcccctgcagcctgtgcccatgttttctgttgccccctccctggcaaccaacgcatcagcggcagcattcaatccatacctcggaccggtgtcgccatcgctggtgcctgcagaaattcttcccaccgccccaatgcttgtcaccggaaatcctggagttcccgtcccagccgctgcggcggccgccgcgcagaagctcatgcgtaccgacaggctggaagtatgccgggaatatcaaagaggaaactgtaatcgcggtgaaaacgactgccggttcgctcacccagccgactcgacaatgatcgacactaacgacaacactgtgaccgtgtgcatggactacattaaaggcaggtgcagcagagaaaaatgcaaatatttccacccaccagcccaccttcaggccaagatcaaggcagcgcaatatcaggtgaaccaggctgccgctgcccaggcagccgccactgctgcagccatgttcccttggtgcaccgttctgcgacagccactttgcccgcagcagcagcatttgcctcaggtcttcccatctttgcagcagccgcagcccacctccccgatactggatgcttccacactgctcggagcaacatcctgccctgctgcggccgggaaaatgatcccgattataagcgctgaacacctcactagccataagtacgtaacccagatgtag

SEQ ID NO: 125017 - DNA, 1149 bp, synthetic construct
  misc_feature 1..1149: note = Description of Artificial Sequence: Synthetic coding sequence
  source 1..1149: mol_type = other DNA
atggccgtgtcagtgacaccaataagagataccaagtggctgacattagaagtttgtcgggagttccagcgcggaacatgttcccgtcctgatactgagtgcaagttcgcccacccttcgaagtcctgtcaggtagaaaatggacgagtgatcgcgtgctttgactccctgaagggccggtgtagccgtgagaactgcaaatacttgcatccccctccacatctcaagacacagctcgagatcaacggcaggaacaacttaatccaacagaagaacatggcgatgctggcgcagcagatgcaactggccaatgccatgatgcccggagcccctctgcagcccgttccaatgttttctgtggcaccttccttggcgactaacgcgtcggccgccgcgttcaacccctacctggggcccgtttcgcccagcttggttcccgccgagatactgcccaccgcaccaatgttggtgacgggcaaccctggcgttccggtgcccgccgctgccgccgcggccgcccagaagctcatgcggactgaccggctggaggtgtgcagagaatatcagcgaggaaattgcaataggggcgagaatgattgtcgctttgcgcatccagcggattcgacaatgattgataccaacgacaataccgttacagtgtgtatggactacatcaagggcagatgttcaagagagaaatgtaaatatttccacccacctgcacatctgcaagcaaagataaaagccgcacagtatcaagtcaatcaggccgccgctgcacaagctgccgccacagctgctgcaatgggaattccgcaagccgtacttccgccccttccaaaaagaccggcgttggagaaaaccaatggcgctacggcggtcttcaatacaggcatttttcagtatcaacaggcactagcaaacatgcagctgcagcagcatactgcattcctcccccccgggtctatcctgtgcatgacccccgcgacaagcgtggtccccatggtccacggtgccacacccgctacggtgtccgccgctacaacaagtgccactagcgtgcccttcgccgccaccgctacagccaaccagattccaatcatctcagctgagcaccttacatcacacaagtacgtgactcagatgtag

SEQ ID NO: 125018 - DNA, 1113 bp, synthetic construct
  misc_feature 1..1113: note = Description of Artificial Sequence: Synthetic coding sequence
  source 1..1113: mol_type = other DNA
atggccgtctctgtcacgccaattcgcgatacaaagtggctgaccctcgaggtgtgcagagaattccaaaggggcacatgcagccgacctgacactgaatgtaaatttgcccatccgagcaagtcttgccaggtcgaaaatggtcgagtgatcgcctgcttcgactcccttaagggccggtgtagcagagagaactgtaagtacctacatccccctccccatctgaaaacccaattggagatcaacggccgcaacaatctgatccagcagaagaatatggcaatgctggcccagcagatgcagctagccaacgcaatgatgccaggcgcccccctccagccagtgccaatgttttccgtggcacccagcctcgctactaatgcgtcagcagcagccttcaacccctatctagggccggtctccccatcacttgtccctgcggagatcctgcccacagctcctatgctggttaccggaaatccaggggttccagttcctgctgcagctgctgccgctgctcagaagcttatgagaacggatagattggaggtgtgcagagagtatcagcgagggaattgcaataggggagagaacgattgtaggtttgcacatcctgctgactccacgatgatcgacacaaacgataacactgtgactgtatgtatggactatatcaaagggaggtgttctcgagagaagtgcaaatacttccatccacctgcccatttacaagcaaaaataaaagcagcccaatatcaggtcaatcaagcggcagctgctcaggcagcagctactgcagccgctatgggtatccctcaagccgtcctgcctcctcttcccaagagacccgctctggagaagacaaacggcgccactgctgtgttcaataccggcattttccagtaccagcaggccctggcaaatatgcagctgcagcagcacactgctttcctgccccctgtaccaatggtccacggggctacgcccgcaaccgttagcgctgccactacctcagccacgtccgtgccctttgcggccacagccactgctaaccagatacccattatttcagcagagcatctgacaagtcacaagtacgttactcaaatgtag

SEQ ID NO: 125019 - DNA, 1029 bp, synthetic construct
  misc_feature 1..1029: note = Description of Artificial Sequence: Synthetic coding sequence
  source 1..1029: mol_type = other DNA
atggctgtctctgtgaccccaattagagacaccaagtggctaaccctcgaggtctgccgagagtttcagagagggacatgctcacgtcctgacactgagtgtaagttcgctcacccctcaaagtcctgccaagtcgaaaacgggagagtcattgcatgctttgacagcctcaagggaagatgcagccgagagaattgcaagtatctgcacccgcctcctcatctgaaaactcagttggaaataaacggcagaaacaatctcattcagcagaagaatatggcaatgttagcccagcagatgcagctagctaacgctatgatgcccggggccccactccaacctgtgccgatgttcagcgtggcaccttcactggctaccaacgcaagcgcagcggctttcaacccgtatctgggcccggtcagccccagtctagtgcctgcagaaattctgccaaccgcgcccatgctcgtgacaggcaacccaggtgttcctgtgcccgccgctgcagctgccgccgctcaaaagctgatgagaaccgatcggcttgaggtgtgtagggagtatcagagaggaaattgtaatcgtggggaaaatgactgccgcttcgcacacccagccgatagcaccatgatagacactaatgataatactgtaacagtgtgcatggattatatcaagggccgctgctccagggagaagtgtaagtacttccacccacccgcgcacctgcaggccaagatcaaggccgcccagtaccaagtgaaccaagccgccgcggcccaggcggcagctacagccgccgccatgggcataccgcaggccgtgttgccccccctccctaagcggcccgccctggaaaaaacaaatggcgccactgccgtgtttaacaccgggatctttcagtatcaacaggctctggccaatatgcaactgcagcagcacacagctttcctgccgccaggctctattctttgcatgacaccagcaacgagcgtcgacactcataatatctgcaggactagcgattag

SEQ ID NO: 125020 - DNA, 1167 bp, synthetic construct
  misc_feature 1..1167: note = Description of Artificial Sequence: Synthetic coding sequence
  source 1..1167: mol_type = other DNA
atggcagtgtcagtgaccccaatccgagataccaagtggctaactctagaagtctgccgcgagtttcagcgggggacctgctcgagaccagacaccgaatgcaagtttgcacatccttctaagtcctgtcaggtagagaacggcagggtgattgcctgctttgacagcttgaaagggcgctgctcccgcgagaactgtaaatatctgcacccaccgccacacctgaagacacagctagagattaacggcaggaacaacctaatacagcaaaaaaacatggctatgctggctcagcagatgcagctggctaacgcaatgatgcccggcgctccattgcaacccgtaccaatgttctccgtggctccctccctggctactaacgcatctgcagcggcctttaacccgtacctgggcccagtcagccctagcctggttcccgcagagatcctgcctacggcccccatgctggtcaccggcaatccaggagttccagtccctgctgctgcagccgccgccgctcagaagttgatgcgcacagatcgtttagaggtgtgtcgggaataccagcgtggaaattgcaaccggggcgaaaacgactgtcgatttgctcacccggcagactccacgatgatagatactaacgacaacaccgttacagtgtgcatggattatatcaaaggcagatgcagtagggaaaagtgcaagtacttccatccgcccgctcacttacaggccaaaatcaaggccgcccagtatcaagtaaatcaggcagctgcagcccaggccgctgccaccgccgccgccatgacccagagcgccgtgaaatctctgaagagaccactagaggcaacttttgacctggggataccacaggcagtgctacctcccctgcctaagcggccggctctcgagaaaacaaacggggcgaccgctgtttttaatacgggaatttttcagtaccagcaggctttggcgaatatgcagctacaacaacatacagctttcttacccccggttcctatggtgcatggcgccacgcctgctaccgtgtccgccgcgaccacttctgccacctcggtccccttcgccgcgacagcaaccgccaaccagatacccattatcagtgcagagcacctcacatctcataagtacgtcacccaaatgtag

SEQ ID NO: 125021 - DNA, 1023 bp, synthetic construct
  misc_feature 1..1023: note = Description of Artificial Sequence: Synthetic coding sequence
  source 1..1023: mol_type = other DNA
atggccgtgtcagttactccaatacgagatacaaaatggctgacactggaggtgtgcagggagttccagagaggcacatgctctaggcctgacacagagtgcaaattcgcccacccctccaagtcctgccaggtggaaaacggaagagtgattgcttgtttcgattccctgaagggtaggtgttcacgtgaaaactgcaagtatctacaccctcctccgcacctgaagactcagctggagatcaacggccggaacaacctaattcagcaaaagaacatggccatgctcgcacagcagatgcaactcgcaaatgccatgatgccaggcgcaccactccagcctgtgcctatgttctctgtggcaccttccctggcaactaacgcaagcgcggccgctttcaatccatatttggggccagtttcaccaagtctcgtgccagcagagatactgcctaccgccccgatgctggtcaccggaaatccgggtgtgccggtgccagctgccgccgcggctgctgcccagaaactcatgaggactgatcgactggaggtatgcagagagtatcagcgggggaactgcaaccgaggggagaacgactgcagattcgcccatcccgcagattccactatgattgataccaacgacaatactgtgaccgtgtgtatggattatattaaggggcgatgttccagagagaagtgcaaatattttcaccctccggcccaccttcaggccaaaatcaaggcagcccagtaccaggtgaaccaagctgctgctgcccaggcagccgctactgctgccgcgatgttcccttggtgcaccgttctgagacagccactgtgtcctcagcaacaacacctgcctcaggtattcccatccctgcagcagccacaacctacttcccccattctcgatgcctcaactctcctcggggccacttcttgtcccgcagcggcaggtaaaatgatacctatcatatcagctgaacatcttacttcccacaaatatgtaacccagatgtag

SEQ ID NO: 125022 - DNA, 909 bp, synthetic construct
  misc_feature 1..909: note = Description of Artificial Sequence: Synthetic coding sequence
  source 1..909: mol_type = other DNA
atggcggtatctgtgacccccatacgtgacaccaagtggctcacactggaggtctgcagggaattccagcggggcacctgttcccgccctgacaccgaatgcaaatttgctcatccaagtaagtcttgtcaggtggagaacggcagggtgattgcatgtttcgactctctgaagggcaggtgtagtcgtgagaactgtaagtatctgcacccaccaccgcatttaaagacccagttggaaatcaacgggcgaaacaatcttattcaacagaaaaatatggcgatgctggcacaacaaatgcaacttgcgaacgcaatgatgccaggagcccctctccagccggtggtttgcagggaataccaacgaggcaattgtaaccggggtgaaaacgactgcaggttcgctcaccccgccgattccaccatgatcgatacgaacgataatactgtcacagtgtgtatggattacattaagggacgttgctctcgcgagaaatgtaaatattttcaccctcccgcccacctccaggccaagataaaggcagcccagtaccaagttaaccaggcggccgcagcccaagccgcagctaccgctgccgcaatgggcattcctcaggccgtgctccctcctttacctaagagacctgccctggaaaagacaaacggggctaccgccgtgttcaacacgggcatctttcaataccagcaggccctcgcgaatatgcagttgcaacagcacaccgcattcctgccccctgtaccaatggtacacggtgctacaccggcaactgtgtccgctgctacaacaagcgccacttctgtccctttcgcggctaccgccactgccaaccaaatcccaattatcagcgccgagcacctgacatcgcacaagtacgttactcagatgtag

SEQ ID NO: 125023 - DNA, 1029 bp, synthetic construct
  misc_feature 1..1029: note = Description of Artificial Sequence: Synthetic coding sequence
  source 1..1029: mol_type = other DNA
atggccgtctccgtcactcccattagagacaccaagtggcttaccttggaagtgtgccgagagttccaacgtggcacttgcagccgtcctgacactgagtgtaagtttgcacatccatcaaagtcatgtcaggtcgaaaacggcagagtaatcgcgtgctttgatagcttgaaagggcggtgcagtcgggagaattgtaagtacttacatccccccccgcacctgaaaacacagcttgaaattaatggacggaataacctcattcagcaaaagaacatggccatgctcgcgcagcagatgcaactggctaatgcaatgatgcccggcgcacctctccagccggtgcccatgttttcagtagcccccagtttagccaccaacgcttcggcagcggctttcaacccgtatcttggacctgtgagccctagtctagtccccgctgagatactgcctaccgctcccatgctggtcacaggcaatccaggcgtgcctgttcccgcggccgctgccgctgccgctcagaaactgatgcggactgaccgtctagaagtgtgtagggagtatcagaggggtaattgtaaccgtggggaaaacgactgccggtttgctcaccccgccgattccactatgattgatacgaatgataatacagtgaccgtttgtatggattatattaagggccgttgttcccgggagaagtgcaagtacttccacccaccagctcacctgcaggccaagataaaagctgcccaatatcaggtgaatcaggccgctgctgctcaggcggccgccactgccgcagctatgggtattcctcaggctgttcttcctccgcttcccaaacgcccggctctggaaaagacgaacggcgccacagcagtttttaatacagggatcttccagtatcaacaggcactggccaacatgcaattgcagcagcacactgcttttctgcctcctggatcaatattatgtatgaccccagcgacttctgtggacacacacaacatttgtcgtacctccgattag

SEQ ID NO: 125024 - DNA, 1032 bp, synthetic construct
  misc_feature 1..1032: note = Description of Artificial Sequence: Synthetic coding sequence
  source 1..1032: mol_type = other DNA
atgggccgatgttctcgggagaattgcaagtatttgcatcccccgccccatctcaagacacaactggaaatcaatggccgcaacaaccttattcagcaaaaaaatatggctatgttggctcagcagatgcaactcgccaatgccatgatgccaggagcccctcttcagccagtgcccatgttttctgtcgcgccctcgcttgcaactaatgcgtctgccgccgccttcaatccttaccttggcccagtttcaccctctctggtgccagcggagatcctaccaaccgcacccatgctggtgacaggaaacccaggggtcccagtgccagcagccgccgccgctgcagcacagaaactgatgcggactgacagattggaagtgtgtagggaataccagagagggaattgcaatcgcggggagaacgactgcagattcgctcatcccgcagacagtactatgattgatactaacgacaataccgtgaccgtgtgcatggactatattaaagggcggtgctcccgtgagaaatgcaagtacttccaccctcccgctcatttgcaggctaaaattaaagccgcgcaatatcaggtcaaccaggcagccgctgcccaggccgcagccactgccgctgcgatgacgcaatcggccgttaaaagtcttaagagaccgctcgaggccacttttgatctcggcatcccccaagctgtcttgcccccgttaccaaaacgtcctgctctcgaaaaaacaaatggcgccactgccgtttttaataccggtattttccaataccagcaagcactggccaacatgcagctgcaacagcatactgcattcctgccaccagggtccatcctgtgtatgacccccgcaaccagcgtggttccgatggtgcatggagcaacaccggcaaccgtgtctgccgccacaaccagcgcaactagcgtcccatttgctgccacagccaccgccaatcagatccccatcatctctgccgagcacttaacatcccataagtacgtgacacagatgtag

SEQ ID NO: 125025 - DNA, 945 bp, synthetic construct
  misc_feature 1..945: note = Description of Artificial Sequence: Synthetic coding sequence
  source 1..945: mol_type = other DNA
atggccgtttctgtgacaccgatccgcgacacgaagtggttgacgcttgaagtctgtcgagagttccagcgcggtacatgctcccggcctgacacagagtgcaaattcgctcatcccagcaaatcttgccaggtggagaatgggcgggtgatcgcctgctttgacagtctaaagggccgttgttctagggaaaactgcaagtaccttcacccgccaccgcacctgaaaacacaactagaaatcaacggtaggaataaccttatacagcagaagaatatggccatgctcgcccagcagatgcagctcgccaacgccatgatgcccggagctcccctccagcctgtggtgtgtcgcgagtatcagaggggaaactgcaatagaggggagaatgattgtcgctttgcacacccagccgactcaaccatgattgacacgaacgataatactgttacagtgtgtatggactacatcaagggtagatgctctagagaaaagtgcaagtattttcaccctccagctcacctgcaggccaagatcaaggccgcccagtaccaggtaaaccaagccgccgccgcgcaagcagccgcaacagcggccgctatgggtattccccaggccgtcctcccacccctccctaagcggccagccctggagaagaccaatggagcgactgccgtgtttaataccggtatcttccagtatcaacaggcacttgcaaatatgcagctgcagcaacatactgcttttctgccgcctgggtctattctgtgcatgactcccgccaccagtgtggttcctatggtgcacggagcaactcctgctactgttagcgcggcaactacttctgccacgagcgtgcccttcgcagcaacagcaacggctaatcagatccctatcatctcagctgaacatctgactagccataagtacgtaactcagatgtag

SEQ ID NO: 125026 - DNA, 1005 bp, synthetic construct
  misc_feature 1..1005: note = Description of Artificial Sequence: Synthetic coding sequence
  source 1..1005: mol_type = other DNA
atgaccgctgtgaatgtggctcttatccgtgatacaaagtggctcacattagaagtatgtcgggaattccagagaggaacatgctctcgggcagacgcagactgcaagttcgcgcacccacctagagtgtgccacgtcgagaacggtcgggtagtcgcctgctttgattccctgaaaggccgctgcacccgggagaattgtaaatatttgcacccacctccacacttaaaaacccagctggagatcaatggaaggaataatctgatccagcagaagaccgcggctgcaatgttcgctcagcagatgcagctgatgctgcagaatgcgcaaatgagttccctggggagctttcctatgacgccatccatccctgccaaccctcctatggcctttaacccatatatcccccaccccgggatggggttggttccagccgagctggtgcctaatacacctgttctgatccctggcaaccccccacttgcaatgcctggggctgtgggcccgaagttaatgcggagtgacaagctggaagtgtgtcgagaattccaacgtggaaattgcactaggggggagaacgactgccgctacgctcaccccactgacgcctctatgattgaagctagcgataacacagtcaccatctgtatggactatataaaggggcgatgtagccgtgagaagtgcaaatatttccacccccctgcacacctccaggcacgactcaaggccgcgcaccatcagatgaatcactcagctgcgtccgcaatggccctcaccaatcttcagttaccccagccggccttcatccccgccggccctatcctgtgtatggcacccgcgtcgaacatagtgcccatgatgcacggggcaacccctacgacagtgtccgccgccactacaccggccacttctgtcccattcgctgccccaacaacaggaaaccagattccccagctgagcattgatgagttgaatagttctatgtttgtttcacagatgtag

SEQ ID NO: 125027 - DNA, 777 bp, synthetic construct
  misc_feature 1..777: note = Description of Artificial Sequence: Synthetic coding sequence
  source 1..777: mol_type = other DNA
atgttcgcccagcaaatgcaattaatgctgcagaatgcacaaatgtcctctctggggtctttcccgatgacaccttcaatccccgcgaaccccccaatggcttttaacccatacattccacaccccgggatgggactggtccccgcagaactcgtgcccaatactccagtgctcatccctgggaatcctcctttggctatgcccggagcagttggcccaaaattaatgagatcagacaaactagaagtgtgccgcgagtttcagagaggcaattgtacaaggggagagaatgactgccggtatgcccacccaaccgacgcatcaatgatagaggctagtgacaatactgtcacaatatgcatggattatattaaggggcgctgtagccgagagaagtgcaagtatttccacccccctgcgcaccttcaagcacggctaaaggctgcccaccatcagatgaaccattctgccgccagcgccatggcgctgcagcctggcaccctgcagctgattcccaaaagatctgcactggagaaacccaacggtgcgacacccgtgtttaaccctaccgttttccattgccaacaggcgttaacgaatctacaactcccacaacccgcctttatcccagcaggccccatcctgtgtatggccccagcatctaacatagtgccgatgatgcatggcgccacccccactacggtgagcgccgctaccacgcccgccacgtccgtccccttcgcggcaccgacgaccggcaaccagttgaaattttag

SEQ ID NO: 125028 - DNA, 915 bp, synthetic construct
  misc_feature 1..915: note = Description of Artificial Sequence: Synthetic coding sequence
  source 1..915: mol_type = other DNA
atggaacgagccagtaagaatctgaaaggacggtgcacaagggagaattgtaagtatctccatcctcccccacaccttaagacgcagctggagataaacgggaggaacaacttgatccagcaaaaaacagctgccgcgatgttcgctcagcagatgcagcttatgcttcagaacgctcaaatgtcaagcctggggagctttccgatgaccccctcaattcctgcaaaccctccaatggctttcaacccatatattcctcatcccggcatgggtctcgtgcccgctgagctggtccctaatactcctgtcctaattcctggcaatcctcccttggcaatgcccggcgccgtcggacctaagctgatgaggtcagacaagctggaggtttgcagggaatttcagaggggcaattgcaccaggggggagaacgattgtcgctatgcccatccaacagacgcatccatgattgaggctagtgataacaccgtgacaatctgtatggactacatcaagggaaggtgttcaagagagaaatgcaagtattttcacccaccggcacacctccaagccaggctgaaggctgcccaccaccagatgaaccactctgccgcgagtgcaatggccttgcagccagggaccctccagttgatccccaagcgttcagcactagagaaacctaacggggccacaccagtttttaatccgaccgtgtttcactgccagcaggccctgactaacctgcagctaccacagccggcctttatccccgctggtcccatcctgtgcatggccccggccagcaatatcgtgccaatgatgcatggggctacaccgaccacagtcagtgccgctacaaccccggccacatcggtgccctttgccgctcccactactggcaaccagcttaaattttag

SEQ ID NO: 125029 - DNA, 1065 bp, synthetic construct
  misc_feature 1..1065: note = Description of Artificial Sequence: Synthetic coding sequence
  source 1..1065: mol_type = other DNA
atgacagctgtaaatgtggcccttattagagataccaagtggttaaccctggaagtctgtagggaatttcaacgcggaacctgttcccgagctgatgccgactgtaaatttgcccaccctcctagggtgtgtcacgtcgagaacggtcgcgtggttgcttgcttcgactccctgaaaggccgctgcacacgagaaaattgcaagtaccttcatcctccaccccacctgaagacccagctcgagattaacgggcggaacaatttgatccagcaaaagacagcagctgccatgttcgcacagcagatgcagcttatgctgcaaaatgcccagatgtccagtctgggaagttttcctatgacccccagcattccagcaaacccccccatggcctttaatccctacatcccccatcctggcatgggcttagttcctgctgaacttgtccctaatacaccagtacttatacctggaaatccacctctggcaatgccaggtgccgtgggacctaagctcatgcggagcgacaaactggaagtctgtcgagaattccagaggggcaattgtacccgtggagagaacgactgcaggtacgcacatccgaccgatgccagcatgattgaggcctcggataacacagtaactatttgcatggactatattaaaggcaggtgttcccgggaaaagtgcaagtatttccatcctccagcccacttacaagcgagactgaaggccgctcaccatcagatgaatcattctgccgccagtgcaatggccctgcaacccggcaccctgcagctgattcctaaacgaagcgccctggagaaaccaaacggcgctacccccgttttcaatccaactgtttttcactgccaacaagctctgaccaacctgcagctcccccaaccggcttttattcccgcaggaccaatcctatgcatggccccagctagtaatattgtgccaatgatgcatggagccacccctactaccgtctctgccgccactacgcccgctaccagcgtgcccttcgctgcccctaccaccggcaaccagctcaagttttag

SEQ ID NO: 125030 - DNA, 1029 bp, synthetic construct
  misc_feature 1..1029: note = Description of Artificial Sequence: Synthetic coding sequence
  source 1..1029: mol_type = other DNA
atgacagccgttaacgtggccctgatccgcgataccaagtggctaactctagaagtatgtcgcgagttccagagaggtacgtgctcccgggctgacgctgattgtaaattcgcccaccctcctagggtgtgccatgtcgaaaatggccgggtcgtggcttgcttcgattccttaaaagggaggtgtacaagggagaattgtaagtatctgcaccctccgcctcacctcaagactcagctggagattaatgggagaaacaatctgattcaacaaaaaaccgccgctgcaatgtttgctcagcaaatgcagcttatgctgcagaatgcccagatgagcagcctcggaagctttcccatgacaccctccattcccgccaaccctcctatggcatttaacccctacattccacaccctggaatgggcctcgtgcccgccgagctcgtccctaacacccccgtactgattcctggcaatcccccattagccatgccgggagcggtgggacccaaactgatgagaagcgataaactggaggtctgcagagaattccagcgaggcaattgcactcgaggcgaaaacgactgtcgatacgcacaccccacagatgctagcatgattgaggcctccgataatacagtcactatctgtatggattacatcaaaggacgatgttccagggagaagtgtaagtacttccacccgccagcacacctgcaggctagattaaaagctgcccaccaccagatgaatcattccgcagcttctgccatggccctacagcccgggacattacagctgataccaaagaggagtgccctggagaaaccaaacggggccacgccagtgtttaacccgaccgtcttccattgtcagcaggccctgacaaacctgcagctcccgcagcctgctttcatccccgcagttcccatgatgcacggcgcaactcccacgaccgtgtcggccgccacaacgcccgctaccagcgttcctttcgccgctcctaccacagggaaccaactcaaattttag

SEQ ID NO: 125031 - DNA, 777 bp, synthetic construct
  misc_feature 1..777: note = Description of Artificial Sequence: Synthetic coding sequence
  source 1..777: mol_type = other DNA
atgtttgctcaacagatgcaactgatgctgcagaacgcccagatgtcttccttaggcagcttccctatgaccccttctataccggcaaatccacctatggcatttaacccttatattccccatcccgggatgggactggtgcctgcggaacttgtgcccaataccccagtcttgattcccggaaaccctcccctggctatgcctggcgcagttggacctaaactcatgcggtccgacaagctggaggtgtgtcgggagtttcaacgcggaaattgtacaaggggcgagaatgattgtaggtatgctcatcccacggatgcttcaatgatcgaggctagcgacaatactgtgaccatttgcatggactacataaaagggcggtgcagccgggaaaagtgtaagtattttcatccccccgcgcacctccaggcccgtctgaaagccgctcatcatcagatgaaccattccgctgcctcagccatggccctgcagcctggcacactgcagctaatccccaagcggagtgccttagaaaaaccaaatggcgctactcctgtgtttaacccgactgtgttccactgccagcaggccctcaccaatttgcagctgccacagcccgcattcatccccgctggccccattctgtgtatggctcctgccagcaacatcgtgccaatgatgcacggagcgactcccaccacagtgtctgccgccactactccagccacatctgtgccgttcgcagctcctaccactgggaaccagctaaaattttag

SEQ ID NO: 125032 - DNA, 672 bp, synthetic construct
  misc_feature 1..672: note = Description of Artificial Sequence: Synthetic coding sequence
  source 1..672: mol_type = other DNA
atgttcgcccagcagatgcaattaatgctacaaaacgctcagatgtcatcattggggagcttccccatgaccccttcaattcccgctaaccctcccatggcctttaacccctacattcctcatcctggtatgggcctggtgcccgccgagctggtccccaataccccggttttaatccctggaaatcccccactggctatgccaggagccgtgggacctaagcttatgagatctgataagttggaagtgtgcagggaattccaaagggggaactgcactcgaggggagaatgactgccggtacgctcatcccaccgatgccagcatgatagaggcgtccgacaatactgtaacaatatgcatggattacatcaaagggaggtgttcgcgtgagaaatgtaaatatttccatcctccagctcatctccaggcccgcttgaaagctgcccatcaccagatgaatcatagtgcggcctcagcgatggctttacagcctggcactctccagctgatcccaaaacgatctgcgctggagaaacccaatggtgccactccagtcttcaatccaaccgtgttccattgccagcaggcgctgacaaatctgcagctacctcagcccgctttcatcccagcagggcccatattatgtatggcgccagcctcaaatatttag

SEQ ID NO: 125033 - DNA, 729 bp, synthetic construct
  misc_feature 1..729: note = Description of Artificial Sequence: Synthetic coding sequence
  source 1..729: mol_type = other DNA
atgttcgcccaacagatgcagctgatgttacagaatgcacagatgtcgagtttagggagttttcccatgactccttcaatccctgccaaccctcctatggcttttaacccttatatccctcatccaggaatggggctggtgcctgctgaacttgtaccaaatacacctgttttaatccccggcaaccctccgctcgcaatgcctggggccgtgggaccaaaactcatgcggtctgacaagcttgaggtgtgccgggaatttcagaggggaaattgcactaggggggaaaatgactgcaggtatgctcaccctacagatgcaagtatgatcgaggcgagtgataatacagtgacaatctgcatggactatatcaagggacgctgttctcgtgaaaaatgtaagtattttcaccctcccgctcaccttcaggctaggttgaaggctgcacaccatcagatgaaccatagcgccgcaagcgctatggcactccagccgggcacgttgcaactcattcccaaacgctcagccctggagaaacctaatggcgccacccctgtcttcaacccaaccgtgtttcattgccagcaggctctcaccaatctccagctccctcaacctgctttcatcccagccggacccatactgtgcatggctcccgcgtctaacattgtacctatgatgcacggagccactcctactacggtgtccgctgcaactaccccggcttag

SEQ ID NO: 125034 - DNA, 453 bp, synthetic construct
  misc_feature 1..453: note = Description of Artificial Sequence: Synthetic coding sequence
  source 1..453: mol_type = other DNA
atcaaaggcaggtgcagcagagagaaatgtaagtatttccatccccccgctcacctgcaggcacgacttaaggcggcccatcaccagatgaaccactccgccgcctcagcaatggctctccaacctggaacacttcaactcattccaaaacgaagtgccctcgagaagcccaatggagcaacacccgttttcaaccctactgtgttccactgccagcaagcgctgaccaatctccagctaccccagccagcatttatccctgccggtcccatcctgtgcatggctcctgctagcaatatagtccccatgatgcacggagccacccctacaactgtctctgccgccaccacgcccgcgacaagtgtgccttttgcagcccctaccacaggcaaccaaatcccacagcttagcatagatgagttaaactcctctatgtttgttagtcagatgtag

SEQ ID NO: 125035 - DNA, 879 bp, synthetic construct
  misc_feature 1..879: note = Description of Artificial Sequence: Synthetic coding sequence
  source 1..879: mol_type = other DNA
atggaacgagcatccaagaacctgaaaggcaggtgcacccgcgaaaactgcaaatacctgcaccctccgccccacctcaaaactcagttggagattaatggtagaaataatctcatccaacaaaagacagcagccgccatgttcgcacagcagatgcaattaatgctgcagaatgcacagatgtcttccctggggtccttccccatgactccgagcattccggccaatccacccatggcgttcaacccatatattccacatcccgggatgggactggtcccagcagagttggtcccaaacactcctgttctgattcctggcaatccccccctggcgatgcccggagccgtcggccctaaactgatgcgttccgataaactggaagtgtgtagagagtttcagcgaggcaattgtactcgaggcgagaacgactgtcggtacgcacatccaactgatgcctcaatgatcgaagcgtctgataatacagtcaccatctgcatggattacataaaaggaaggtgctccagagagaaatgtaaatatttccatccccctgcacacctgcaggccaggctgaaggcagctcaccaccaaatgaatcactcagctgcctctgccatggcgttgcagccagggacactacagctcattcccaagagatccgctctggagaaaccaaatggcgctacccctgtcttcaaccctaccgtgtttcattgccaacaagctctgacaaatctacagctccctcagcccgcgttcatccccgcggtgcccatgatgcatggcgccacgcccacaactgtgagcgccgccactacccctgctactagcgtgcccttcgctgccccaacaacaggaaaccagttaaagttttag

SEQ ID NO: 125036 - DNA, 1377 bp, synthetic construct
  misc_feature 1..1377: note = Description of Artificial Sequence: Synthetic coding sequence
  source 1..1377: mol_type = other DNA
atggaattagagaagagggaaaagagaagcctcctaaacaaaaatctcgaggagaagcttaccgtgtccgccggcggctctgaggccaagcccttaatttttacattcgtgccgactgttcggaggctgcctacgcatactcagcttgccgatacatccaagttcctggtgaagatcccagaagagagtagtgataagtccccagaaaccgtgaacagaagtaagtcgaacgactatttgacgctgaatgcaggatcgcaacaagagagggatcaggccaagctgacttgcccctccgaggtcagcggaacaattttgcaggagcgcgagtttgaggccaataagctccaggggatgcagcagagtgacctgtttaaagctgaatacgtgctcattgtagattcagagggcgaggatgaagccgcctcacggaaggtggagcaggggccaccaggcggtatcgggaccgccgccgttcgccccaagagcctagcaatcagttcatcactagttagtgacgtggtgagaccaaaaacgcagggaaccgacctcaagacgagttcacacccagaaatgctgcatggaatggctcctcaacagaagcatggacaacagtacaagaccaagtcctcctataaagccttcgccgctattcctactaatacactccttctcgaacaaaaggcattggacgagcctgctaaaacggagagcgtgagcaaggataacactcttgagcccccagtagagctctacttccctgcccaattgcggcagcagacagaagaattgtgtgccaccatcgataaggtcttacaggattcattgtctatgcatagttcggattcgccttcccgttctcctaagacccttctcggatctgacactgtgaaaacacccactacactgcctcgtgcagccggacgcgagacaaagtatgccaacctctcatcgccttctagcacagtgtccgagagtcaacttaccaagcctggtgttattcgccctgtccctgtaaaaagcagaattctcctcaagaaagaagaggaagtgtatgaaccaaatcctttttcaaaatatctggaggacaactctgatctgttctccgagcaagatgtcaccgtcccgcccaaacctgtatcgcttcatcccttgtaccaaactaaactatacccacctgcaaagagcctcttgcatccccagactctcagccacgctgattgtctggctcctggtccattctctcacttgagtttttcactctcggacgagcaggagaactcccacacactcctaagccacaatgcttgtaataagctgtcccatccgatggtggctatcccagagcacgaagcacttgatagcaaggagcagtag

SEQ ID NO: 125037 - DNA, 873 bp, synthetic construct
  misc_feature 1..873: note = Description of Artificial Sequence: Synthetic coding sequence
  source 1..873: mol_type = other DNA
atgacatcgtgtatccttagcggtagcatccagacaaccccgcaagtgagcgctggaggctctgaagctaaacctctgattttcaccttcgtaccaaccgttcggaggctgccaacacatacacaactggctgatacatctaaattcctggtcaagatcccagaagagtccagtgacaagtctcctgaaaccgtaaatcgctcaaagagcaatgactatctgacgttgaatgcgggaagccaacaggagagagaccaggccaaactgacttgtcccagtgaggtttccggaaccatccttcaggaacgtgaattcgaggccaacaagctgcaaggaatgcaacagtcggacttgttcaaggcagaatatgtgctcattgtcgattcagaaggtgaggacgaagcagccagcaggaaggtggagcagggcccccctggcggcattgggacagctgccgttcggccgaagtcattagcaataagcagcagcctagtaagcgatgttgtacgccccaaaactcagggaacagatttgaagacttcctcacaccccgagatgctccatgggatggcaccgcaacagaaacatgggcagacacctacaacgctcccgagagctgccggtcgggaaaccaagtatgcgaatttgagtagcccctccagcacagttagcgagtcccagctcactaagcccggggtgattcggcccgtgcctgtgaagagcaggattcttctcaagaaagaggaagaagtctacgagcctaatccgttctcaaagtacctggaggacaactctgacttatttagcgaacagctctctcaccctatggtggccattccagagcacgaagccttggattcaaaggaacaatag

SEQ ID NO: 125038 - DNA, 705 bp, synthetic construct
  misc_feature 1..705: note = Description of Artificial Sequence: Synthetic coding sequence
  source 1..705: mol_type = other DNA
atgtgttcgtggtacctgggttttgaatgtagctctaaatcgaacgactatcttaccttgaacgcaggaagtcaacaggagcgtgatcaggccaagttgacatgtccatctgaggtttccgggaccatcttgcaggagcgtgagtttgaggccaataaactacagggcatgcagcagtccgacctctttaaggctgagtatgtcctcattgtcgacagtgaaggcgaagatgaggcagcatcgcgcaaagtggagcaggggccgccaggtggaatcgggacagcagctgtgcgccctaaatctcttgcaatatctagttccctcgtaagcgatgttgtgcgtcccaaaactcaaggtactgaccttaagacctcttctcaccctgagatgctgcacggcatggccccacagcagaagcacggccagacacccaccactcttccacgggctgcggggcgcgaaacaaagtacgccaatttgtcttctccttcatccaccgtgtccgagtctcagttaacaaagcccggcgtgattcgaccggtccccgtcaaaagtcggatcctgctgaaaaaggaggaggaggtctacgaaccaaacccattttctaaatatttggaagacaattcggatctgttctcagaacaactatcacaccccatggtggcgatacccgaacacgaggccctagacagcaaagaacagtag

SEQ ID NO: 125039 - DNA, 489 bp, synthetic construct
  misc_feature 1..489: note = Description of Artificial Sequence: Synthetic coding sequence
  source 1..489: mol_type = other DNA
atgcaacagtctgaccttttcaaagctgaatacgttcttattgtagacagtgaaggagaagacgaggcggcttcacgcaaggtggaacagggccctcccggaggcattggcaccgctgctgtgcgtccaaaatctctggccatatcttccagcctggtaagcgacgtggttcgacccaagacacagggaaccgatctgaaaacctcatcccatccagagatgcttcacggcatggcaccccagcagaaacacggacagcagtacaagactaagtcttcttataaggcattcgcggctatacctactaataccctgcttttggaacaaaaggcactggatgaacccgccaagactgagtcagtgtccaaggacaatactctggagcccccagtggagacacccacgacactcccacgcgctgccggtagagagaccaaatacgcaaacctatcatctcccagctcaacagtgagcgagagtcagttgtag

SEQ ID NO: 125040 - DNA, 2208 bp, synthetic construct
  misc_feature 1..2208: note = Description of Artificial Sequence: Synthetic coding sequence
  source 1..2208: mol_type = other DNA
atggctgctggaggggccgtagcggccgcacccgaatgtagacttctgccatatgcactccataagtggtcgtcattcagcagtacttatttgcccgaaaatattctggtggataaaccaaatgaccagtctagccggtggagctccgagagtaactaccctccacaatacctgattctcaaattagaacgaccggccatcgtacagaatattactttcggtaagtacgagaagacacacgtgtgcaatctcaagaaatttaaagttttcggcgggatgaatgaagagaacatgactgaattgctctcttccggcctgaaaaacgactacaacaaggagacattcaccctaaagcacaaaatagatgaacagatgttcccctgccggtttatcaagatagtgccactactgagctggggccctagttttaattttagcatatggtatgtggagctcagcggcatcgacgatcctgacatcgtccagccctgcctcaattggtactctaagtacagagagcaggaggctatccgcttgtgcctgaaacacttcaggcagcataactatactgaggcctttgagtcactgcagaagaaaaccaagatcgccctagaacatcccatgctgactgacattcacgacaaactggtcctcaagggggacttcgatgcttgtgaagaattgatcgagaaggctgtgaacgacggcctttttaaccagtatatcagccagcaggagtacaagccccgatggagccagattataccgaagtctacaaaaggggatggtgaggacaatcggcccggtatgcgggggggccatcaaatggtcatcgacgtccagaccgagaccgtctatctgttcggcggctgggacggaacccaggacttagcagacttttgggcctactctgtcaaagagaaccagtggacctgtatttcacgcgacaccgagaaggaaaacggtccctccgcccgcagttgtcacaaaatgtgcattgatatccagcgccggcagatctacactctcggcagatatttggatagctccgtccggaactcgaaatcacttaagagcgacttttatcgatacgatatcgacacaaacacttggatgctcttgagcgaagacactgccgcagatggtgggcccaagctcgtgttcgatcaccagatgtgtatggacagtgaaaaacatatgatatatacattcggaggtcgcattctgacttgcaacgggtctgtggacgactctcgcgcctctgagcctcaattttctggactttttgcttttaactgccagtgtcagacatggaaactgttgcgtgaggactcctgtaacgcaggcccggaagacattcagtccaggattgggcattgtatgttgtttcattctaagaatcgatgtttgtatgtctttgggggccagcgcagcaaaacatacctgaacgacttcttctcatacgatgtcgatagtgaccatgtggacataatctcagatggaaccaagaaggacagcgggatggtcccgatgacaggctttacccagcgcgcgactatagaccctgagttgaacgagattcacgtgctaagcgggcttagcaaggacaaagaaaagcgggaggagaacgtgaggaactctttctggatttatgatattgtaagaaattcgtggtcctgcgtctataaaaacgaccaggcagccaaggacaatcctactaagtccctgcaagaggaggaaccatgccccaggtttgcccaccaactggtctacgacgagctacacaaggttcactatttgtttggcgggaatcctgggaagtcttgcagccccaaaatgcgacttgacgacttttggtccctcaaattatgcagacctagtaaggattatttgctccgtcattgtaagtacctgatccggaaacacaggttcgaggaaaaagcccaagttgatccccttagcgccttgaagtatctccagaacgatctgtatatcaccgtggatcactcggatccagaagagactaaagagttccagctacttgcttcagccctgttcaagtctggctcggactttaccgccttaggatttagcgacgttgaccacacttatgcccagcgaacccagctgtttgacacccttgttaacttctttccagactcaatgactcctcccaagggaaatttggtggaccttattactctgtag

SEQ ID NO: 125041 - DNA, 558 bp, synthetic construct
  misc_feature 1..558: note = Description of Artificial Sequence: Synthetic coding sequence
  source 1..558: mol_type = other DNA
atgactgggtttactcagagggctactatagatcccgaactcaatgagatccacgtgctttccgggctgtcaaaggacaaggagaaacgcgaggagaatgttaggaactctttctggatctacgatatcgtgcgtaattcttggtcgtgtgtttacaaaaacgatcaagcagccaaggataacccaacaaaaagtctgcaggaagaagagccctgcccgcgcttcgcgcaccagctcgtgtacgatgagctgcacaaagtgcactacttgtttggcggaaacccaggcaaatcttgctcgcctaagatgcgcctggacgatttctggtcacttaagctgtgccggccatctaaggattatctgcttagacattgcaaataccttataagaaagcaccgatttgaagagaaggcacaggtggatcctctgtctgctttgaaatatttgcagaacgacctgtatatcaccgttgatcactcagaccctgaggagacaaaggaggctttcctcatgtggattacaccaatgctgaaggagctcagcagcctaacaccctag

SEQ ID NO: 125042 - DNA, 3060 bp, synthetic construct
  misc_feature 1..3060: note = Description of Artificial Sequence: Synthetic coding sequence
  source 1..3060: mol_type = other DNA
atgatggccgccgcggcagcagctgcagccggttcttctagcagtggagggggggggggcggcagcggcagctcaagcagcagtagcgatacttctagtactggggaggaagagcggatgcgtcggcttttccagacatgcgacggcgatggcgacggctacatctcaaggaacgacttattaatggtgtgccgacagctcaacatggaagagtctgttgccgagatcatgaatcagctgggggcagacgagaatggaaagatcagctttcaagacttcacaaggtgtcggatgcagcttgtgagagaaatccggaaggaggaagtagatctttcagccaaatcggacaactcgtgcacaaagaagctcagggatcgcattgcctcctggccaacgtcctccgataactccctgggcgctctgagcgccgctcgtgaatcctgggaatacgatagcggagcgcgcgacttgcaatctccagacgtacagagccaatccgccctgcagaagcttctggaatacgggggttcctccctccatcagcaggccgccctgcataagctactgacccagtctccacatatcgggaactcggtggggggctcctacttggagctggcgaatactctccatagtgccgctttggccagtctgaaaggcgacatcgtggagctgaacaagcggcttcagcagaccgagagggagagagatttactggagaagaaacttgccaaagctcagtgtgagcagtcacacttgatgcgcgaacacgaggacgtgcaagaacggaccactttgcgttacgaagagcgcataactgagctgcactctgtcatcgcggagctgaacaagaaaatcgaccgactgcagggtacaaccatccgggaagaagacgagtactctgagctgaggtctgaactgtctcagtcccagcacgaggtgaatgaagattcgcgatctatggaccaggatcagactagtgtatctatccctgagaaccagagtacgatggtaaccgcggatatggataactgttccgacctgaactcagagttacagagggttctaacaggattggaaaacgtcgtctgtggtagaaagaagtctagctgtagcctgtccgtcgcagaggtggataaacacatagagcagctcactaccgctagcgagcactgcgaccttgctattaagaccgtggaagagatagagggggtgctggggcgtgatttgtatcctaatctagccgaagagaggtcacggtgggagaaggagctcgcaggtctgagagaggagaacgagtcgctgaccgccatgctctgcagcaaagaagaagagctgaataggaccaaagcaacgatgaatgctatccgcgaagaacgtgaccgccttaggcgtcgagtccgggagcttcagactcgactgcagagtgttcaagccaccgggccaagctctccaggccgccttacgtcaactaaccgtcctataaacccttctaccggcgaactgtctacctcctcctcgagtaacgatattcccattgcaaagatcgccgagcgagtgaaactgtcaaaaacacgttccgaaagcagcagtagtgaccggcccgtgttaggttccgagatttcatcgatcggggtttccagcagcgttgccgagcatctagcgcattccttgcaagactgtagcaatatacaggaaattttccaaaccctttatagtcatggatccgccataagtgagtccaagatcagggaattcgaagtggagacggagcgcttaaacagccggattgaacatcttaaatctcagaacgatcttctgactattactctcgaggagtgtaaaagcaacgcagaaagaatgagcatgcttgtggggaaatacgaatccaacgccaccgccctccgcctggccctgcagtacagcgaacaatgtatagaagcttacgaactgttactggccctggccgagtctgagcaatccctgatcctgggacaatttcgtgctgctggggtgggatctagtccgggcgaccagagcggggatgaaaatatcacacagatgttgaaacgggctcacgattgccggaagacggccgaaaatgcagctaaagcactgttgatgaaattggatggctcctgcggtggcgccttcgctgttgctggctgctctgtgcagccatgggagagcctgagttctaacagccacacctcaaccacttctagcaccgctagcagctgcgatactgagtttaccaaagaggatgagcagcggctcaaagattatatccaacagctgaaaaatgaccgagcagctgtcaagctaacaatgctggagttggaaagcattcacatcgacccgctttcgtacgacgtgaagcctagaggtgatagccaaaggctggacctcgagaatgcagttctaatgcaggagctgatggccatgaaagaagagatggcggagttgaaagcacagctgtaccttctagagaaagagaaaaaagcccttgaactgaaactttcaactagggaagcacaggaacaagcctaccttgtgcacatagaacatctcaaatccgaggttgaggagcagaaggaacagcggatgcggagcttatcttctacttcatctggatcaaaggataaacccggcaaggaatgcgctgacgccgcaagtccagcactgagcttggccgagctgaggactacttgttcagagaacgaacttgccgcagagttcaccaacgcaattaggagggaaaagaaactgaaggctcgagttcaggagctggtctcagcactggaaagattaacgaagtctagcgaaatccggcatcagcagtctgccgaatttgtgaacgatttaaagcgtgcgaatagcaacctagtggcagcctacgaaaaggccaagaagaaacaccagaacaagctaaaaaaattggaatcacagatgatggccatggtggagagacatgaaacccaagtacgcatgttgaaacagcggatagctcttcttgaggaagagaatagtcgaccacacaccaatgagacctcactgtag

SEQ ID NO: 125043 - DNA, 564 bp, synthetic construct
  misc_feature 1..564: note = Description of Artificial Sequence: Synthetic coding sequence
  source 1..564: mol_type = other DNA
atgtcaggcggaggtactgaaactccagttggttgtgaggccgcccccgggggcggttctaaaaaaagagattctctcggtacggcaggaagtgcacacctgatcattaaagacttaggagagatccacagtagactcctagaccatcggccagtgatccagggggagacgagatacttcgtgaaagagttcgaggagaaacgaggccttagagagatgcgggtgctggagaaccttaagaacatgatacatgagactaacgagcacacactgccaaagtgtcgcgataccatgcgtgactccctatctcaggtccttcaacgcctccaggccgccaatgactcggtgtgtagacttcagcagagagagcaggaacgaaaaaagattcactccgaccatttggtcgcatctgagaagcagcatatgctgcagtgggataattttatgaaggagcagcctaacaagcgcgccgaggtcgatgaggaacatagaaaggcaatggagaggcttaaggaacaatatgccgagatggagaaggatctggcaaagttcagtaccttttag

SEQ ID NO: 125044 - DNA, 372 bp, synthetic construct
  misc_feature 1..372: note = Description of Artificial Sequence: Synthetic coding sequence
  source 1..372: mol_type = other DNA
atggagaagcgcgggttgcgcgaaatgcgcgtgcttgagaacctgaagaacatgatccatgagaccaacgaacacacactgcccaaatgcagagacaccatgcgtgattcactgagccaggtattacaacgattacaggccgctaatgatagtgtctgtaggctccagcagcgcgaacaggagagaaaaaagattcacagcgatcacctcgtggcaagcgaaaagcagcacatgcttcagtgggataactttatgaaagagcaacctaacaagcgagccgaagtggatgaggaacacagaaaagcgatggagcgcctaaaggaacaatatgccgagatggaaaaagacctggcaaaattttcgaccttttag

SEQ ID NO: 125045 - DNA, 3987 bp, synthetic construct
  misc_feature 1..3987: note = Description of Artificial Sequence: Synthetic coding sequence
  source 1..3987: mol_type = other DNA
atggagtccagagatcctgcacagcccatgtcacctggcgaagcaactcaatccggggccagacctgccgacagatacggattgctgaaacatagtagagagtttttggatttcttctgggatattgctaagccggaacaggagacccggttagccgctactgaaaagctcctggagtatttacgtggaagacctaagggctccgagatgaaatacgcattgaaaaggctgatcaccgggctcggcgtgggccgggagacagcacggccttgctactcactggccctggcccaactgctccagagttttgaggatttacccctgtgcagcatcctgcaacaaattcaggagaagtatgatctgcaccaggtgaagaaggccatgctccgcccggccctctttgccaatctattcggggtactggctcttttccagtctggtaggctggtgaaggaccaggaagcccttatgaaatctgtgaaattacttcaagcgctcgcgcagtaccagaatcatctccaggaacaacccaggaaggctctcgtggacattctgagtgaggtgtcgaaggccaccctccaggaaatcctgccagaagtcctgaaagccgatctgaacatcatcttatcatcacccgaacaactggaactgttcttactggctcaacaaaaagtaccctcaaaactgaagaaactggtcgggtcagtgaacctgttcagcgatgaaaatgttccccgactcgtcaatgttttgaaaatggcggctagttcagtgaagaaggacaggaagctaccagccattgcgctagacctcctacgcctagctctgaaagaggacaaatttcccaggttttggaaagaggttgtggagcaggggctcctcaaaatgcaattctggccagcgtcatatctgtgctttcggctgctcggagccgccctacccctcttgaccaaggaacagctgcatctagtaatgcagggtgatgtgatcaggcactacggggagcatgtgtgcactgcaaagttacccaagcagttcaaatttgctccagaaatggatgattacgtcggtaccttcctggaggggtgccaggacgatccagaacgtcagttagccgtgttggtggccttctcttccgtgaccaatcagggcctgcctgtgactcctacattctggagagtcgtcaggttcctctcccccccagccttgcaaggctatgtggcatggttgagggcgatgtttctgcaacccgatttagatagcttagttgatttttctactaataatcagaagaaagcccaggactcctcactgcatatgccagagcgagctgtctttagactgcgcaagtggataatcttcaggctggtgtcaatcgtggactctcttcacttggagatggaggaggctttgacagagcaggtggccagattctgtctgttccatagcttcttcgtgacaaagaagccaacctcacaaatccctgagaccaagcatcctttcagtttcccattggaaaatcaagcaagagaggcggtgagctcagcgttcttcagcctgctgcaaacattgagcactcagtttaaacaggccccgggacagacccagggtgggcagccatggacataccacctcgttcagtttgctgacctgttactgaaccattcccataatgttacaacagttactcccttcaccgcccagcaaaggcaggcatgggatcgaatgctacagaccttgaaagaattagaggcgcactctgctgaggcccgggctgctgcattccaacatctgttgctgctggtgggaatccacctgctgaaaagtcctgcagagtcctgcgacctactcggcgatattcaaacatgcatcagaaagagtttaggcgaaaaacctagacgctctagaacaaagactatcgacccccaggaacctccttgggtggaggtgttggtggaaatcctgctggcgcttctggctcagccgagtcatctgatgcgccaggttgcacggtcagtgttcggccatatctgcagccatcttacccctcgagcactccagttgattctcgatgtgctaaaccctgaaaccagcgaagacgaaaacgaccgggtggtggtaactgatgactccgatgaaaggcggttaaagggagcagaagacaaaagcgaggagggcgaagacaaccggtcgtccgagtctgaagaagagtctgagggggaggagtcagaggaggaagaacgagatggcgacgtcgatcagggtttccgcgagcagctgatgacagtgttgcaagcaggcaaggctctgggaggcgaagactcagagaacgaggaggaactcggtgacgaagcaatgatggcccttgaccagagccttgcaagcctttttgctgaacagaaactccgcatccaggctcgtcgcgacgagaaaaataaacttcaaaaggaaaaagccctaaggcgcgattttcaaatccgagtgcttgatttggtggaggtgttggtgactaagcagcccgaaaacgccctggtcctggagctgttggaaccactactctccataataagaaggtctcttaggagctccagcagcaagcaggagcaggatctgctgcataagacagctaggattttcactcatcacctgtgtagagcccgacgctattgccacgacctgggggagagagcaggggcactgcacgcgcaagtggagaggctagtgcagcaggcaggtcggcagcctgactcaccaacggctctctatcactttaacgcctcactgtatctgcttcgcgtgctgaaaggcaatactgcggaaggctgcgttcacgagacccaggaaaaacagaaggccggtaccgaccctagccatatgcccacaggccctcaagcagcatcctgcctcgatctgaacctggtgacccgagtgtattccacagccctgagttcatttctgacaaagaggaacagcccccttacagtccccatgttcctgtccttgttctcaagacatccagtgctgtgtcaaagtctcctgcccattttagtgcagcacatcaccgggccagtacgtcccagacatcaggcttgcttgttgttgcaaaaaaccctctcaatgcgagaggtgagatcctgctttgaggaccccgagtggaagcaactcatggggcaggtgctggcaaaggttaccgaaaatttgcgagttctcggagaagctcagaccaaagcacagcaccagcaggcgctctcttctctcgaactgctgaacgtgctgttcagaacctgcaaacatgaaaagttgactctggacttaacagtcctactgggcgtgctgcagggccagcagcagtccttgcaacagggcgctcacagcactggcagttcccgccttcatgatctgtattggcaggccatgaagactcttggggtgcagcgtcccaagctggagaaaaaggatgcaaaagagatcccaagcgcgacacagtctccaatatcgaagaagcggaaaaagaagggattcctcccagaaacgaagaaaaggaagaaacgaaaatccgaagatgggactccagcagaagatggaactcctgccgccaccggtggctcacagcccccaagtatggggagaaagaaacgaaaccggaccaaagctaaggtgccggcgcaagccaacgggacacccacaacgaagagtccagctccaggagcgccaacccgctctccttcaacacccgctaagagccctaaactgcagaagaagaaccagaaaccatcacaagttaacggtgccccaggttcacctacagagcctgcaggccagaaacaacaccagaaagcactgcctaagaaaggggtcctgggaaagagtcctctgagcgcactggccaggaagaaggcacgactcagtcttgtcatcaggtctccgtctctgttgcagtccggcgcaaagaaaaaagcccaagtgaggaaggctggtaagccgtag

SEQ ID NO: 125046 - DNA, 3999 bp, synthetic construct
  misc_feature 1..3999: note = Description of Artificial Sequence: Synthetic coding sequence
  source 1..3999: mol_type = other DNA
atggagtcacgggatcctgcacagccaatgtctcccggagaagccactcagtcgggggctcgacccgcggatagatacggactcttgaagcactcccgggaatttctagacttcttctgggacattgcaaaaccagagcaagagactagactcgccgccaccgagaagctgctggagtacctcaggggtagaccgaagggatcagagatgaagtatgccttgaaacggttaatcacaggtctgggggtgggtcgcgagactgcaaggccatgttattcactggcactggcccagcttctacagtccttcgaggatttaccactctgttctatcctccagcagatccaggagaaatatgatcttcaccaggtaaaaaaggccatgctcagacctgccttatttgcaaatcttttcggagttttagcccttttccagtcagggcgcctggtgaaagaccaggaagctctcatgaagtctgtgaaactactccaggccttggcccagtaccagaaccacctgcaggagcagcctagaaaggccctggtcgatattcttagcgaggtgtcaaaagctacgctgcaggaaatcttgcccgaggtgctaaaggctgacctgaacataatcctgagcagccccgagcagctggagctcttcctgttggcccagcaaaaggtacccagcaaactgaaaaaactcgtggggagtgtgaatctcttttcagacgagaacgttcctcgtcttgtcaacgtcctgaagatggccgcctcttcagtaaagaaggatcgcaagctccctgctattgctttagacctgctccggctagccctcaaagaggacaagtttcctcgcttttggaaggaagtagttgagcaaggcttgctgaaaatgcagttctggccagccagctacctttgctttaggctgctcggagccgccctccctttgttgaccaaagaacagctgcacctcgttatgcagggcgacgtgattagacactacggcgagcacgtctgcaccgccaagctcccaaagcagtttaaattcgcgcctgaaatggatgactatgtgggcactttcctcgagggatgccaagatgacccagaacgccagctggctgtgctagtggcattcagtagtgtcacgaatcagggcttgcctgtcaccccaacattttggcgcgtggtgaggttcctctcccctcccgccctgcagggctacgtcgcctggctcagggctatgtttttacagcctgatctggactcattggtggatttctccacaaataaccagaaaaaggcccaagacagctctctccacatgcccgagagagccgtctttcgcctgcgcaagtggatcatattcaggcttgtgtctatcgtcgactcgcttcacctagaaatggaagaggcattgaccgaacaggtagcacggttctgtctctttcattcattcttcgttactaaaaagccaacctcccagattcccgagaccaagcacccgtttagcttcccactcgaaaaccaggctagggaggctgtctcctcggcattttttagtctcttgcagacactctccacacagttcaaacaggccccagggcagactcaaggggggcagccttggacctaccacttggtccagttcgccgatctgttgcttaaccattctcacaacgtgactaccgtcaccccttttaccgcccagcagcgacaggcatgggaccgcatgctccagactctcaaagagctcgaggcacacagtgccgaagccagggccgccgctttccaacacctattactcctggtcggaatccacctgctgaagagcccagctgagagctgcgatctgctgggtgacatccagacttgcataagaaaatcgctcggcgaaaagcctcggcgcagccggactaagacaatcgacccacaagagcctccctgggttgaagtcctggtggaaatcctgttggccctgctagcacagccaagccacttgatgagacaagtggcaaggtccgtgtttggccacatctgctctcacctaacacccagggcactccagttgatcctcgatgtgctcaaccccgagacgtcggaagatgaaaatgacagggtggtcgtgaccgatgacagcgatgagcgacggctcaagggggcggaagacaaatcagaggaaggtgaggacaatcggagtagcgagagcgaggaggagtctgagggcgaagagagcgaagaagaagaacgtgacggagatgttgaccaaggattccgtgagcaactcatgaccgtcttacaggccggcaaggcccttgggggagaggatagcgaaaacgaagaagaacttggggacgaggctatgatggccttggaccagagcctggctagtctgtttgctgaacagaaactgagaatacaggcccgtcgagacgaaaaaaataagctccagaaggagaaagcgcttcggcgcgactttcagatacgggtccttgatctcgtggaggttctggtcactaaacaacccgaaaatgcattagtgttagagctactggagcccctcttatctattatccgccgcagcctgcgtagtagttctagcaagcaagagcaggatctgcttcataaaactgccaggatattcacacaccatctgtgtcgcgctcgccgctactgccacgacttaggagaacgggccggagcactgcacgcacaggtcgaacggttggtacaacaagctggccgacaacccgattctcctactgccctctatcactttaatgcttcactgtacctgctgagggttctgaagggaaatactgctgagggatgcgtgcatgagactcaggaaaagcaaaaggctgggactgacccttcccatatgcccactgggcctcaggccgcctcctgcttggatcttaacttggtcacccgtgtgtatagcaccgctttgagcagctttcttactaagcggaacagcccactcacggtacctatgtttttgtctctgttctcacgtcacccagtgctctgccagtccctgttgcctatcctcgtccagcatatcacaggcccggtgcgacctcgccatcaagcgtgcctgttgctccagaagaccttaagtatgcgcgaggtgaggtcttgtttcgaggatcctgaatggaaacagctgatgggacaggtgctagccaaagtgacagagaatcttagagtcttgggggaggcccaaactaaggcccagcaccagcaagccctgtcgtcactggaacttctgaacgttctgtttcgcacttgtaagcatgaaaaattgacactcgacctaaccgtcttgcttggcgtattacaggggcagcagcaatcgctgcagcagggggctcatagtaccggcagctcccggctgcacgatttgtattggcaggcaatgaagactctcggtgtccagaggcccaagctcgagaaaaaagacgccaaggagatcccttctgccacccagtcgcctatatccaagaagcgcaagaagaaaggattccttcccgagacaaagaagcgtaagaagcggaagtccgaagacggcacgccagccgaggatggcacccccgctgctaccggcggcagtcagccacctagtatggggagaaagaagcgtaataggactaaagctaaggttcctgctcaagctaacggtacacctaccactaaaagtccagccccaggagcccctacacgaagcccatcgacacctgctaaatctccgaaactgcagaaaaagaatcagaagccgagccaagtcaatggagctcctggctcaccgacggagccggcaggccagaagcagcatcagaaggccttgcccaaaaagggtgtactgggcaagagtccgctttctgccctagctaggaagaaggctcgactctccctggtgatcaggtccccctccctcttgcaatcaggcgctaagaagaaggctcagacattgcgctttaccatcagctcctcaaagaaatag

SEQ ID NO: 125047 - DNA, 1812 bp, synthetic construct
  misc_feature 1..1812: note = Description of Artificial Sequence: Synthetic coding sequence
  source 1..1812: mol_type = other DNA
atggagtctcgtgaccccgcgcagcccatgtctcctggggaagccacacaaagtggggccagacccgcagacagatatggcctgctaaagcacagccgtgaatttttagacttcttctgggacattgcaaagcccgaacaggaaacccgcttggcggctacggaaaagcttcttgaatacctgaggggtagaccgaaaggatccgaaatgaaatatgcactgaaacgactaataacaggtctgggggtcgggcgggagactgcacggccttgttactccctggccctggcacagcttcttcagagctttgaggatttaccactctgttccatcctccagcagatccaagaaaagtatgatctacatcaggttaagaaagcgatgctgcggccggcactgtttgcgaacctgtttggtgttctggcactcttccaaagcgggaggcttgtgaaggaccaggaggccctcatgaagtcagttaaactcttacaggcccttgcccagtaccaaaatcacctgcaagaacagccccggaaagctctggtcgatatcctctccgaagtatctaaggctactttacaggaaatcttgcctgaggtcctgaaggccgacctgaatataatcttgtcttcgccggaacagcttgagctcttcttgctggcccaacagaaggttccatcaaagctgaaaaagctggtaggaagcgtaaatctcttctcagatgaaaacgtgcctcgactggtgaatgtgctgaagatggcggcttcgtctgtgaaaaaagatcgaaaactgccggccatcgccttagatctactccggctggccttgaaggaagacaagttcccaagattttggaaagaggttgtagaacaggggttgctcaaaatgcaattctggcccgcaagctatctatgctttaggctgctcggcgccgcactgccactgcttacaaaagaacaactgcacctggttatgcagggggatgtgatacgtcattacggagaacacgtctgtaccgccaagttacctaagcagttcaaatttgcacccgagatggacgactacgtaggaacctttctcgaaggctgccaggatgaccctgagaggcagctcgccgtcctggttgctttcagtagtgtcacaaatcagggactcccggtaacccccaccttttggagagtggtgcgtttcctgtctccacccgccctgcagggatacgtggcctggcttcgagccatgttccttcaacctgacttagacagcctggtcgactttagtaccaataaccagaaaaaggcacaggactcctccctgcacatgccggagagggccgtgttcaggctccgcaaatggataatctttcggttggtttccatcgttgacagtttgcacctcgagatggaagaggccctcactgaacaagttgcacgcttctgcctatttcattcttttttcgtgaccaagaaaccaaccagccagattcccgagactaagccgcaggagagatctgaagggcctgctcagccaccacacgctcctggagggccagaaaggccaaaattagaaaaaaaagacgcaaaagagatcccaagcgctgaagacggcaccccagcagcaactggcgggtcacagcccccttccatgggtagaaaaaagcggaatcgcaccaaggctaaggtcccagcccaggcgaacggtactcccaccaccaagtccccggcacccggcgctcctactcggtcccccagtactccggctaaaagccccaagttgcagaagaaggctcaggtgcggaaagcaggaaagccctag

SEQ ID NO: 125048 - DNA, 2487 bp, synthetic construct
  misc_feature 1..2487: note = Description of Artificial Sequence: Synthetic coding sequence
  source 1..2487: mol_type = other DNA
atggccgctgaggaagcagacgtcgacatagaaggggacgtcgtggcagctgcaggggctcagccaggatcaggggagaacactgcctctgtgctgcaaaaggatcactaccttgatagcagctggcggacggagaacggattaatcccatggactctggacaacaccatatccgaggagaatcgcgcagtcattgaaaagatgcttctagaggaagagtactatctctcgaaaaagagccagcccgagaaggtgtggcttgaccagaaagaggacgataaaaagtatatgaaatcactccagaagactgccaaaatcatggtccattcaccaactaagcctgcctcttattcggttaaatggactatcgaggaaaaggaactctttgagcaaggactggcaaagttcggccgccggtggactaagatatccaagctcattggctcccggaccgtcctgcaagttaaaagctatgcccggcaatacttcaagaacaaggtgaagtgtggactggacaaggaaactccgaaccagaaaactggccacaatcttcaggtcaaaaatgaagacaagggcacgaaggcatggactccttcgtgtctaagagggagagccgacccgaacctcaacgcggtaaagatcgagaaattaagtgatgacgaggaggttgatatcacagacgaggtggatgagttaagctcgcaaaccccacaaaagaacagctctagcgatctgcttctggacttcccaaactctaagatgcatgagacaaaccagggtgaatttatcacgagtgattctcaggaggcgttattcagcaagtcctcaagggggtgtttgcaaaatgagaagcaggacgagacactctcttcctctgaaatcactttgtggacggagaagcagtctaatggagataaaaagagcatcgaactgaacgatcaaaagtttaacgagctcatcaaaaactgcaacaagcatgatggtcgcggcattatcgtagatgcgcgacaactgcccagccctgagccttgtgagatacagaagaatctcaacgataatgagatgttgttccacagttgtcagatggtagaagagagccatgaagaagaggagctaaaacctcccgagcaggaaatagagattgaccgcaacattatccaggaagaagaaaagcaggcaattccggagttcttcgagggtcgccaggccaagacccctgaaaggtacctcaagatccgcaactacattctagaccaatgggagatctgcaagcctaaatatttgaataaaacgtctgtgaggcctggtcttaaaaactgtggagatgtgaattgtattggcaggatccacacataccttgagttaatcggagccattaactttgggtgtgagcaggccgtctacaaccggccccagacagttgacaaagtgcgaatacgcgaccggaaggacgccgtcgaagcctaccagctggctcagcgcctgcagagtatgcgcacccggcgtagacgggttagagatccttggggaaattggtgcgatgcaaaggatttagagggtcagactttcgaacacctgagcgcagaggagttggctaagcgacgtgaggaggaaaaaggtcgccccgtaaagagtctgaaggtgccaaggcccacaaaaagttctttcgaccccttccagctgattccctgcaactttttcagcgaagaaaaacaggaaccctttcaagtaaaagtggccagtgaggctctcctaattatggaccttcacgcccatgtgagtatggcagaggtcataggcctgctggggggcagatattctgaagtcgacaaagtggtggaggtctgtgctgcagagccctgtaatagcctcagcactggtcttcagtgcgaaatggacccagtgtctcagacccaggcctcagagactcttgctgtacgtggcttctcagtgatcgggtggtaccactcacatccagccttcgaccctaatccctcactccgggacatcgacacccaggctaagtaccaatcctacttttctagggggggtgctaagttcatcgggatgatcgtaagtccttataatagaaataacccactcccgtactcacagataacttgtttggtgatttccgaagagatctcgcctgatgggtcgtaccggctgccctacaagtttgaagttcagcaaatgctggaggaaccacagtgggggctggtgttcgagaaaacgcggtggattattgaaaagtatcgtctgtcccatagctctgtgccaatggacaaaatcttccgccgagactccgatttaacctgcctgcagaagttgctggagtgtatgaggaaaaccctgtcgaaggttacaaactgtttcatggccgaggaattcctgacagagattgagaatttgttcctcagtaactacaagtcaaatcaagaaaatggggtcactgaggagaattgcacgaaggagttactgatgtag

SEQ ID NO: 125049 - DNA, 843 bp, synthetic construct
  misc_feature 1..843: note = Description of Artificial Sequence: Synthetic coding sequence
  source 1..843: mol_type = other DNA
atgccaaaaaaggccaagcctactgggtccgggaaagaggaggggcccgccccatgcaaacagatgaaactggaagccgcaggtggtcctagtgccctaaactttgactctccatctagtttattcgaatctttaatcagccctatcaagactgagacctttttcaaggagttctgggaacagaagccactcttgatccagagagatgacccagctctggctacttattacggtagtctcttcaaactgaccgacttgaagtcactgtgcagcaggggaatgtattatggaagagatgtgaacgtatgtcgctgtgtcaacggcaaaaagaaggtgctgaataaagatggtaaggctcatttccttcaactacggaaagactttgaccagaagcgcgccacgatccaattccatcaaccacagagattcaaggacgagctctggcgcatccaggaaaaactggaatgctatttcgggtcactggttgggagtaatgtgtatattaccccggccggcagtcagggtcttcctccacactacgacgatgtggaagtgttcatcctgcagctcgagggggaaaaacattggcggctttaccaccccaccgtgcctctggcacgggaatactcagtggaagccgaggaaagaattgggcggcctgtccatgaattcatgctcaagccaggggatcttctttactttccccgcggcaccatccaccaggccgacacccccgccggcctggcccattctacacacgtcaccatctctacttatcagaataacgacgccggcgccagaatgcgccgatgtgatctgcgagcgatcgccccacagaagtag

SEQ ID NO: 125050 - DNA, 1398 bp, synthetic construct
  misc_feature 1..1398: note = Description of Artificial Sequence: Synthetic coding sequence
  source 1..1398: mol_type = other DNA
atgcctaagaaggctaagcccacgggctccggaaaagaggagggaccagctccttgtaagcagatgaaacttgaagcagcgggagggcccagtgcgctgaactttgactccccttcctcattattcgagtcactgattagtcctatcaagaccgagacctttttcaaagaattttgggagcagaagcctctgttaatccagagggacgacccagccctggcaacatactacggaagcttgttcaaactgacggacctgaaatcgctgtgctctaggggtatgtactacggcagagacgtcaatgtatgccgctgcgtgaacgggaaaaagaaagtgctgaacaaggatggcaaggcccattttctgcagcttcgaaaggattttgaccagaaacgcgccactattcagttccaccagcctcagaggttcaaggatgaattgtggagaatccaggaaaagcttgagtgctattttggttccctcgttgggagcaatgtgtacataacaccggctgggagtcagggacttccaccacactacgatgatgttgaagtattcattctgcaattggagggcgagaaacactggcgcctctaccaccccactgtaccgctggccagggaatacagcgtggaagccgaggagaggattggaagacccgtgcacgaatttatgctgaagccaggagacctgttatattttccaaggggaacgattcatcaggccgatactcccgcgggtctcgcccattccacacatgtgacaatatccacctaccagaataacagctggggggattttctgctggatactatctctgggctggtttttgataccgctaaggaggacgtggagctcaggaccggtatccctcgacagctgctgctgcaggtagaatctacaacagttgctacccggaggcttagtgggttcctgaggacgttggccgaccgccttgaagggacgaaggaattattgagctccgatatgaaaaaggactttataatgcatcgcttgcctccttactctgccggagacggcgccgaactttccacccctgggggcaaactgccccgactcgatagcgtggttaggctgcaatttaaagaccatattgtgcttacggtactcccggatcaagatcagtccgacgaagctcaggagaagatggtgtacatctaccactcactcaaaaactccagggaaactcacatgatgggaaacgaagaggagaccgagttccacggactccggttcccgctgtctcatctcgatgctcttaaacaaatctggaactcacctgctatctcagttaaagacctgaagttgacgacagacgaagagaaggagagtctggtactgtcgctgtggactgaatgccttattcaggtggtgtag

SEQ ID NO: 125051 - DNA, 1395 bp, synthetic construct
  misc_feature 1..1395: note = Description of Artificial Sequence: Synthetic coding sequence
  source 1..1395: mol_type = other DNA
atgcctaaaaaagcaaagcctacaggatctggcaaggaggaaggtccagctccctgtaagcaaatgaagctcgaggccgccgggggtccttcagccttgaactttgacagtcctagctccctgttcgaatccctaatctcccccataaaaactgagacctttttcaaagagttttgggagcagaaacctctgctaatccagagagatgaccctgctctggctacatactacggcagtctctttaagctgacagatcttaaaagtctttgcagtcggggaatgtactacggcagagacgtgaacgtgtgtcgttgcgtaaatgggaaaaagaaagttttgaacaaggacggaaaggcacattttctgcagcttcgcaaagatttcgaccaaaagagggccacaatccagtttcatcagccccagaggttcaaggatgagctctggcggatacaggaaaaactggaatgctattttggctcgcttgtgggctccaacgtctatataacccccgcaggttctcagggcctacctccgcattacgacgacgtcgaagtgtttattctgcaactggagggtgaaaagcactggagattatatcacccgaccgtgcctctggctagagaatacagcgtcgaggcagaagaacgcataggacgacctgtgcacgaattcatgctcaagcccggggacctgctctatttccccaggggcaccatacaccaggcggacacacccgctggcctcgcccactccacccatgttacgatctcaacttaccagaataacagctggggagacttccttctcgacacaatcagcggactcgtgttcgacaccgctaaagaggacgtggaactcaggactggcatcccccggcaacttctcttggtcgagtctactaccgttgcgacacggcgtctcagcggatttctgaggacactggccgacagactagaaggcactaaagagttgctctcaagcgatatgaagaaggacttcattatgcaccggctacccccctattctgccggcgacggcgccgagctcagcacccctggaggtaaacttccccgcctggacagcgtggtccggctccagttcaaggaccacatcgtgctcacagtcctgcccgatcaagatcagagcgatgaggctcaggaaaaaatggtctacatataccatagtctgaaaaactcacgagagactcacatgatgggaaatgaagaggagacagaattccacggacttcggttccctctgagtcacctagacgccctgaagcaaatttggaactctcccgccatatcagtgaaggatttgaaacttacgaccgacgaggagaaggaatccctggtactcagcttgtggacggagtgcctaattcaggtggtgtag

SEQ ID NO: 125052 - DNA, 1398 bp, synthetic construct
  misc_feature 1..1398: note = Description of Artificial Sequence: Synthetic coding sequence
  source 1..1398: mol_type = other DNA
atgcccaaaaaagcgaagcctaccggctcaggcaaagaggaaggtccagctccttgcaagcagatgaaacttgaggctgcaggaggcccatctgctctcaatttcgactccccaagcagccttttcgagtcactcatctcccctataaaaacagaaaccttctttaaggagttctgggaacagaaaccactcttgatccagagggacgatccggcactcgctacttactatgggtctcttttcaaacttaccgatctgaaaagcctgtgtagccgtggcatgtactatgggcgcgatgtcaatgtgtgtcggtgcgttaacgggaaaaaaaaggtgctgaataaagatggcaaggcccacttcctccagctcaggaaggattttgaccagaagagagctactatccaattccaccagcctcaaagatttaaggatgaattgtggcgcatccaagagaaactggaatgctactttgggtctcttgtcggcagtaacgtttacattaccccagcgggatctcagggcctccctccccattacgacgatgtggaagtgtttatcctgcagctggagggtgaaaagcactggagactctaccatccgacggttcctctagctagagaatattctgtagaggccgaagaacggattggtcgacccgtacatgaattcatgttgaaacctggggaccttctgtactttccccggggaaccattcaccaggctgatacgcccgccgggttggctcactccacacacgtcacgatttctacatatcagaataacagctggggagacttcctcctagacacaatctcaggcctcgtctttgatacagccaaagaggacgttgagctgagaacggggatacctcgccagttactgctgcaggtggagtctaccacagttgcaactaggcgcctatcaggattcctgaggacattagccgacaggctggagggaactaaggaactcttatcatctgacatgaagaaggactttatcatgcatcgcctgccaccttattctgccggagatggtgctgagctctctacacctggtggtaaattgcctagactcgatagcgtggtgagacttcaattcaaagaccacatcgtgctgaccgtgctgcccgaccaggatcaatccgacgaggcccaggagaagatggtttatatctatcacagcctgaaaaatagccgagagacgcacatgatgggaaatgaggaggaaacggagtttcatgggttgcgtttccccctttctcaccttgacgcccttaagcagatttggaactctcccgccatcagtgtgaaggaccttaaactgacgacagatgaagagaaggaatcactggtcttgtcactatggacagaatgcctgattcaggtggtgtag

SEQ ID NO: 125053 - DNA, 636 bp, synthetic construct
  misc_feature 1..636: note = Description of Artificial Sequence: Synthetic coding sequence
  source 1..636: mol_type = other DNA
atgctgctgcaggtaccgtgcaacagctggggagactttcttctggacactatcagtggactggtgttcgataccgctaaagaggacgtggaactgcgtacgggcatcccccgccaactgctgctacaggtagagagtacaacagtagccacccgccgattgtccggctttttgaggactttagccgatcgcctagaaggcactaaggagctcctcagctcggatatgaaaaaagacttcatcatgcatagactccccccttatagcgctggggacggagctgagttgagcacccccggcggtaaactgcccagactggactccgtcgtcaggcttcagtttaaagatcacattgtgctcaccgttttacctgatcaggaccaaagtgatgaggcccaagagaagatggtctacatctatcactcactcaagaacagccgcgaaacccacatgatgggaaatgaggaggaaacagagtttcatggccttaggtttcccctgagtcaccttgatgcattaaaacagatctggaacagccctgccatttcggtgaaggatctgaagctcaccaccgacgaggagaaagagtctctggtgctgtcactgtggaccgagtgccttatccaagtggtctag

SEQ ID NO: 125054 - DNA, 339 bp, synthetic construct
  misc_feature 1..339: note = Description of Artificial Sequence: Synthetic coding sequence
  source 1..339: mol_type = other DNA
atgcctaagaaggccaaacctactggaagtggcaaggaggagggcccggcaccctgtaagcaaatgaaactggaggcagccggcgggccctccgctttgaacttcgactcccccagcagtctgttcgaatcgctcatcagccccatcaagaccgagaccttctttaaggagttttgggagcagaagccactgttgatccaacgcgatgaccccgctctagctacttattacggatctctgttcaagctgacggacttgaagtccctctgtagccggggcatgtattacggcagagacgtgaacgtctgcaggtgtgtaaacgggaagaagaaagtgtag

SEQ ID NO: 125055 - DNA, 459 bp, synthetic construct
  misc_feature 1..459: note = Description of Artificial Sequence: Synthetic coding sequence
  source 1..459: mol_type = other DNA
atggggccgccctcactgcactctcctaccccctccctggggcccctgggggcgctggtcctgtctagtcagcatacttccccggatagctgcaaatcaccatggacactgaaggccgtccgggctgctagacaggccgcggattttactctcaaagtggaagtggaatgctctagcttacaggaagcggtgcaggcagccgaggcgggggctgacctggtgctgttggacaactttaagccagaagagttgcatccaacggccaccgtgctgaaggctcaatttccctccgtggctgtcgaggcctccggaggaataacgttagataatctcccacagttttgcggccctcatatagatgtgatctcaatgggcatgttaacacaggcagcgccagctctggatttttctctaaaacttttcgcgaaggaggtggcccctgtgcccaaaatccactag

SEQ ID NO: 125056 - DNA, 1434 bp, synthetic construct
  misc_feature 1..1434: note = Description of Artificial Sequence: Synthetic coding sequence
  source 1..1434: mol_type = other DNA
atgttcccagtgttcccctgcacattgctcgcccctccctttcctgtgctcggcttggactcccggggtgtcgggggcctcatgaattcgtttccaccacctcagggacatgcccagaacccactgcaggtgggtgcagaactacagtcccggttcttcgcgagccagggttgtgctcagagccccttccaggcagcacctgcccctccccctacccctcaggccccagccgcagagccgctgcaagttgacctccttcccgtcctcgccgctgcccaggaaagcgcggccgccgcagccgcggctgctgcagccgccgccgcggtcgcggccgcaccaccggctcccgctgcagcctccaccgtcgacactgccgcactaaagcagccaccagcccccccacccccccctcctcctgtctctgcccccgcagccgaagcagctccaccagccagcgcagccacaatagccgccgctgccgccacagccgttgtcgcgccaacatcaacagtcgcagtggcccccgtggccagtgcactcgagaagaagaccaaaagtaagggaccatatatctgtgcgctgtgcgccaaggagtttaagaacggctataacctaagacgtcacgaagccattcacaccggagctaaagccggacgagtgcctagcggtgccatgaagatgcctacaatggtgccactcagtctcctgtccgtcccacagctgagcggagccggagggggggggggagaagccggagccgggggcggcgccgccgctgtggccgctggcggggtggtgaccaccaccgctagcgggaagcgtatacggaaaaatcacgcatgtgaaatgtgtggaaaagcatttcgtgatgtttatcacctgaaccggcacaagctctcgcactccgatgagaagccctatcaatgcccagtgtgccagcaacgattcaaaaggaaggatcgcatgtcataccatgtgcgtagccacgacggtgcagtccacaaaccgtacaactgttcccactgcgggaagtcgttcagtcggcctgaccacctcaacagtcacgtaaggcaggtccatagtacagagagacccttcaagtgcgagaaatgtgaagccgcatttgctaccaaagacaggctgcgcgcccacactgtcagacatgaagagaaagtcccctgccacgtgtgcggcaagatgctgtcttccgcgtatattagtgaccatatgaaggttcactctcaggggcctcatcacgtgtgcgagctctgtaacaagggcaccggcgaggtctgccccatggcagccgcagccgctgcagcggccgccgccgctgcagccgccgttgctgccccaccaactgctgtaggctccctgagcggggcggaaggggtaccagtgagctcccagcccttaccatctcagccctggtag

SEQ ID NO: 125057 - DNA, 759 bp, synthetic construct
  misc_feature 1..759: note = Description of Artificial Sequence: Synthetic coding sequence
  source 1..759: mol_type = other DNA
atgaaaatgccaactatggtccccctctcactactatctgtgccccagctgtctggcgccggcggcggcgggggtgaagcaggggctggaggcggagcagccgccgtggctgctggaggtgtcgtcacaaccaccgcatccggcaagaggatccggaagaatcacgcttgtgagatgtgcggcaaggcctttcgagatgtgtaccatctcaataggcacaagttgagccatagtgatgagaagccataccagtgcccagtgtgtcagcagaggtttaaacgtaaagaccgaatgtcctaccacgtccgaagccatagaaggtgtgccaagccttataattgtagccattgtggaaaaagctttagccgccctgaccacctaaactcccatgtccgccaggtgcattctactgagaggcccttcaaatgtgagaagtgtgaagcggcattcgcgaccaaggatagattgcgagcccacaccgttaggcatgaggagaaggtgccctgccatgtctgcggcaagatgctgtcctcggcctacatctctgatcatatgaaggtgcacagccagggtccccatcacgtgtgtgaactctgcaacaaaggtaccggcgaagtgtgcccgatggccgcggcggccgcagccgcagctgcagctgcagcagctgcagtggccgcaccaccaaccgccgtgggtagtctcagcggtgctgagggagtaccagtgagttctcagccgctacctagccagccatggtag

SEQ ID NO: 125058 - DNA, 1365 bp, synthetic construct
  misc_feature 1..1365: note = Description of Artificial Sequence: Synthetic coding sequence
  source 1..1365: mol_type = other DNA
atggaccctagcaattggagttcttttatttttcagggacatgcccagaacccactccaggtcggcgccgagctgcagtccaggttttttgcttcccagggctgcgcacaatcccccttccaggctgcccccgccccccctcccactccccaggctcccgcagccgaacccctccaagttgatctcttgccagtactggctgccgctcaagaaagtgccgctgccgctgccgctgcagctgccgcagctgccgcggttgccgcggctcctcctgccccagcggcagctagtaccgtcgacaccgccgccctcaaacaaccacccgcacctcccccacctcccccccctgtgtcagcaccagccgccgaggcagccccacccgcatccgcggcaacaatcgctgccgccgccgctacagctgttgtcgcacccacctcaacagtggccgtcgcccctgtcgccagcgcgctggaaaagaagacgaaaagtaagggtccgtacatctgcgcactgtgtgctaaggaatttaagaatggatataatctgcggcgccacgaagcaatacataccggcgctaaagctggccgcgtgccgtcaggggctatgaagatgcctaccatggtgcctctctctcttttatctgtgcctcaactgagtggcgccggggggggtgggggagaggctggagcgggcgggggggcagccgcagtggccgcgggaggagttgtgaccactactgccagtgggaagcggattaggaagaatcatgcgtgtgagatgtgcgggaaagcatttagagacgtgtatcatctgaaccggcacaagttatctcactccgacgaaaaaccctatcagtgtcccgtttgtcagcagagattcaagaggaaggacagaatgtcataccacgtccggtcccatgacggggcggtccacaaaccttataattgctctcactgcggcaagtctttcagtagacctgaccatctgaactcccatgtgcggcaggtgcacagcactgaacggcctttcaaatgcgagaagtgcgaggccgctttcgctaccaaggaccgacttcgcgcccacaccgtgcgacacgaagagaaagttccttgccatgtatgtggaaaaatgcttagcagcgcatacatttccgatcatatgaaggttcattctcagggaccgcatcacgtttgcgaactgtgcaataagggcaccggggaagtctgtccaatggctgccgccgccgctgccgccgccgctgcagcagccgctgctgtcgctgctccccccacagcagtgggctccctctccggtgctgaaggcgtccctgtaagctctcagcctctgccatctcagccatggtag

SEQ ID NO: 125059 - DNA, 2955 bp, synthetic construct
  misc_feature 1..2955: note = Description of Artificial Sequence: Synthetic coding sequence
  source 1..2955: mol_type = other DNA
atgagagctcctgctagaggaacagggtgctgcggccggagcggcggacggtggctggcaggagccgcgcagccgcgatgcttatgggcaggaggcgccggacaaaggttcatggtgcctggtgggaccatgaagagtcttaagaaagacagtagattgcgaatcacccctactaggcttctggaggcaagtgagaacgtcaaggaaaagaagcgcgccaaaggtccagaacagcctacccccactatccaggaagagccagagccagtgtctaacgtgttgcagggtgatgacattctggccctggccatcaagaaggaagatctgaaagagcagcatattccacgattgaccgaaaaggaagataagagggtgattactcagaagttcatcatccgcaagctcaaacctatggaccccaggagaaaagtgtgccatttagtggcacggcccgccaacccagacgaggcaactaaaccactcgattactccggccccggagactcttttgacggatcagatcagatactgccacaccacatattgggcagcctgcaggacttcaaacggattgccctcgcccggggcaatactcagctggccgaacgtatcccaacatctccatgccttatgacactgatctcagccgaaggggaatcaaaacaaaaggcccccaaggaggagaagcggccgccctgggcgcctccaccgcagcacaactttttgaagaattggcagaggaataccgcgctccggaagaagcagcaggaggccctgtcagagcacttgaagaagcctgtttctgaacttttgatgcacacaggagaaacctataggcgcattcaggaggaacgcgaattgattgactgcactctccctacgaggagggataggaaaagttgggaaaattccggtttctggtcacgtttggaatacctgggcgacgaaatgaccggcctggtcatgactaagaccaagactcagcggggcctcatggagcctatcacccacattcgaaagccgcatagcatccgtgtcgagaccggattgcccgcccagcgggacgcctcgtaccggtacacctgggacaggagcctgttccttatttataggaggaaggagctccaaaggattatggaggagctcgatttttctcaacaggatattgacggtctcgaggtggttggtaagggctggccattcagcgcagtaacagttgaagactacactgtgttcgagcgcagtcagggctcatcaagtgaagacaccgcctacctagggactcttgcttctagctccgacgtttccatgcccattctagggccctcactactgttctgcgggaagcctgcatgctggataagaggatcgaatcctcaggataagcgacaggtcggtattgccgcccacctgacttttgagaccttagaaggagagaaaacatccagcgaactcacagtagtgaacaacgggaccgtcgccatctggtatgattggcgccggcagcatcagccagatacattccaagatcttaagaaaaatagaatgcagcgcttctattttgacaaccgcgagggagttatactgcccggggagatcaagacttttactttctttttcaaatctttaaccgccggagtttttagggaattctgggagttcagaactcatccgactctactgggcggcgccatattgcaggtgaacctccacgccgttagcctgacccaggacgtgttcgaagatgaaagaaaggtgctagagtctaagttgaccgcccacgaggctgtgactgttgtaagagaagtcctgcaggagctgctgatgggtgtcctgaccccagagcggacaccttcaccagtggacgcctacctgactgaagaagacctgttccgccacaggaatccccctctgcattatgagcaccaggtggtccagagtctgcatcaactttggaggcaatacatgacattgcccgctaaagctgaggaggcccggccaggggacaaggagcatgtgtctccaattgcgacggagaaagctagcgtgaatgcagagttgctcccgcgcttcagatcccccatttcggaaacgcaagttcctcggcccgagaatgaggcacttcgggagagcgggtcacaaaaggcaagagtggggacaaagtccccacagcggaaatcaattatggaagagatcttggtcgaggaatctccagatgtggatagtacaaagagcccatgggagcctgatggactccccttgctggaatggaacctgtgtcttgaggactttagaaaagcggtgatggtgctgccagatgagaatcaccgagaggacgccctgatgaggctgaacaaagcagccttagagttgtgccagaagccccgacccctacagtccaacctgctgcatcagatgtgcttacaactgtggagggacgtcatcgactctctcgtcggccacagcatgtggctccgctcggtcctaggactgcccgaaaaagaaacgatatatttgaacgttccagaagaacaggaccagaaatctccccccatcatggaagtgaaggtaccggtgggcaaggctgggaaagaagaaaggaaaggcgctgctcaggagaaaaagcagttaggaatcaaagataaggaggataaaaagggtgctaagctgctggggaaggaggaccgccccaactctaagaaacacaaggctaaggatgacaagaaagttataaagtctgccagccaggacagattctctttggaggaccctactcccgatatcatcctcagcagccaagaaccaattgacccgctagtgatggggaaatatactcaatccctgcactcggaagttaggggactgctcgacactctggttactgacctcatggtgcttgccgacgagttgtccccgatcaaaaacgttgaggaagccctcaggctgtgcagatag

SEQ ID NO: 125060 - DNA, 2829 bp, synthetic construct
  misc_feature 1..2829: note = Description of Artificial Sequence: Synthetic coding sequence
  source 1..2829: mol_type = other DNA
atggttcctggcgggaccatgaaaagcttaaagaaggatagccgcctgcgcattacacctaccagactgctggaagcctcagagaacgtgaaggagaagaagagagccaaaggcccagaacagcctacacccactatacaggaggagcccgaaccagttagtaacgtgcttcaaggggatgatattctggccctggctataaagaaggaagatctgaaggagcagcatatcccacggttaactgaaaaggaggacaagagggtgatcacccagaagttcatcattcgaaagctcaagccaatggaccctcgccgcaaagtctgtcacctggtggcccgccctgccaaccctgatgaagccactaagccactcgactattccggccctggagattcatttgatggctccgaccagatccttccacaccacatcctggggtcactccaagattttaagcgtatagcgctggctaggggcaatacacagcttgcagagcgcatcccaacatctccgtgtctgatgacccttatctctgccgagggggagtcaaaacagaaggcccctaaggaggaaaagcggcctccatgggcgcctcctcctcagcacaacttcctaaaaaattggcagcgcaataccgctctgaggaagaaacaacaagaggccctgtccgagcatctaaaaaagccagttagcgagctactcatgcatacgggggaaacttaccgcaggattcaagaagagagggaactgatcgactgtaccctgcctaccaggcgagatagaaagtcatgggagaattctgggttctggagtagactggaatacctgggcgacgagatgactggactggtgatgaccaagacaaagactcaacgaggtctgatggagccgattacccacattagaaagccgcactcaattagggtcgagaccgggctgcctgctcagagagacgcgtcatacaggtacacatgggaccggtcgctgtttctgatctatagaagaaaggagctccagcggataatggaggaactagacttttcccaacaggatatcgacggccttgaggtggtgggtaaaggctggcctttttctgcggtcaccgttgaagattacaccgtgttcgaaagatcccaaggctcctccagcgaagatacagcttacctcgggacactggccagttcatctgacgtctctatgcccatccttggacccagcctgctgttttgcggaaagcccgcctgctggatcagaggaagtaaccctcaggacaagcgtcaagttggcattgcggctcacctgactttcgaaaccctcgagggggagaaaacaagctcggagctcactgtggtgaataatgggacggtggctatttggtacgactggcgcaggcagcaccagcctgatacttttcaagatctgaaaaaaaatcgcatgcaaagattctatttcgataatcgagagggagttatactcccaggcgaaatcaagacatttacattcttctttaaaagtctgaccgccggtgtgtttagggaattctgggaatttaggacccaccctactttgttaggcggggcgatccttcaagtaaatctacacgctgtctcattgacacaagacgtcttcgaagatgagcgaaaagtgctggagtccaaactgactgcccacgaggccgtgacagtggtcagggaggtgctgcaggaactgctgatgggcgtgctgaccccagagaggaccccttcaccagtggacgcttatctgactgaggaggatctctttcgccataggaaccccccactacattacgagcaccaagtggttcagagtctgcatcaactgtggagacagtacatgaccctcccggcgaaagccgaggaagcccgaccaggggacaaggagcatgtgtcaccaatcgctacagaaaaggcctctgtcaacgctgaacttcttcccagatttaggtctcccatctctgaaacacaagtgccccgacctgaaaacgaagcgctcagagaaagcggctctcagaaggctagggtcggaactaaatcaccccagaggaaaagcatcatggaagagattctcgtagaggagagtcccgatgttgactctaccaagagcccctgggaacctgacggactgccactgttggaatggaatctgtgcctggaggacttcaggaaagccgttatggtcctgcccgacgaaaatcatcgcgaggatgctttgatgcggctcaacaaggccgctcttgaactttgtcagaaaccacgcccactgcagtcaaatctgctgcaccagatgtgtctgcagttatggcgggacgtcattgactctctagttggccatagcatgtggctgcgttccgtgcttggtctccccgagaaagaaactatctacttaaacgtcccagaggagcaggaccagaagagtcctcccatcatggaggtgaaggtccccgtcgggaaggctggcaaggaggagcgtaagggagctgcccaggagaagaagcagctcggaattaaagataaggaagacaaaaaaggagcgaagctgctagggaaggaagacagaccaaactcaaagaagcacaaagccaaagatgacaagaaagtgataaaaagcgcttcgcaagaccggttctcccttgaagaccctacccctgacatcattctatcttcgcaggagcccatcgaccctttagtgatgggtaagtatactcagtccctgcatagtgaggtgcacccaggcagatgtgttccctgggaaaacaccatgcagggcgcctttccatccaccacccggtgtggcggttcctgcctgtag

SEQ ID NO: 125061 - DNA, 1992 bp, synthetic construct
  misc_feature 1..1992: note = Description of Artificial Sequence: Synthetic coding sequence
  source 1..1992: mol_type = other DNA
aggtctaggggggctgaggccacggagagcaaactgagtggcggtttccgctggacgcagaaaacctcacctactcaaggcgattctgctatcacgcatagcttgtacagaatgatctttctgacagcgctcccactattctggatcatgatcagtgccagcagaggagggcattggggagcctggatgccctcttcgatctccgcgtttgaaggtacatgtgtgagtattccatgccgcttcgatttccctgatgaacttagaccggctgtggtgcatggggtatggtatttcaactcgccatacccaaaaaattacccacccgtggtctttaagagccgcactcaggtggtgcatgaaagttttcaaggcaggtccaggttgctgggcgacttaggattgcgcaattgtaccctccttctttccaacgtctctcccgagcttggaggcaaatactactttcggggagatcttgggggatataatcagtacactttttccgaacactctgtcttagacatcgtgaatactccaaacatcgtggttcctcccgaggtggtggcgggcaccgaagtcgaagtgagctgcatggttccagacaactgccccgagctgagacccgagctatcatggcttggtcacgaaggcctgggggaacctgccgtcctgggtagacttagggaggacgaaggaacctgggtgcaagtgtccctgctgcattttgtgcctactcgagaggccaacggccaccgtcttggctgtcaggcttcttttccaaataccactctgcagttcgaagggtatgcaagcatggacgtgaagtacccccctgtgatcgtggagatgaatagtagcgtcgaggcaattgagggatcccacgtgagtctcttgtgcggcgcagacagcaatccacccccactcctgacgtggatgcgagacggcacagtattgcgcgaagctgttgctgaaagcctcctgctggaacttgaggaggtgaccccagctgaagacggtgtttacgcatgtttggctgagaatgcctatggccaggataaccgtactgtcggtcttagtgttatgtacgcaccttggaagccaaccgttaatggtacaatggtcgccgttgaaggagaaactgtgtctatcctgtgtagcacccagtctaatccagacccaattctgaccatcttcaaggaaaagcagatcctgtctaccgttatttacgaatctgaacttcagctggaactgccggcagtttcccctgaggatgatggagaatattggtgtgtcgccgaaaaccaatacggccaaagggcaactgctttcaaccttagtgtcgaattcgcgccagtgctgctcctggagtctcactgtgctgcagcccgcgatacagtccaatgcttatgtgtcgtaaagtccaatcccgagccctcagttgcgtttgagttgcctagtagaaacgtcaccgtcaatgagagcgagcgagagtttgtgtactccgagcggtcaggtctcgtgctgactagcattctgaccctgagaggacaggcccaggcacctccgagagtcatttgtactgctcgcaatctctacggggcaaagagtctggagctgccattccagggagcacaccgccttatgtgggccaagatcggacctgtgggggccgtggttgctttcgctattcttatcgccatagtgtgttacattacccagacccgaagaaaaaagaacgtgacagaatcccctagtttttctgccggagacaacccacctgttctgttttccagcgacttccgaatatccggagcccctgagaagtatgagagcgagaggagattgggtagcgagcgtcggttgctaggattaagaggagaaccgccagaattggatctcagctacagtcacagtgatttagggaagaggcccacaaaggactcatacacccttacagaagaactggccgaatacgccgagataagagtaaagtag

SEQ ID NO: 125062 - DNA, 1749 bp, synthetic construct
  misc_feature 1..1749: note = Description of Artificial Sequence: Synthetic coding sequence
  source 1..1749: mol_type = other DNA
atgatctttctcacagcattgccgctgttctggataatgattagcgcaagtaggggaggccactggggcgcttggatgccatcttccatcagcgccttcgaaggtacgtgtgtgagcatcccttgtcgcttcgactttcccgacgagctgcggcctgccgtggtccacggggtttggtacttcaactctccataccctaagaattatcccccggtggtgtttaagtcacgcacgcaagtggtgcatgagtctttccaggggagatctagactcctgggggatctcgggcttagaaattgcacactgctgctgtcaaatgtgtctcctgagctcggaggcaaatactattttcgaggggacttgggtggatataaccagtacactttctccgagcactcagtacttgatattgtgaatacacctaatatcgtggtgcctccagaggtggtggccgggacggaagttgaggtctcctgtatggtgccagacaactgtcccgagctgagacccgaactttcttggctgggccatgagggactgggggaacccgccgtactgggcaggcttagggaggatgagggcacatgggttcaggtcagtttgctccacttcgtacctacccgcgaggctaacggtcaccgccttgggtgccaggcttcttttccaaatactacgctacaattcgaaggttacgcctctatggacgtcaagtacccacctgtcatagttgaaatgaactccagcgtcgaagccattgagggctcccatgtttccttgctctgtggagcggattctaacccccctcccctgctgacttggatgagggacggcaccgtgctgcgcgaggcagtagcagagagcctccttcttgagcttgaggaggtgacgccagcagaggatggcgtgtacgcgtgtcttgctgagaatgcctatggccaggataataggaccgtgggactgagcgtcatgtatgcgccatggaaacccacagttaacggaacaatggtggcagttgaaggggaaactgtgtctattctctgtagtacccagtccaatccggatcccatcctgactatctttaaggagaaacagattctaagtacggtcatttacgaaagcgagcttcagctcgagttaccagccgtcagtcctgaggatgacggagagtactggtgcgttgccgaaaaccagtatggacagcgtgcaaccgcctttaatttaagcgtggagtttgcccccgtcctgctgctagagtctcactgcgcagccgcccgggatacagtccagtgcctttgtgtagtgaagtccaaccccgagccaagcgtggccttcgagttaccctctaggaacgttaccgtaaacgagagtgaaagagaattcgtgtatagtgagaggtcaggtctcgtgctgacttctattctgaccctgagaggccaggcacaagctccccctcgcgtaatctgtaccgcccggaacttgtatggcgcaaaatctttggaactcccattccagggtgcccacaggttaatgtgggccaagataggccccgtgggagcagtggtggccttcgctatactcattgcaatcgtttgctacattactcagacaagacgaaaaaagaatgttacagagagcccttcattcagtgctggcgacaacccaccagtgctgttcagctccgattttcgcatcagcggcgcccctgaaaaatacgagtctaaggaagtaagtacacttgagagtcactag

SEQ ID NO: 125063 - DNA, 1881 bp, synthetic construct
  misc_feature 1..1881: note = Description of Artificial Sequence: Synthetic coding sequence
  source 1..1881: mol_type = other DNA
atgatctttttgaccgccctgcccctcttctggatcatgatttccgccagtcgaggcggccactggggagcttggatgccaagctctattagcgctttcgaagggacctgcgtgtccatcccttgtaggtttgacttccctgacgaactcagaccggctgtggtgcacggagtctggtacttcaattctccataccctaaaaattacccacctgtagtgttcaaaagtcgaactcaggtcgtgcatgagtcattccagggccgttcgcgcttactgggggatctaggcctgcggaactgtacactgctgctttccaacgtctccccagagctggggggtaaatactatttccggggagatctgggtggttacaaccaatacactttctccgaacatagcgtgctggacattgtgaataccccgaacatagtggtgccacctgaggtagtggccggaactgaagtcgaggtctcttgtatggtgccagataattgtcctgagctgcgccccgagctgtcctggctgggtcatgaagggttgggagagcctgccgtgctgggtcgcctgagggaagatgaaggaacctgggtgcaggtgtctttactgcacttcgttccgactagagaagctaatggccatcgcctaggctgccaggcaagctttccaaatactacactacagttcgaaggttatgcttcaatggacgtgaagtaccccccagttatcgtcgagatgaacagttctgtcgaggccatcgaaggaagtcatgttagtctgctgtgtggcgctgatagcaatccacctcctctccttacgtggatgagggacgggacagtgttgcgggaagctgtggctgagagtcttctgctggaattagaggaagttacaccagccgaagacggggtgtatgcatgtcttgcagaaaatgcttatggccaggataacaggacagtgggcttaagcgtcatgtatgcaccttggaagccgaccgtgaatggcactatggtggcggtagaaggcgaaacggtatccatattgtgcagtacccaaagtaaccctgacccaattttaactatctttaaggaaaagcagatcctaagtacggtaatttacgagagtgagctgcaacttgagttgcccgcggtatcccccgaagacgatggagaatactggtgcgtcgccgagaatcagtacggacagagggctactgcgttcaacctgtctgtggagtttgcccccgtgctcttgctggagtcccactgcgctgccgcccgtgacacagtgcagtgcctttgcgtggtcaagtcaaatccggagccctctgtggcatttgagttgccttctcggaatgtcaccgtgaacgagagcgaaagagagtttgtctattcagaaaggtcaggcctggtactcacttctatcttgacccttaggggtcaggcccaggcaccgcccagagttatttgcacagcgcgaaatctatacggggcgaaaagccttgaattacccttccagggtgcccaccgcctgatgtgggctaaaataggacctgtcggggcagtcgtggcttttgccatattgatagccatcgtttgctatattacccagaccaggcgaaaaaagaatgtaactgaaagtccttctttttcagctggagacaacccccctgttcttttctccagtgacttccgcatttccggagccccagaaaaatacgagtccgagagacgattaggaagcgagagacgcttgctgggcctgcggggagagcccccagaactggacctgtcctatagccattctgacctcggcaagcgacccaccaaggactcatataccttaacagaggaacttgccgaatatgccgaaataagggtcaagtag

SEQ ID NO: 125064 - DNA, 1806 bp, synthetic construct
  misc_feature 1..1806: note = Description of Artificial Sequence: Synthetic coding sequence
  source 1..1806: mol_type = other DNA
atgccctccagcatctctgcttttgagggtacatgcgtatccattccatgtaggtttgactttccggatgagctgcgcccagcagtggtgcacggagtgtggtactttaattccccctatccgaagaactatccccccgtcgttttcaagagcagaacacaggttgtccatgaaagcttccagggcagaagccgcttgttaggtgacttggggttgcggaattgtaccctgctgctgtcaaatgtgtctccagagctggggggcaaatactactttaggggagatcttggagggtacaaccaatacacattctcagagcatagcgtgctggatatcgtcaacaccccaaatatagtcgtgccccctgaggtggtggctgggaccgaggtcgaagtgagttgtatggtcccagacaactgccccgaattgagacctgaactcagctggttagggcacgagggcctgggagagcctgcagtcctgggccggctgagggaggacgaaggtacctgggttcaagtgtctttacttcatttcgtgccaactagggaagctaacggacatagactggggtgccaggcttcatttcccaacacaaccttacagttcgaagggtacgcctctatggacgttaagtacccacccgtgatcgtagaaatgaatagcagcgtcgaggccatagagggttctcatgtctctctgttgtgcggcgcggatagcaaccccccacctctgctgacctggatgcgggacggcactgtcctgcgggaagccgtagccgagtcccttctgctggagctcgaggaagttacccccgctgaagacggcgtatacgcctgcttggctgagaacgcctacggtcaggataatcgtacggtaggcctgtccgtgatgtacgccccttggaaacccactgtgaacggcaccatggttgcagtagaaggcgaaaccgtgtcaattttatgtagcacgcagtctaaccctgacccaatactgacaatttttaaagagaaacagatcttaagcaccgtcatctacgaaagcgaacttcagttggaactcccggcagtgtcgccggaagatgacggagaatactggtgcgttgctgagaatcagtatggacagcgcgccacggcctttaatctcagcgttgagttcgcccctgttttgttgctggagtctcattgcgcggctgcccgggataccgtacagtgcctttgcgttgtcaagagtaatcccgagccctcggtggccttcgagttgccaagtcgcaacgttaccgtaaacgaatccgagcgcgagttcgtttattctgaaaggtctgggctggtgttgacgagcattttgactctgagaggtcaggctcaggctccaccccgtgtcatttgcacagctaggaatctatacggagcaaaatctctggaacttccttttcagggcgcacacagacttatgtgggctaaaattggaccagtaggcgccgtggtggcttttgcaattctaatcgctattgtctgctacatcacccaaacacggcggaaaaagaatgtgactgaaagtcccagctttagtgcaggcgacaatcctccagttcttttcagctctgactttcgaatctccggtgctccggagaaatacgagtctgagagaaggctcggatccgaacgcaggttgctcgggctgagaggcgagccacctgagctggatctgtcttactcccacagtgatctcggaaaaagacctacgaaggatagttatacactgaccgaggaattggccgaatacgcagaaattcgcgtgaagtag

SEQ ID NO: 125065 - DNA, 915 bp, synthetic construct
  misc_feature 1..915: note = Description of Artificial Sequence: Synthetic coding sequence
  source 1..915: mol_type = other DNA
atgggtaaccatgccgggaaaagggaactaaacgcagagaaagccagcacaaacagtgagaccaatagaggtgaatctgaaaagaagagaaacctgggagaactatcccgcactacaagcgaggacaatgaggtattcggggaagctgatgctaatcaaaataacgggacatcctcccaagatacagctgtcacggactccaaacggacggctgaccccaagaatgcttggcaagacgcccaccccgccgaccccggatcacggccacacctgatccggctgtttagcagggatgcacctgggcgtgaggacaacacatttaaagacagaccatctgaatctgacgaactacagacaatccaagaggatagtgcagccactagtgagagtttagatgttatggcctcacaaaagcgcccctcccaaagacatgggagcaaatacctagccacagctagcactatggatcatgctcggcacggatttcttccaagacatagggacacaggcatcctggacagcatcggccgcttcttcgggggagacaggggagccccaaagcgtggatccgggaaagattcccatcaccctgcaaggactgctcattacggctctctgcctcagaagtctcacggaagaacccaggatgagaaccctgtggtgcatttcttcaaaaatatcgtcaccccgcgaaccccacccccgagtcaggggaaggggcgtggcctgtccctgtccaggttttcctggggcgccgaggggcagcgcccaggattcggatacggtgggcgcgcctccgactacaagtccgcccacaaaggattcaaaggcgtcgatgcgcagggcacactcagtaaaatttttaagctgggcggacgggattcacgttccgggtcacctatggcccgcagatag

SEQ ID NO: 125066 - DNA, 561 bp, synthetic construct
  misc_feature 1..561: note = Description of Artificial Sequence: Synthetic coding sequence
  source 1..561: mol_type = other DNA
atggcttctcagaagcgtccctcacaaagacatgggtcgaagtacctcgcaacagcaagcaccatggaccatgctagacatggatttctgcccagacatcgcgacacaggtatcctggacagcattggtagatttttcggcggcgatcgtggtgcccccaaacgagggtccgggaaggtcccgtggctcaaaccaggcaggtcgcccttacccagccacgcccggtcccagcccggtctgtgtaatatgtataaagattcacatcacccagcaaggactgcgcactacggttctctgcctcagaaaagccacggccggacccaggacgaaaatccagtggtccatttcttcaaaaatatcgtaaccccgagaactcctcctcccagccaaggcaaaggagctgagggtcagcgccctggtttcggctatggggggcgggcctccgattataaatccgcacacaagggctttaaaggagtggacgcccaaggtaccctgagcaagatctttaaactgggcggtcgtgactcccgaagcgggagccccatggccaggagatag

SEQ ID NO: 125067 - DNA, 594 bp, synthetic construct
  misc_feature 1..594: note = Description of Artificial Sequence: Synthetic coding sequence
  source 1..594: mol_type = other DNA
atggcctcacagaaaagacccagccaacgacatggtagtaaatatctggcaacggctagcactatggatcacgctcgccatgggttcctgcctcgccatcgcgataccggaatccttgatagtataggcagatttttcggtggggatcggggggctccgaagcgtgggagcggaaaggttccatggctgaagcctggtaggtctccactgccatcacatgcccggagtcaaccagggctctgcaacatgtataaggatagccatcaccctgcacgaacagctcattatggcagcctaccccagaaatcacacggtaggacgcaggacgagaaccccgtggtccatttcttcaagaacatcgtgactcctcgaacacctccaccctctcaagggaaaggtcgaggactgtccctgtcccgctttagctggggcgcggaagggcagcggcccggatttggatacggggggagagcaagcgactacaaatccgcccataaaggcttcaaaggcgtggacgctcaaggaacactttctaaaatattcaaactgggcggtagagactctagaagcggctcccccatggcgagacgctag

SEQ ID NO: 125068 - DNA, 594 bp, synthetic construct
  misc_feature 1..594: note = Description of Artificial Sequence: Synthetic coding sequence
  source 1..594: mol_type = other DNA
atggggaatcacgccggtaaacgcgaattgaatgcggagaaagcgtccacgaattccgagaccaatcgaggagagtctgaaaagaagcgaaatctgggcgaattatctaggactacctccgaagataacgaggtatttggagaagcagatgctaaccagaacaatggaacgagctcccaggacacagccgttacagactcaaaaagaaccgctgatcccaagaatgcctggcaagatgctcacccggccgaccccggtagccgacctcacctcatacggttgttctcacgtgacgcccctggcagggaagacaatactttcaaggaccgacccagtgagtccgatgagcttcagacaatccaagaggactccgccgccaccagtgaaagcctagacgtcatggcctctcagaaacgcccatctcagagacatggcagtaaatacctcgccacagcgtctaccatggatcatgccaggcacggcttcctgccaaggcaccgcgacacgggtatcctcgactcgatcggtcggttctttggaggtgaccggggagcccctaagcggggctcaggtaaagtgagctccgaggagtag

SEQ ID NO: 125069 - DNA, 594 bp, synthetic construct
  misc_feature 1..594: note = Description of Artificial Sequence: Synthetic coding sequence
  source 1..594: mol_type = other DNA
atgggcaatcatgcaggcaagagggagctgaacgccgaaaaagcatcaaccaacagcgagaccaacaggggggagtcagaaaaaaaacgcaatctgggggaattgagccgcaccaccagcgaagacaacgaggtatttggcgaagccgacgctaatcaaaacaacgggactagttcgcaagacacagccgtcactgactccaaacgcacggctgatccaaagaatgcttggcaggatgcacacccagctgatccggggtcaagaccccacttgattcggctgttctcccgagatgcaccgggacgggaggacaacacgtttaaagaccgcccatcggagtcagacgagctgcagacgatccaggaagacagcgcagcaacctccgagagcctggatgtcatggcaagccagaagcggccctctcagaggcatggatcaaaatatcttgcaacagcgtccaccatggatcacgccaggcacgggtttttacctaggcaccgcgacactggaattctcgattctatcggtaggttcttcggcggggatcgcggcgctccaaaacgcgggagtggcaaagttagcagtgaggagtag

SEQ ID NO: 125070 - DNA, 483 bp, synthetic construct
  misc_feature 1..483: note = Description of Artificial Sequence: Synthetic coding sequence
  source 1..483: mol_type = other DNA
atggcctcacagaagcgcccttctcagcgacacggatctaaatacctggccacagcctcaacaatggatcacgcaaggcatggcttcttgccccggcaccgggatactggcatcttagacagtataggtagatttttcggcggtgaccggggcgccccaaaaaggggcagcggcaaggattcacatcatcccgcgcgtacagctcattacgggagtctgccgcaaaaatctcatggtcgcacacaggacgagaatcccgtcgtgcacttttttaaaaatatcgtgactcctcggacgccacccccctcccagggcaaaggtgcggaggggcagagacctggttttgggtacggggggcgggcttccgactacaagtctgctcacaaggggttcaaaggggtagatgcccagggcactctgtctaagatcttcaagctgggggggcgggacagtagatccggtagccctatggctcgccgctag

SEQ ID NO: 125071 - DNA, 516 bp, synthetic construct
  misc_feature 1..516: note = Description of Artificial Sequence: Synthetic coding sequence
  source 1..516: mol_type = other DNA
atggcatctcagaagaggccttcccagaggcacggctcgaagtatctcgcgacagcctcaacgatggatcatgcccgccatggatttctccctagacaccgcgacacaggcattctcgattcaatcggtcgttttttcgggggtgatcggggcgctcccaagcgcggaagtggaaaggactcccaccacccggcgagaacggcccattacgggtcgttgccacagaaatcacatggtaggactcaggacgagaaccctgtcgtgcacttctttaagaatatagtgacaccccgcacaccccctccctcccagggaaagggaagaggtctctccctctcccgtttctcttggggcgctgagggtcagaggcctggatttggttatgggggccgggcttccgactacaagtctgcccataaaggctttaaaggcgtggatgcgcaaggaaccctgtcaaaaatcttcaagctgggaggtagggacagtcgtagcggatcgcccatggcccggaggtag

SEQ ID NO: 125072 - DNA, 261 bp, synthetic construct
  misc_feature 1..261: note = Description of Artificial Sequence: Synthetic coding sequence
  source 1..261: mol_type = other DNA
atggcctcccaaaagaggcccagccagcgacatggctctaagtacttggccactgcatctactatggaccacgcccgacacgggttcctgcccagacaccgagatactggaattcttgattccatcggccggttttttgggggagatcgtggcgccccaaagagagggagcgggaaggactcccatcatcccgcccgcaccgcgcactacgggtcactcccccagaaatctcacggtagaacccaggatgaaaatccatag

SEQ ID NO: 125073 - DNA, 888 bp, synthetic construct
  misc_feature 1..888: note = Description of Artificial Sequence: Synthetic coding sequence
  source 1..888: mol_type = other DNA
atggccagtctctcaagacccagcctccctagttgtctgtgctcattcctgctgctgttattgcttcaggtgtctagctcctacgccgggcagtttagggttatcgggcctcgccaccccatccgtgcactcgttggggacgaagtcgaactgccctgcaggatcagccccggcaaaaacgcaaccggtatggaagtgggctggtaccgaccaccattctccagggttgtgcacctgtacagaaacggcaaggaccaagatggggatcaggctccagagtatagagggaggacagaactgctcaaggatgcaattggcgagggcaaagttactctacggatcaggaacgtaagatttagcgacgaaggcgggttcacctgtttcttcagggatcattcttaccaggaggaagcagctatggaacttaaagtcgaggacccattttactgggtctctccaggcgttctggtgctactcgctgtcctccctgtcctgctccttcaaataacagtgggtctcgtgtttttgtgtctccagtatcgattacgcggcaaactgcgggcagagattgagaacctgcacaggactttcgatccacatttcctcagggtcccctgctggaagatcacgctgtttgtaattgtccctgtactcggacccctcgtcgcgttgattatttgctataattggttacacagacgattagcagggcagtttctggaagagctacgtaagtttagttcactgtgttataagcagcgcataaagagccaggaaagagagaccgaagccactcgcggcagaggcggactcttacgggatcacatccctcgcggtaaggaggagctcgagtctctcggaggcggcaaaacaccgcccgggcggtag

SEQ ID NO: 125074 - DNA, 642 bp, synthetic construct
  misc_feature 1..642: note = Description of Artificial Sequence: Synthetic coding sequence
  source 1..642: mol_type = other DNA
atggcctctctgtcccgcccaagcttaccctcatgcctgtgtagttttttgctgctgctgctgctccaagtgagcagctcgtacgcgggtcagttccgggtgataggaccaaggcatcccattcgggccctggtcggtgacgaagttgagctgccatgcagaataagcccaggcaagaacgcaacaggcatggaggttgggtggtatcgccctcccttcagccgggtggttcatttgtatcgcaatgggaaggaccaggacggagaccaggccccagaatatcgaggacggactgaattgctgaaagatgccattggtgagggaaaggttacgctgcgaatcaggaacgtgcggttttccgacgagggcgggtttacctgctttttcagggatcacagttaccaggaagaagcagcgatggaactgaaagtggaagatcccttttactgggtgtccccaggggtgcttgttctgctcgctgtgctcccggtgctccttctgcagataacggtgggactggtgtttctgtgtctccagtatcggttgaggggcaagctccgagccgagattgaaaacttacacaggacgtttggtcagttcttggaagagctcctgttccacctcgaggctttgtccggctag

SEQ ID NO: 125075 - DNA, 396 bp, synthetic construct
  misc_feature 1..396: note = Description of Artificial Sequence: Synthetic coding sequence
  source 1..396: mol_type = other DNA
atggcgtccttatccaggccgtctttgccctcatgcctctgctcgtttctgctgctgctgctgctgcaggtgagctcctcttatgctgacccattctattgggtgtctcctggggtgctagttctgctggccgtgctcccagtgctgctgctgcagatcaccgtaggactcatctttttgtgtctgcagtacagactccgggggaagcttagagcagaaatagaaaacctccatcgaacttttgacccccatttcctgagggtgccatgctggaagatcaccctgttcgtgattgtgcctgtcctggggccccttgtcgccctcatcatttgctataactggttgcatagaagattggcaggtcaatttttggaagagttaagaaacccattctag

SEQ ID NO: 125076 - DNA, 621 bp, synthetic construct
  misc_feature 1..621: note = Description of Artificial Sequence: Synthetic coding sequence
  source 1..621: mol_type = other DNA
atggcttccctgtctagaccgagcctcccaagctgtctgtgttccttcttgctgctgctattactgcaggtttcaagctcttatgctggacagtttagagtgattggacctcgccaccctataagggctctcgttggggacgaggtggagctgccatgtcgaatcagccctggcaaaaacgctaccggaatggaagtaggctggtatagacccccctttagcagggtcgtgcatctctataggaatggtaaagaccaggatggagaccaagcgcctgaatatcgaggacgtaccgaactgctgaaagatgccattggggaaggcaaggtaaccctgcgcatccgcaatgtacggttcagcgacgaaggtggcttcacatgctttttcagggatcatagctaccaagaagaggctgctatggagctgaaggttgaagatcccttctattgggtgtcccctggtgtgctggtcctcttggctgtgctgccagtgctccttctccagataaccgtggggctgattttcctctgccttcagtacaggctccgaggaaagctcagggccgaaattgaaaacctgcatagaaccttcgtgttccacctggaggcgctgtctgggtag

SEQ ID NO: 125077 - DNA, 759 bp, synthetic construct
  misc_feature 1..759: note = Description of Artificial Sequence: Synthetic coding sequence
  source 1..759: mol_type = other DNA
atggctagtctgtctagacctagcctgcctagctgcctttgttctttccttttgttactcctgcttcaggtgagtagcagctacgctgggcagtttcgagttattggccctcgacacccaatccgggcactcgtgggtgatgaagtcgagctaccctgcagaattagtcccgggaagaacgctaccggaatggaggttgggtggtacagaccaccattctctcgggtggtgcacctgtacaggaatggcaaggaccaagacggagatcaggccccagagtacagaggccgtacagagttgctgaaggacgccattggcgaggggaaggtgactctccgaattcgaaacgtccgcttttccgatgaaggtgggttcacatgtttttttcgcgaccacagctatcaggaggaagctgcgatggagctgaaagtagaagacccattctattgggtatccccaggagttctcgttttgctcgccgtgttgcctgttctgctcctgcaaataacggtagggcttatctttctgtgcctccagtacaggctgaggggcaagttacgtgcggagatagagaacttgcatcggacctttgatccacactttctgcgcgtgccatgctggaagataaccctcttcgtaattgttcccgtgttgggcccactggtggctcttatcatctgttacaactggcttcacaggaggctggccggccaatttctggaggagctcttgtttcacttggaggccctgtccgggtag

SEQ ID NO: 125078 - DNA, 516 bp, synthetic construct
  misc_feature 1..516: note = Description of Artificial Sequence: Synthetic coding sequence
  source 1..516: mol_type = other DNA
atggccagtttatcccgaccgagtctgccaagctgcctatgttcgttcctgttgctattgctgctgcaggtctcaagttcctacgccggacagttccgcgtaatcggccccaggcatcccatccgcgccctcgtcggggacgaggtcgaactcccttgcagaatctccccaggcaaaaatgccaccggcatggaggtcggctggtatagaccccccttctcccgggtagtgcatctataccgcaatgggaaggatcaggacggggaccaggctcccgagtatcgcggacgaacggagttattgaaggatgctatcggagaggggaaagtcactcttcgcatcaggaatgtgcgtttctccgatgaagggggctttacctgcttttttcgtgaccatagttaccaggaggaggctgcaatggaactaaaggttgaggtgagccactctgtaactcaggactggctccagtggcacgaccatgggagcctgcagccccctccgccaagactgaagtag

SEQ ID NO: 125079 - DNA, 744 bp, synthetic construct
  misc_feature 1..744: note = Description of Artificial Sequence: Synthetic coding sequence
  source 1..744: mol_type = other DNA
atggcttcgctgagtaggccaagcttgcctagctgcctgtgtagtttcctcttgctccttttacttcaagtaagtagctcctacgcagggcagttcagagtaatcgggccccgacatccaatcagggcattggtaggggacgaggtggagcttccatgccggatcagtcctggcaaaaatgcaaccggcatggaggtgggttggtacagaccccctttttcaagagttgttcacttgtaccgcaacggcaaggaccaggatggggaccaggcccccgagtaccgaggcaggaccgagctcctcaaagatgcaattggcgagggtaaagtcacattaaggattagaaatgttagatttagcgatgagggtggctttacatgcttcttccgggaccattcttaccaagaggaagccgcgatggagctgaaagtggaggaccccttctactgggtgtcaccgggggtgctggtgttgctggctgtgttgccagttctgctgctccagattacagtgggactcattttcctctgtctgcaatataggctacgggggaagctgcgggcagaaatagagaacctgcaccgaacatttgacccccacttccttcgagtgccttgctggaagattactttgtttgttattgtccctgtgctgggcccactggtggctctgattatctgttacaattggctacaccggaggctggccgggcagttccttgaggaactgcggaatcctttttag

SEQ ID NO: 125080 - DNA, 396 bp, synthetic construct
  misc_feature 1..396: note = Description of Artificial Sequence: Synthetic coding sequence
  source 1..396: mol_type = other DNA
atggccagtctctccagacccagtctaccctcctgcctctgctccttcctgcttctgcttctgctacaggtcagttcgtcttatgccgacccgttctattgggttagtccaggcgtgctggtgcttctagctgtgctgcctgttcttctattacaaattactgtgggactggtgttcctctgtctgcaataccgccttcgcggaaagcttcgggcagagattgaaaatctgcatcgcacatttgatccccacttcctcagagttccctgttggaaaataaccctgttcgtgatcgtgccggtcctgggcccactcgtggccctgatcatatgttacaattggctgcatcgccgactggccggccagttcttagaagaactcaggaacccgttttag

SEQ ID NO: 125081 - DNA, 744 bp, synthetic construct
  misc_feature 1..744: note = Description of Artificial Sequence: Synthetic coding sequence
  source 1..744: mol_type = other DNA
atggcatctctgagcagacccagccttcccagctgtctgtgctctttcttactgctgctcctcctccaggtaagtagttcttacgctgggcagtttcgggtgatcggcccccgacacccaatcagagccctcgtcggagacgaggtggaactgccctgccgaatatcgcctggtaagaacgctactggcatggaagtggggtggtataggcctccgttctcccgagtggtacacctgtatcgcaacgggaaagatcaggacggagatcaagcaccggagtaccgcgggcgaacggagctactgaaggacgccatcggggagggcaaggtgacactcaggataaggaatgtgagattctcagacgaaggaggattcacctgcttctttcgggaccacagttaccaagaggaggctgctatggagttgaaggtggaggacccattctactgggtatcccccggcgtcctcgtgcttctcgctgttctccctgttttgctgctgcagatcacagtgggactcgtttttctttgtctgcagtaccgattgagaggaaaactgagggccgaaattgagaatctgcaccgtacgttcgatccgcactttctgcgggtgccttgctggaaaattaccctttttgtaattgtgcccgttcttggccctctcgttgcattaattatctgttataactggctccataggaggctcgccggccagttcttagaggaactgagaaacccgttttag

SEQ ID NO: 125082 - DNA, 744 bp, synthetic construct
  misc_feature 1..744: note = Description of Artificial Sequence: Synthetic coding sequence
  source 1..744: mol_type = other DNA
atggctagcctgagcagaccctcacttccctcctgtctgtgcagctttctgctgctgttgctcttgcaggtgagttcttcctacgcaggacagtttagagtcatcggcccacgccaccctattcgggctttggtgggggatgaggtagagttgccttgcagaatctctcccggaaagaacgctacaggtatggaagtggggtggtacaggccgccctttagccgcgtggtgcacctgtaccgcaatggtaaggaccaggacggggaccaagccccagaatatagggggcgcaccgaactgctcaaagatgcaatcggcgaagggaaggtgaccctgcgtattcgaaatgtgcggttctctgatgagggtgggtttacatgtttcttccgggatcatagttaccaggaggaggctgctatggaacttaaggtggaggatcctttttactgggtgagccctggggtactcgttttactcgcagtcctgcctgtccttctgctgcagattaccgtcggcctagtgttcctgtgcctgcaatacagacttagagggaagctcagggccgaaattgagaacttgcatcgcaccttcgatcctcacttcttacgggtgccatgttggaagatcacccttttcgttatcgtccccgtgttgggacctctggtggcgttgatcatttgttacaattggctgcacagaaggctagccgggcagttccttgaggaattacgcaacccattctag

SEQ ID NO: 125083 - DNA, 690 bp, synthetic construct
  misc_feature 1..690: note = Description of Artificial Sequence: Synthetic coding sequence
  source 1..690: mol_type = other DNA
atggctagcctgagtcgcccctccctgccaagctgtttgtgtagcttcctgctgctgctactgctgcaggtgagcagcagttacgcaggtcagtttagggttattggccctaggcatcctatccgagcgctcgtgggtgacgaagtggagctcccctgtagaatctctcctgggaagaatgccactggaatggaggtcgggtggtataggcccccgttcagtcgagttgtgcatctttacagaaacggcaaggaccaagatggagaccaggcaccagagtatcgggggcgtacagagctcctaaaggacgccattggagagggcaaggtcactttacgaatcagaaatgtcagattttcagatgagggaggatttacgtgctttttccgcgaccactcctaccaagaggaggccgcaatggaactgaaagttgaggatcctttttactgggttagcccgggcgtccttgtccttttggcggtactgcccgtgttgttgcttcagattaccgtggggctggtcttcctctgtcttcagtatagactccgcggtaagctgcgggcggagatcgaaaatttacaccgtactttcgagtctttcggggtcctgggaccacaggtaaaagaacccaaaaagaccggacaatttctggaggagctgctgtttcatcttgaggcactttcagggtag

SEQ ID NO: 125084 - DNA, 642 bp, synthetic construct
  misc_feature 1..642: note = Description of Artificial Sequence: Synthetic coding sequence
  source 1..642: mol_type = other DNA
atggcttccctctctagaccatccctaccgtcttgtctgtgttcctttttactgttgttgctgttgcaggtcagctcctcttacgccggacagttcagagtcatcggacccaggcatcccattcgcgccctggtaggagacgaggtggaactgccctgtaggatctcccctggaaaaaatgccacagggatggaggttgggtggtaccgacctcctttttcacgcgtagtgcacctgtacagaaatgggaaggaccaagatggagatcaggctccagaatataggggcaggactgagctcctgaaggacgccatcggagagggcaaggtaaccttaaggatcagaaatgtcaggtttagcgatgaaggagggttcacatgtttttttcgggatcactcctaccaagaggaggccgcgatggagctgaaggtggaggatccattctactgggtctcccctggagttcttgttcttttagccgttctgcctgtgttgctcttgcagatcacggtcgggctgatttttctgtgccttcaataccgactgcgcggtaaactccgcgcagagattgaaaatttgcacagaaccttcgggcagttccttgaagagcttctgtttcacctggaagctctgagcggatag

SEQ ID NO: 125085 - DNA, 675 bp, synthetic construct
  misc_feature 1..675: note = Description of Artificial Sequence: Synthetic coding sequence
  source 1..675: mol_type = other DNA
atggctagtctgagcagaccgagtctgccaagttgcctatgctcatttctcctcctgttgctcctccaggtcagctcctcctacgcggggcagttccgggtgataggtccccggcaccccattagagctctggtcggggatgaggttgaattgccttgccggatatcgcccggcaagaatgccacagggatggaggtgggatggtacaggcctccgttctctcgggttgtccacctgtacaggaatggaaaggaccaggatggcgaccaggcccctgaataccgtggacgtacagaattacttaaggacgcaattggggaagggaaggttacgctgcgaatccgtaatgtccgtttttctgatgagggcggttttacatgttttttccgggaccactcttaccaggaagaggctgcgatggagctgaaggtagaggaccctttctattgggtctctcctggggttctggtcctactcgctgtcctgcccgtcctcctgctgcagataactgtgggactaatcttcttgtgcctccagtacaggcttcgagggaaactcagggctgagatcgaaaacctacacaggacctttgaatccttcggagtgctgggaccccaagtgaaggagccgaaaaagacaggacaatttctcgaagagcttcggaaccccttctag

SEQ ID NO: 125086 - DNA, 675 bp, synthetic construct
  misc_feature 1..675: note = Description of Artificial Sequence: Synthetic coding sequence
  source 1..675: mol_type = other DNA
atggcctcgctatcacgtcccagcctccccagctgcctctgtagtttcctgctgcttctcctgcttcaggtgtcttcttcctacgctggccagttccgtgtgatcggaccgaggcaccctattcgggccttggtcggtgacgaggtggagttaccttgtcggatttctcccggcaagaatgcaactggaatggaggttggatggtataggccccctttctccagggttgtccacctgtatcggaacggcaaggatcaggatggtgatcaggcccctgaatatagagggaggactgagttactgaaggacgccatcggcgaaggcaaagtgacactgaggatccgaaacgtgcggttcagcgacgaaggtgggttcacatgcttcttccgggatcactcctaccaagaggaggctgcgatggagttaaaagtggaggacccattctattgggtaagccccggggtgctggttctcctggcggttctgcccgtgctgcttctacagatcaccttgggcttagtgtttttgtgcttgcagtaccggctgcggggcaagctgcgcgccgagatcgaaaacctccaccgaacatttgagtcatttggggtgctgggacctcaagtaaaggaaccaaagaaaacaggccaatttctagaggaactaaggaacccattttag

SEQ ID NO: 125087 - DNA, 690 bp, synthetic construct
  misc_feature 1..690: note = Description of Artificial Sequence: Synthetic coding sequence
  source 1..690: mol_type = other DNA
atggcaagcctcagccgaccctccctcccttcatgtctgtgcagttttctgttgcttctgctgctgcaggtttcatcatcctacgccggacaattccgcgtgatcggtcctcgccaccctatcagggcactcgtcggagacgaagttgaactgccatgtcgaatcagccctggaaagaacgccactggtatggaggttggctggtatagacccccgttctccagagtggtgcacctttaccgaaacggaaaagaccaggacggggaccaggctcctgaatatcgcggacggactgagctcctaaaggacgcaattggggagggcaaagtgacactcagaatcaggaacgttagattcagcgatgaaggcggtttcacatgtttttttcgcgatcactcctaccaggaggaagccgcaatggagctgaaagttgaggacccattctactgggtgtctcctggggtgcttgttttactcgccgtcctgcccgtgctcctgctgcaaatcaccgtggggctggtgttcctgtgtctacagtaccgcctgcgtggcaagcttagagctgagattgaaaacttacatagaacatttgagtcattcggcgtgctgggtccgcaggtcaaagagcctaagaagaccggacaattcctggaggagttgctcttccacctggaagcactgagcgggtag

SEQ ID NO: 125088 - DNA, 642 bp, synthetic construct
  misc_feature 1..642: note = Description of Artificial Sequence: Synthetic coding sequence
  source 1..642: mol_type = other DNA
atggcttccctgtccagacctagtttgccctcatgcctgtgctcttttctattgctgcttctgcttcaggtctcttctagctacgctgggcagttcagagtgatcggtccgagacatccgatccgtgccctagttggcgacgaagttgagctgccctgtcgaatttctcccggcaagaacgcgaccgggatggaagtgggatggtacagaccaccattttcaagggtggtccacttataccgcaacgggaaggatcaggatggggatcaagccccagaataccgcgggcggactgaactgctgaaagacgccatcggcgaaggcaaggtgaccctgcgcattcggaatgtgcgcttcagcgacgagggcgggttcacgtgttttttccgcgaccattcttatcaggaggaagcggccatggagttgaaggtggaagacccattctattgggtgtcacctggtgttctcgtactcctagccgtcctgccagtcctgctgctgcagatcacagtgggattagtcttcctatgtctgcagtataggctccgagggaaactgcgcgctgagattgaaaatcttcataggacctttggtcagtttctggaggagctgctgtttcatctggaagcgctctcaggctag

SEQ ID NO: 125089 - DNA, 540 bp, synthetic construct
  misc_feature 1..540: note = Description of Artificial Sequence: Synthetic coding sequence
  source 1..540: mol_type = other DNA
taacagtttcgggtaataggcccccggcaccctattcgcgctttggtcggggacgaagtcgagttaccttgtcggatttcccctggaaagaatgcaacaggtatggaggtgggatggtatcggcccccattttcgcgggttgtgcacctgtacaggaacggaaaggatcaagacggagatcaagctcccgagtatcgcggtaggaccgagctgcttaaagatgctattggggaggggaaggtgaccttacggattcgaaacgtccgattcagcgacgagggcggctttacatgctttttcagagaccactcatatcaggaggaggcagcaatggaattaaaggttgaggacccattctactgggtgtctcctggcgtcttggttctactggccgtactccccgtgctcctgttgcagattaccgtaggcctcgtgtttttgtgtctgcaataccggctacgggggaaactacgggccgaaattgagaacttacatcgtacttttggtcaatttctggaggagttaaggaacccattctag

SEQ ID NO: 125090 - DNA, 396 bp, synthetic construct
  misc_feature 1..396: note = Description of Artificial Sequence: Synthetic coding sequence
  source 1..396: mol_type = other DNA
atggccagtctaagtcgccctagccttccttcctgtctgtgctctttcctcctcctccttcttctacaggtgtctagttcgtacgcagaccccttctattgggtgtctcccggtgtgcttgtgctgcttgcagttttacctgtgctgctgctgcagattacagtgggactagtgtttctctgtctgcaataccgattgagaggcaaactacgcgcggagatcgaaaatctgcaccgcactttcgatccacattttttgcgcgtgccatgctggaaaatcacattgttcgtcatagtccccgtgctcggacctttggtggcgcttatcatatgttataactggctccacagacgcctggcaggacagtttttggaggagctgaggaacccattctag

SEQ ID NO: 125091 - DNA, 615 bp, synthetic construct
  misc_feature 1..615: note = Description of Artificial Sequence: Synthetic coding sequence
  source 1..615: mol_type = other DNA
agcttaagtaggccatcactgcccagctgcctgtgctccttccttttgctcttattgcttcaggtcagttccagctacgcagggcagtttagggttatcgggccacgacaccctataagggcccttgtaggcgatgaggttgaattaccatgccgcatttcacccgggaaaaacgctacaggcatggaggttgggtggtatagacccccgttttcccgcgttgtgcatttatatcgcaatggaaaggaccaagatggtgaccaggccccggaatataggggccggacagagctgttgaaggatgccattggtgaggggaaggtcactctaagaatccggaacgtccggttctctgatgagggcggttttacctgtttttttagggaccattcatatcaagaggaagctgcaatggagctcaaagtggaggatccattctattgggtgagtcctggagtgctggtgctactagctgtactccccgtgctgctcctccagatcacagttggactggttttcctgtgcctacagtacaggctgcgcggaaagctgcgggctgagattgagaatctgcatagaacttttgtgtttcacctcgaagctctgtctggctag

SEQ ID NO: 125092 - DNA, 396 bp, synthetic construct
  misc_feature 1..396: note = Description of Artificial Sequence: Synthetic coding sequence
  source 1..396: mol_type = other DNA
atggcctctctctccagacccagtctgccctcctgcctgtgttcattcctgctactcctgctgctgcaggtctccagttcctacgccgacccattctattgggtgtcccccggcgtgttggtcctgctcgcagttctgccagtgctgcttctccagattacactaggcttggtattcctatgtcttcagtaccgtctccgcggcaagcttcgagccgaaattgagaacctgcaccggacattcgaccctcattttctgagggtcccatgttggaagatcactctgtttgttatagtacctgtgctcggacctctggtggccctgattatttgttacaactggttgcacaggaggttggcaggtcaattccttgaggagctgcgaaatcccttttag

SEQ ID NO: 125093 - DNA, 675 bp, synthetic construct
  misc_feature 1..675: note = Description of Artificial Sequence: Synthetic coding sequence
  source 1..675: mol_type = other DNA
atggcctctctatctagaccaagcctgccctcatgtttatgctcattcctccttctgttactactccaggtttcgtcctcgtatgccggtcagttccgcgtgattggcccaaggcatccgataagagcgttagtcggagatgaggtggagctgccctgtcgcatctcccccgggaagaatgccaccggcatggaagtcggttggtatcgtccccctttctcccgggtagtccacctgtaccgcaacggtaaggatcaagatggggatcaagcccccgaatatagaggacgtacagaattgctgaaggatgctatcggggagggcaaggtaaccctgagaatcaggaatgtgaggttcagcgacgaagggggatttacatgctttttcagagaccactcttatcaggaggaagcggctatggaattaaaagtggaagatccattctactgggttagtcccggagtacttgtcctgttagccgtgttgccagtgctcctgctccagattacagtgggcttagtcttcctgtgcctccagtatagactgaggggtaagttgagagctgaaatcgaaaaccttcatcgcacatttgagagcttcggcgtgctagggccccaagtgaaggagccgaagaaaaccggtcaatttctcgaagaattgaggaaccctttctag

SEQ ID NO: 125094 - DNA, 675 bp, synthetic construct
  misc_feature 1..675: note = Description of Artificial Sequence: Synthetic coding sequence
  source 1..675: mol_type = other DNA
atggcttcactatctcgtccctctttgccttcttgtctatgttccttcttgcttctgctgctgctccaggtgagttcgtcctatgctggccaatttagagtgataggccctaggcaccctatccgggcacttgtgggtgatgaggtggagctgccttgtcgcataagccctggcaagaatgctaccggaatggaggtagggtggtacaggcctcccttctctcgtgtggtccacctctaccgcaacggcaaggaccaggacggcgatcaggccccagagtatcgtggcagaacggaactgctgaaagacgcaataggggagggcaaggtgaccttaaggattcgaaatgtcaggttctctgacgagggcggctttacatgcttttttcgggatcactcttatcaagaggaggcggctatggaactgaaagtggaagacccattttactgggtatcaccaggagtgctcgtcttgctggctgtcctgccagtcctgctgttacaaatcacagtaggcctggtcttcctttgcctgcagtacaggttgcgcggaaagctaagggctgagattgagaacctgcatcggacctttgagtcctttggagtgttgggccctcaggtcaaagagcctaagaaaactggccagtttcttgaggagctccggaacccgttctag

SEQ ID NO: 125095 - DNA, 675 bp, synthetic construct
  misc_feature 1..675: note = Description of Artificial Sequence: Synthetic coding sequence
  source 1..675: mol_type = other DNA
atggcatccttgtcacgccccagccttccatcttgcttgtgtagctttctcctgttgctgcttctccaggtctccagctcatatgctggacagttccgcgtgatcggaccacgtcatccaatcagggcgcttgtgggcgacgaggtagaactgccttgtcggattagcccgggcaagaatgctaccggaatggaagttggctggtatagacctccctttagtagggtggtccacctgtatcggaacgggaaagatcaggacggtgaccaggcaccagaatatagagggcgaaccgagctgctgaaagatgccatcggggagggtaaagtaacacttcgaattcgaaacgtgagattcagtgacgagggtggcttcacatgtttcttccgggatcattcctaccaggaagaagccgccatggaactcaaggtggaggaccccttctactgggtctccccaggagtgctggtgttactggccgtacttccggtgctgctgttacagattactgtcggactggtgtttttgtgtcttcagtaccgcctgagagggaagctcagggccgagatagagaacctgcacagaacatttgaatcattcggtgtgctgggccctcaagtgaaggagccgaaaaaaacggggcagttcctggaggagctgaggaacccattttag

SEQ ID NO: 125096 - DNA, 759 bp, synthetic construct
  misc_feature 1..759: note = Description of Artificial Sequence: Synthetic coding sequence
  source 1..759: mol_type = other DNA
atggcaagcctttcccgcccatctctgcctagctgtctttgttcttttctgcttctcttactcctgcaggtaagctccagttacgctggacagttccgcgtcattggtccccggcatcctatccgggccttggttggggatgaggtcgaactcccatgtaggatatccccaggaaagaatgcaaccggcatggaagtaggatggtaccgaccaccattctcacgagtagttcatctctacaggaatggcaaggaccaggatggcgaccaggctcccgagtacagagggagaacagaattgttaaaggacgctatcggcgaaggaaaggtcaccctgagaattcggaatgttcgatttagtgacgaaggtggcttcacctgcttcttccgagatcacagctatcaggaggaagctgccatggagctgaaggtggaggacccgttttactgggtctcacccggtgtgctcgtgctgctggctgtgctgccagtgcttttgttacagataaccgttggactcgtcttcttgtgtctccagtatagactgcgcggtaagttacgggcagaaattgagaatcttcatagaacattcgacccccattttctcagagtgccgtgttggaaaattacactcttcgtgatcgtgcccgtgttgggcccactcgttgcgttgatcatttgctataattggttacatagaagactggctggacagtttttagaggaattgctttttcacctggaagcgttgtcaggttag

SEQ ID NO: 125097 - DNA, 744 bp, synthetic construct
  misc_feature 1..744: note = Description of Artificial Sequence: Synthetic coding sequence
  source 1..744: mol_type = other DNA
atggcttccctaagtcgtccttccctcccttcttgtctgtgcagcttcctcctgcttttactgctccaggtgagtagctcgtatgctggacagttcagagtgataggcccacggcacccaatccgcgccttggttggagacgaagttgaacttccttgccggatcagtccaggcaaaaatgcaacaggcatggaagtgggttggtatcggcctccattctctagggtagttcatctttataggaacgggaaggatcaggatggagatcaggcccccgagtatcgagggcgaacagaattactgaaggacgccatcggcgagggaaaggtgaccttaaggatccgcaatgtgcgcttctcagacgaggggggcttcacctgcttcttccgcgatcattcgtatcaagaggaggctgcaatggaactaaaggtggaggatccattctactgggtgtccccaggggtcctcgtgctcttggctgttttgcctgtactgttgctgcagatcacagtgggactcgtgtttctctgtctccagtaccggctgagggggaaacttagagccgagattgagaatcttcataggacttttgacccccattttctgagggtcccatgttggaaaatcaccttgttcgttattgttccggtgctggggcctctcgtggccctcattatttgttacaattggttgcatcgacggctcgctggtcagtttcttgaggaactccggaatcctttctag

SEQ ID NO: 125098 - DNA, 540 bp, synthetic construct
  misc_feature 1..540: note = Description of Artificial Sequence: Synthetic coding sequence
  source 1..540: mol_type = other DNA
tgacaattcagagtgattggaccaagacaccctattcgcgccctagtgggggacgaagtagagctgccatgtagaatatcaccaggtaagaacgcgacggggatggaggtcggatggtaccgccccccgttttcacgcgttgtccacctttaccgaaatgggaaggatcaggacggcgaccaggctcctgagtatagaggaaggaccgagctcctgaaagacgccatcggtgaaggtaaagtaaccctgcgaatccgcaatgtacgcttctccgatgaaggcggattcacgtgcttcttcagagaccacagctaccaggaggaagctgcgatggaactcaaggtggaagaccccttctattgggtttcacctggcgtactggtgctactggctgtgttacccgtcctgctgctccagataacagtcgggctcgtctttttgtgtcttcagtacagactgcgggggaaactacgtgccgaaatagagaacctgcaccgcaccttcggccagttcctcgaggaactgagaaatccattttag

SEQ ID NO: 125099 - DNA, 540 bp, synthetic construct
  misc_feature 1..540: note = Description of Artificial Sequence: Synthetic coding sequence
  source 1..540: mol_type = other DNA
tgacaatttcgcgtgatcgggcctcgccaccctattagagcacttgtgggcgacgaggtggagctgccatgccgcatatcacccggaaagaatgcgaccgggatggaggtcggttggtacagaccaccattctcccgggtcgtccacttgtatagaaatgggaaggaccaggacggtgatcaggcacctgagtaccgaggtcgcactgagctgctgaaagatgctatcggagaggggaaggtcacccttagaatcaggaacgtgcgcttctcagacgagggggggttcacatgtttctttagggatcacagttaccaggaggaggccgcaatggagctcaaagttgaggatccgttctactgggtgagcccaggagtcctcgttctcctggcagtgcttcctgttctgttgcttcagatcactgtcgggttggtgtttttatgtctacagtaccggttgcgtgggaagttacgcgctgaaatcgagaacctccatcgcaccttcgggcagtttctggaagaactgcgaaatcctttttag

SEQ ID NO: 125100 - DNA, 759 bp, synthetic construct
  misc_feature 1..759: note = Description of Artificial Sequence: Synthetic coding sequence
  source 1..759: mol_type = other DNA
atggcctccctcagtaggccgagccttccgtcctgcctgtgcagtttccttctgctgctgctgctgcaggtttctagttcctatgccgggcagttccgggtcattggaccacggcatccaatccgcgcactggtgggcgacgaggtggagcttccctgccggatctcccccggcaagaatgcaaccggcatggaggtgggctggtataggccaccattctctcgggttgtgcacctctacagaaatgggaaggaccaagacggcgatcaagctcccgaatataggggaaggacggagctgcttaaggatgcgattggtgaaggcaaggttaccctacggattcggaacgtccgcttctctgacgaaggaggcttcacatgctttttccgagaccacagctatcaggaggaagccgcaatggagctgaaagtcgaggatccgttctactgggtgtccccaggagtactggttcttctggcagttcttcccgttttgttgctgcaaatcacagtgggacttgtattcttgtgtctacagtatagacttagggggaaactccgagcggagatcgagaacctgcaccgtacattcgaccctcactttctcagggtgccatgctggaaaatcactttgttcgtaatcgtgcctgtattaggcccgttggtggcccttatcatatgctacaattggctccaccgccgcttggcaggtcagtttctagaggaattgctgtttcacttggaggctctcagcggctag

SEQ ID NO: 125101 - DNA, 690 bp, synthetic construct
  misc_feature 1..690: note = Description of Artificial Sequence: Synthetic coding sequence
  source 1..690: mol_type = other DNA
atggcatcactgagcaggcccagcttgccaagttgcctgtgttctttccttctgcttctgctcctgcaggtcagcagcagttatgctgggcagttccgtgtaatcgggcctagacacccaatccgagccctcgtcggggacgaggtggaacttccctgtagaatctccccaggaaaaaacgccactggtatggaagtggggtggtaccgcccaccttttagccgcgtggtccatctgtataggaacggcaaggaccaggacggcgaccaggctcctgagtacagaggacgcacagaactgctgaaagacgccatcggggaggggaaggtcacattacgtattaggaacgtacggtttagtgatgaaggtggattcacatgttttttcagggaccacagctaccaggaggaggctgcgatggaactgaaagtggaggatcccttctactgggtgtccccaggggtgctggtcctcctcgccgtgctcccagtgcttctgctgcagattacagtggggttggtattcctctgtctgcaatacaggctgcgcggcaagctgagagctgaaatcgagaatttgcacaggacctttgagagcttcggtgtcctaggcccacaggtgaaagagcccaaaaaaactggacagtttctggaagaactcctgttccatctggaagccctctccgggtag

SEQ ID NO: 125102 - DNA, 888 bp, synthetic construct
  misc_feature 1..888: note = Description of Artificial Sequence: Synthetic coding sequence
  source 1..888: mol_type = other DNA
atggcctcactttctagaccttcactgccaagctgtctatgttccttcttgctgctgctgttactccaggtttctagctcatatgctggacaatttagggttattggtccgcgacaccccatccgcgctctagtgggggacgaagtggaactgccttgtaggatatcccccggaaagaacgcaacgggcatggaagtaggctggtatcgaccgcctttttcccgggttgtccacctgtataggaatggtaaggaccaagatggcgatcaggcccctgagtacaggggcaggaccgagctactgaaggacgcgattggcgaaggcaaggtgactctccgaatccgaaacgtccgtttttccgatgaggggggttttacttgcttttttcgcgatcacagctaccaggaggaggccgcaatggagctcaaggtagaggatccattttactgggtgtcacccggagtacttgttctcctggccgtactcccggtgctgctcctgcagatcaccgttgggttagtcttcctttgtctgcagtatcggctgagaggtaagttgagagctgagattgagaacctccaccggactttcgatccacacttcctgagggtcccatgctggaagattacattgtttgtcatcgtgcctgttcttggtccactagtcgccctaatcatatgttacaattggttacaccggcgtctggctggccaattcctggaggaactcagaaaattttcttccctgtgctataagcagagaattaaaagtcaggagcgggagactgaggccactaggggaagaggcggactccttagagatcacatcccacgagggaaagaagaactggagagtctgggcggagggaagacaccccctggccggtag

SEQ ID NO: 125103 - DNA, 642 bp, synthetic construct
  misc_feature 1..642: note = Description of Artificial Sequence: Synthetic coding sequence
  source 1..642: mol_type = other DNA
atggcttctctgagtcggccgagcctgccgagctgcctgtgctccttccttctcctccttctcctgcaagtgtcctcatcatacgcagggcagttccgagtgatcggcccgcggcacccgataagagctctcgtgggcgacgaagtagaattgccctgccgcatcagcccaggaaaaaatgctactggcatggaagtaggctggtatcgcccaccatttagtagagttgtccacctatacaggaatggcaaggaccaggacggagaccaggccccagaataccgcggaaggactgaactgttaaaggatgctattggcgaaggtaaggttactctccgaattaggaacgtaaggttctccgacgaggggggattcacctgttttttccgagaccactcctaccaggaagaggccgccatggaactgaaagtcgaggatccattctattgggtgtctccaggcgtccttgttctgttagccgtgctgcccgtgctgcttctgcaaattacagtggggctggtattcctgtgtctccagtaccgattgcgaggaaagcttagagccgagatcgagaatctccatcgaacctttgggcagttcctggaggaactgctcttccatcttgaggctctctccggctag

SEQ ID NO: 125104 - DNA, 759 bp, synthetic construct
  misc_feature 1..759: note = Description of Artificial Sequence: Synthetic coding sequence
  source 1..759: mol_type = other DNA
atggcttcactgagtcggccctcgctgccctcctgcctgtgtagttttcttttgctcctgctcctgcaagtgagttcaagctacgccggtcagtttcgtgttatcggccccaggcatccaatcagagccctcgtgggagatgaagttgaactcccttgcaggatctcccctggtaagaacgcaacaggcatggaagtgggctggtatcggcccccattttcccgggttgtgcacctgtaccgtaatggaaaggatcaggatggagaccaggccccggaatacaggggtcgtacggagctgcttaaggacgcaataggcgagggcaaggtaacactgcggattaggaacgtgaggttcagcgatgagggagggttcacctgcttctttcgcgaccactcctaccaggaggaagctgccatggaacttaaggtggaagaccctttctactgggtgagcccaggtgtcctcgttctgctcgcagtgctgcctgtcctgctactgcaaattactgttggtttagtgttcctgtgccttcaatatagactccgcggcaaattgagagctgagattgagaaccttcacagaacttttgacccgcacttcctcagagtgccttgctggaaaatcacgctcttcgtgatcgttccggtcctcggtcccttggtggccctaatcatatgctacaactggctgcatcggcgactggctgggcagttcctcgaagaacttctttttcatctggaggcactgagcgggtag

SEQ ID NO: 125105 - DNA, 540 bp, synthetic construct
  misc_feature 1..540: note = Description of Artificial Sequence: Synthetic coding sequence
  source 1..540: mol_type = other DNA
tgacagttccgcgttattggacccaggcatcccattcgggcccttgttggggatgaagtggagttgccctgcagaatcagccctggaaaaaacgccacaggcatggaggttggttggtaccgcccgccattttcaagagtcgtgcatttatatcgcaacgggaaggatcaagacggagatcaagccccagaatatcggggcaggacagagctgctgaaagatgcaataggtgaggggaaggtgaccctgcggattagaaacgtacgttttagcgacgaggggggctttacctgtttctttagagatcacagctaccaggaggaggctgctatggagctcaaggtggaggatcccttttactgggtctccccgggggtgctcgtcttacttgcagtcctgcccgttctccttctgcagattaccgtcggcctcgtctttctatgcctacagtaccggctgcgcggtaagctgcgagccgaaatcgaaaatctgcatagaactttcggtcaattccttgaggagctgcgcaacccattttag

SEQ ID NO: 125106 - DNA, 888 bp, synthetic construct
  misc_feature 1..888: note = Description of Artificial Sequence: Synthetic coding sequence
  source 1..888: mol_type = other DNA
atggcgtccctaagcaggcctagcctgccgtcttgtctttgctcattcttgctattactgctgctgcaggtgtccagctcctatgctggccagtttcgggtaatcgggcctaggcacccaatccgggctctcgttggagacgaggtggaactcccatgtagaatcagcccaggaaaaaacgctacaggcatggaagtggggtggtatcgtccccccttttctcgtgtggtgcacttgtatcgcaatggaaaggatcaggacggggaccaggcgcccgaatatcgcggacggaccgagctactgaaggacgcgatcggagagggaaaagtgaccctgagaatacgaaacgtcagattttctgacgaaggggggtttacctgcttcttccgcgatcattcttaccaggaggaggctgcaatggaattgaaggtggaagaccccttttactgggtgagccccggcgtgctagtacttctggctgtacttcccgtgctgctactacagattactgttggactcgtttttctgtgtctgcagtacaggctccgcggcaaattgcgggcggagattgagaatctgcaccggactttcgaccctcatttccttagggtcccttgttggaaaataaccttatttgtgattgtgcctgtgctagggccgctcgtagcgctgatcatctgctataactggctccaccgccgactggccggtcagttcctggaggaactgcgtaagtttagtagcttgtgttataagcaaaggatcaagtcccaagagagggagactgaggccaccagagggcgcggcggcttgttgagggatcatataccacgcggaaaagaggagctcgaaagccttggtgggggtaaaactccgcctggccgttag

SEQ ID NO: 125107 - DNA, 888 bp, synthetic construct
  misc_feature 1..888: note = Description of Artificial Sequence: Synthetic coding sequence
  source 1..888: mol_type = other DNA
atggccagcctctccaggccatccctcccaagttgtctgtgcagcttcctgctcctcctccttctgcaggtgtcctcaagctacgctggacagttccgagtgattggtccacgtcaccctattagggctctcgtgggggatgaagtcgagctaccatgtagaatcagccccggcaaaaacgccacgggtatggaagtaggctggtataggcctccgttttccagggtcgtgcatctctacaggaatggcaaagaccaagacggcgatcaggctcccgaatatcgcggccggaccgaactcctcaaggatgctattggggagggaaaggtcaccctgcgcatacgtaacgtgaggttcagtgacgagggagggttcacgtgttttttcagggaccactcttatcaggaggaggcagccatggagctgaaagttgaggatcccttctattgggtatcaccaggcgtattggtcctactggccgtactcccagtgctcctgctccaaatcaccgtgggcttagtctttctgtgtctgcaatataggctccgcgggaaactcagagccgaaatcgaaaacctacatcggacatttgatccccactttcttagggtgccgtgttggaaaatcacgttattcgtgattgtccctgtgctggggcctcttgtggctctgatcatctgctataactggctgcataggcgccttgccggtcagtttttggaggagctgcgaaagttctcgtcactctgctataagcagcgcattaagtcacaggagagagagacggaggcaactagaggacgagggggactattacgtgaccacattcccagaggaaaggaggagttagaatccctcggtgggggtaagacccctcctgggcggtag

SEQ ID NO: 125108 - DNA, 396 bp, synthetic construct
  misc_feature 1..396: note = Description of Artificial Sequence: Synthetic coding sequence
  source 1..396: mol_type = other DNA
atggcgtctctgtcacggccctcactgccttcctgtctgtgtagtttcctcctcctgttgttgcttcaagtttccagttcctacgccgaccccttttactgggtgtctcccggggtgctggtactactagccgttttgcctgtactgctgttgcaaatcaccgtggggcttgtcttcctgtgcctccagtaccggttaagagggaagctgcgcgctgaaatagagaacttacatcggacattcgaccctcactttctgagggtgccttgctggaaaatcaccttgtttgtgatagtgcccgtgttggggcccctcgttgctctgatcatttgctacaattggctccaccggaggcttgccgggcaattcctcgaggagctgcggaaccccttctag

SEQ ID NO: 125109 - DNA, 759 bp, synthetic construct
  misc_feature 1..759: note = Description of Artificial Sequence: Synthetic coding sequence
  source 1..759: mol_type = other DNA
atggcgtccttatctcgcccttcactcccctcttgtctctgctcatttttgctgctgctgctcctccaggtgtcttcctcctacgccggacagttcagggtgattggccccaggcaccctatccgagccctcgtgggggatgaggtcgaacttccctgcaggatttccccaggtaaaaacgctacaggcatggaggtgggctggtatcggccaccattttctagagtagtccatctgtatcgcaatggtaaagaccaggacggcgaccaggccccagaatatcgtggtagaactgaactactgaaggacgcgatcggcgaaggtaaggtcactctccgtattagaaatgtgaggttctcagacgagggcggctttacgtgcttcttcagagaccactcctatcaggaggaggctgcaatggagttaaaggtagaggacccattttattgggtgtcaccaggtgtcttggttctactggcggtccttccggtgctgcttttgcagatcacggtcggtctcgtgtttctctgtctgcagtacagattgcgcggcaaattacgagctgagatcgaaaacctgcatagaacctttgacccccatttcctgcgtgtcccatgctggaagattacccttttcgtgatcgtgcccgttcttggaccactagtggccctcattatttgctacaactggctgcatcgtcggctggccggccagtttttggaggaactgctttttcacctcgaggctttgtcaggatag

SEQ ID NO: 125110 - DNA, 744 bp, synthetic construct
  misc_feature 1..744: note = Description of Artificial Sequence: Synthetic coding sequence
  source 1..744: mol_type = other DNA
atggccagtctctcaaggccttcgctgccatcatgtctttgctcatttctcctgctgctgctgctgcaggtgtcaagcagctatgccggacagtttcgtgtgataggcccccggcatccgatcagagctctcgtcggggacgaggtcgagctgccatgtagaatctcaccaggcaaaaacgcgactggaatggaagttggctggtacagaccacctttctcacgcgtggttcacctatacagaaacggcaaagatcaggatggcgaccaggcacctgaatacagggggcgaaccgagctcttaaaagatgccatcggtgaagggaaagtgactctcaggattcgaaacgttcgatttagcgacgagggcggcttcacttgctttttcagagaccacagttaccaggaggaggctgccatggagcttaaggtcgaagatcccttttactgggtttccccaggagtgctggttctcctcgcagtgttgccagttctgttactccagatcaccgtgggactagtgttcctatgcttgcagtaccgcctgcgtgggaaattgagggctgaaattgagaacctacaccggacattcgaccctcattttctgcgtgttccctgttggaaaatcactttatttgtcattgttcccgtactggggcctttggtcgcactgattatctgctacaactggctccacaggcgcctggccggccagttcctggaagagctaagaaatcctttctag

SEQ ID NO: 125111 - DNA, 615 bp, synthetic construct
  misc_feature 1..615: note = Description of Artificial Sequence: Synthetic coding sequence
  source 1..615: mol_type = other DNA
tccctgtccaggccttcgttaccttcatgcctgtgcagtttcctgctgttactgctcctgcaagtctcatcttcgtacgctgggcagtttcgagtgattggcccgagacatcctatccgggctcttgtgggggacgaggtggagctgccgtgccgcatttctccaggaaagaacgccactgggatggaggtgggatggtaccgaccccccttcagtagggttgttcatctctacagaaatggtaaggatcaggatggcgaccaggcacctgaatatcgtggaagaactgaactgctcaaggatgcgatcggcgaaggcaaggttacgcttagaatcaggaacgtacggttctcagacgaaggcggctttacatgcttttttagggatcactcctaccaagaggaggccgcaatggaactcaaggtggaggatccattctactgggtgtcaccaggcgtgcttgtcctacttgctgtgctgcctgtgctcttactacagattactgtcgggttggtgtttctgtgcctgcagtatcgactccgcggcaaactgagagcggagatcgagaacctacataggactttcgtgtttcacttggaagccctgtccgggtag

SEQ ID NO: 125112 - DNA, 888 bp, synthetic construct
  misc_feature 1..888: note = Description of Artificial Sequence: Synthetic coding sequence
  source 1..888: mol_type = other DNA
atggcttctctgtctaggccttcccttccttcgtgcctctgctcttttctgctgctgctcttattgcaggtttcatcctcgtacgcaggccagttcagagtgatcgggcctcgtcacccaatcagggctctcgtgggagacgaagtagagctcccttgccgaataagtcctggcaaaaacgcaacagggatggaggtgggctggtatcgaccccccttctctcgagtcgtgcacttgtacagaaacgggaaggatcaggacggggaccaggcacctgaataccgcggccgtaccgaactcctgaaggatgcaattggagaagggaaggtcacactcaggatccggaacgtccgattcagcgacgaaggtgggttcacatgcttctttagagatcactcctaccaagaggaggccgctatggagctcaaggtcgaggaccctttctattgggttagccccggggtcctggtgctgctggccgtgctccccgtgcttctgctgcagattaccctcggactcgtcttcctgtgcttgcaatatcggctgcgagggaagcttagggccgaaatagaaaatctgcaccgcacatttgatccccattttctacgggttccttgttggaaaatcactctgttcgtgatcgtacccgtcctaggccccctggtggccctgattatttgttacaactggctccaccggcggcttgcaggccagtttctagaggagcttaggaagttttctagtctatgctacaaacagaggataaagagccaagagagggaaaccgaggcaacgcgggggcgaggaggactccttagggatcacatccctcgaggcaaagaagaactggaatctctggggggcgggaaaactcctcccggtcggtag

SEQ ID NO: 125113 - DNA, 690 bp, synthetic construct
  misc_feature 1..690: note = Description of Artificial Sequence: Synthetic coding sequence
  source 1..690: mol_type = other DNA
atggcttctctgagcagaccatccctcccctcgtgcctgtgcagctttctgcttctcctgcttctacaggtctctagtagttacgcggggcaatttagagtaatcggtccccgccacccaatccgcgcactcgttggcgatgaagttgagttgccttgtagaatttcaccgggaaaaaacgccactgggatggaggtgggatggtaccgcccaccattttcacgcgtggttcatctctatcggaacggaaaggaccaagatggggatcaggccccagaatatcgagggcggaccgagctgctcaaggacgccataggtgaggggaaagtaaccctcaggatccgcaatgtgagattcagcgacgagggggggttcacttgtttctttcgcgatcacagctatcaggaagaggccgctatggaactgaaagtggaggaccccttttactgggtgtcacctggcgttctagtgcttctcgccgtcctgcctgtcctgctgctccaaattacagtgggcctggtcttcttatgtctacaatataggctgcgggggaagctgcgcgccgaaatagagaacctacatcgcacgttcgaatcgtttggggtgttgggacctcaagtgaaagagcctaagaaaaccggccagttcctggaggaattacttttccatcttgaggctctctccggttag

SEQ ID NO: 125114 - DNA, 396 bp, synthetic construct
  misc_feature 1..396: note = Description of Artificial Sequence: Synthetic coding sequence
  source 1..396: mol_type = other DNA
atggcttcactctcgaggccctctctcccctcttgcctctgcagtttcttgctgcttcttttgctgcaggtgagctcatcttatgccgatcctttttactgggtgtccccaggtgtcctggttctgctggctgtgctacccgttcttctcctgcagatcacagtagggctggtatttctgtgtcttcaatacagattgagggggaaattgcgggcagagatagagaatttgcacaggacatttgacccgcatttcctgcgagtgccatgttggaaaattacgctctttgtcattgtgccagtacttgggcctttggtcgccctgatcatttgctacaattggctgcatcgtaggcttgcaggacagtttttagaggaactgaggaatccattctag

SEQ ID NO: 125115 - DNA, 540 bp, synthetic construct
  misc_feature 1..540: note = Description of Artificial Sequence: Synthetic coding sequence
  source 1..540: mol_type = other DNA
tgacagttcagagtaattggccctcgccaccctatcagagccctggttggagatgaagtagaactcccatgccggatcagccctggaaagaatgcgaccgggatggaagtggggtggtacagaccccccttctcaagagtggtgcacttgtaccggaacggtaaggaccaggacggtgaccaggcaccagaatacagagggagaaccgaattactgaaggacgcaatcggcgagggcaaagttacactaagaatccgtaacgttcgcttttcagatgagggtggcttcacttgtttttttagggaccatagttatcaagaggaggctgctatggagcttaaggttgaggatcccttctactgggttagccccggtgtcctggtgctcctcgcagtgctcccagtcttactgcttcaaatcactcttggactggtgttcttatgtctccagtatagactgcgagggaagttgagggctgagatcgagaatctccataggacctttggccagtttttggaggaattaaggaaccccttctag

SEQ ID NO: 125116 - DNA, 627 bp, synthetic construct
  misc_feature 1..627: note = Description of Artificial Sequence: Synthetic coding sequence
  source 1..627: mol_type = other DNA
atggcctccctgtcccgcccatctctgccatcatgtctgtgcagtttcctccttctgctgctcttgcaggtaagtagttcatacgctggacagtttagggttatcggacccaggcaccctatacgcgctctggtcggcgatgaggtcgagctgccctgcaggatctctcccgggaagaacgcaaccggcatggaagttggatggtatagaccccctttcagccgggtcgtgcacttgtacaggaacggtaaggaccaggacggagaccaggctcctgaatatcgcgggcgcacagaactgttgaaagatgccatcggggaggggaaggtgaccctgcgcatcagaaatgtgcggttttctgacgaaggcggatttacctgttttttccgggatcacagttatcaagaagaggctgccatggagctgaaagtggaggatcccttttactgggtgagccccggagtgttagtgttgctggctgtattacctgttttgcttcttcagatcaccgtcggactgatctttctgtgcctacagtaccggcttagaggcaagctccgtgcagaaatagagaacctccaccggacattcggacagttcctggaggagttgaggaatccattttag

SEQ ID NO: 125117 - DNA, 744 bp, synthetic construct
  misc_feature 1..744: note = Description of Artificial Sequence: Synthetic coding sequence
  source 1..744: mol_type = other DNA
atggctagcctgtcaaggccaagtctgccatcatgcctgtgctcctttcttttgctgctgctgttgcaggtgagcagctcctacgccggccagtttagggtgatcggcccccgtcatcctattcgagcgctggttggcgacgaggtcgaactaccttgtagaatatccccaggcaagaacgcaactggcatggaggtcggctggtatagaccccccttttctcgggtagtgcacctctacaggaatggcaaggaccaggatggggatcaggcccccgagtacagggggcggacagagctcctgaaagacgccatcggagaagggaaggtcaccctccgcataaggaatgtgcggttctctgatgaaggcggttttacctgttttttcagggatcactcatatcaggaggaagcagcaatggaactcaaggtcgaagatccattctactgggtgagcccgggcgtactggtgttgctggctgtgttgcctgtgctactgctccagatcacggtaggattagtgttcttgtgcctgcaataccggttaagaggaaaactgagagccgagatcgagaacctccaccgcacttttgacccccatttcctcagggtgccgtgttggaagataaccttgttcgtaatcgtccccgtgctaggaccactcgttgctctgataatctgttacaattggctacatcgacggctggctggtcagttcctagaggaactgagaaaccccttttag

SEQ ID NO: 125118 - DNA, 396 bp, synthetic construct
  misc_feature 1..396: note = Description of Artificial Sequence: Synthetic coding sequence
  source 1..396: mol_type = other DNA
atggcaagcttgagtagaccctcacttccctcctgtctgtgctctttcctgcttctactactccttcaggtgtcatcgagctacgccgacccattttactgggtgagcccaggcgttttggtactgctcgcagtcttacccgtgttgctgctgcagatcactgtgggattggtgtttctgtgcttacagtacagactgcgcggcaaactccgggcggaaatcgaaaacttacaccgtacattcgatcctcacttcctgagggtcccctgctggaagatcacgctgtttgttatcgtgcctgtcttggggccacttgtggcactcatcatctgttataactggctacaccgcaggctcgccggacagttcttggaggagttgaggaaccctttctag

SEQ ID NO: 125119 - DNA, 642 bp, synthetic construct
  misc_feature 1..642: note = Description of Artificial Sequence: Synthetic coding sequence
  source 1..642: mol_type = other DNA
atggcaagcttgtcacgaccttccctgccgtcgtgcctttgcagttttctgctgctgctgctgctgcaagtcagctcatcttatgcaggccagtttagagtgatcggccctcgccaccccatccgggcccttgtgggcgatgaagtcgagcttccctgccgtatatctccaggaaagaacgcgacagggatggaagttggatggtaccgaccacctttctcccgggtggtccacctctacaggaatggtaaagaccaagatggagaccaggctcccgagtaccggggacgcaccgaactactgaaggacgccatcggggaaggaaaggttacacttaggattcggaacgtacgcttcagcgacgagggaggttttacatgttttttccgggaccacagctatcaggaagaagccgctatggaactcaaggtagaggatccattttattgggtctctcctggtgtacttgtgttgcttgccgtactgccagtgctcctccttcagataaccgtcggattagtttttctgtgcctacagtatcggctgcgcggaaaactgagagcagaaattgagaatctgcaccggacttttggccaattcttggaggaactcttgtttcaccttgaggcactgagtggatag

SEQ ID NO: 125120 - DNA, 615 bp, synthetic construct
  misc_feature 1..615: note = Description of Artificial Sequence: Synthetic coding sequence
  source 1..615: mol_type = other DNA
tctctgtcccggccctctctgccatcctgtctctgttcctttctacttctgctgctcctgcaggtgtcgagtagctacgccgggcagtttagggtgatcggtccaaggcaccctatccgtgccctggtcggggacgaagtggagctcccctgcagaattagccccggaaaaaatgctacagggatggaagtaggttggtataggcctccattctccagagtagtacatctgtatcggaatggaaaagaccaggacggcgatcaagctccggaataccggggaaggacagagcttctgaaggatgcgatcggcgaaggcaaggttacactgcggatccgaaacgtgagattttccgatgagggaggcttcacctgcttcttcagagatcattcttatcaggaggaagcggccatggagctgaaggttgaagacccattttactgggtgagcccgggggttctggtactcctggctgtcttgccagtgctgctgctccagattacactgggtctggtttttctctgccttcagtatcgtctcagggggaaactgcgcgcagagatcgaaaatctgcacagaaccttcgtcttccatctggaggctctctctggctag

SEQ ID NO: 125121 - DNA, 675 bp, synthetic construct
  misc_feature 1..675: note = Description of Artificial Sequence: Synthetic coding sequence
  source 1..675: mol_type = other DNA
atggctagcctttccagaccttctttgcctagttgcctgtgcagctttcttctgctgcttctgttgcaggtttcatctagctacgcaggccagttcagagtcatcggcccgcggcaccctattcgcgcactggtgggggacgaggtcgaactgccatgcagaatctctcccggaaaaaatgccactggcatggaggtgggatggtataggcctccattcagccgcgtggtccatctttaccgcaatggcaaggaccaagatggagatcaggcacctgaatatagagggaggacagaactgctgaaagacgccatcggtgaaggtaaggtgacacttcgaatcagaaatgttcgattttccgacgagggcggctttacatgcttcttccgggatcacagttaccaggaggaagccgccatggaacttaaggtggaggatccgttctactgggtgagcccgggagtgctggtccttcttgcggtgctccccgtacttctgctacagatcaccgtggggttggtcttcttgtgcctccagtacaggctgagaggcaaactgcgagccgagatcgaaaatctgcaccggacttttgagtctttcggcgtgctgggcccccaggtaaaggagcctaagaaaactgggcagttcttggaagagctccggaaccctttctag

SEQ ID NO: 125122 - DNA, 690 bp, synthetic construct
  misc_feature 1..690: note = Description of Artificial Sequence: Synthetic coding sequence
  source 1..690: mol_type = other DNA
atggccagcctgtccagaccttcactaccctcatgcctttgcagctttctattgcttttgctactgcaggtctcttctagttatgccggtcagtttcgggtgatcggtcctcggcacccaattagagccctcgtaggggatgaggttgaattaccgtgccgtatctctccaggtaagaatgcaactggaatggaggtgggatggtataggccaccattcagccgtgtggtacatctttatagaaatggcaaagaccaggatggagatcaagctccagagtatcgggggaggaccgaactgctcaaagatgccattggcgagggaaaggttacccttcggattaggaatgtgaggttttcagacgagggaggctttacatgtttctttagagaccacagttaccaagaggaggccgctatggaactaaaggttgaggatcccttctactgggttagccccggagtgttagtacttttagctgtgctgcccgttctgcttctgcagattaccgtagggctggtgtttctgtgtttacaatatcgcttgcgggggaagctacgggccgaaatcgaaaacctccatcgaacattcgagtctttcggcgtgctcggcccccaggttaaggagcctaaaaaaaccggccagtttctggaagaactcttatttcatctcgaagctctctctggctag

SEQ ID NO: 125123 - DNA, 888 bp, synthetic construct
  misc_feature 1..888: note = Description of Artificial Sequence: Synthetic coding sequence
  source 1..888: mol_type = other DNA
atggcaagtctgtctagacccagcctgccttcatgtctgtgttcattcctgttactacttttactgcaggtcagtagcagctatgcaggccagttccgcgtcatcgggcccaggcatcctattcgggcacttgtgggcgacgaagttgagctcccatgccgaataagtcctgggaagaacgctaccggaatggaagtcggatggtatcgcccacccttctctcgcgtggttcacctttatagaaacggtaaggatcaagacggggatcaggcgccagagtatagggggaggaccgagctgcttaaggacgcaattggtgagggcaaagtgactttaagaatccgcaacgtgcgattcagtgatgagggaggattcacctgttttttcagggaccatagttaccaggaagaggcggcaatggagctgaaggttgaggatcctttctattgggtttccccgggagtgctggtgttactcgcggtgctgccggtgcttctgctgcaaatcaccgtggggttggtgttcctctgtctgcagtacaggctaagaggcaaactgagagccgaaatcgagaacctgcataggacttttgatccacacttcctacgggttccatgttggaagataactttgtttgtcatagtccccgtgctcgggccactggtggccctaatcatctgctacaactggttacacagacgattggccggacagtttctcgaggagttgaggaaatttagctcactgtgctacaagcaacgaataaaaagccaggagagggagacggaagcgacaagaggccggggcggccttcttcgggaccacatcccgcggggcaaagaagagctggaatctctggggggcggcaaaacaccaccaggcagatag

SEQ ID NO: 125124 - DNA, 540 bp, synthetic construct
  misc_feature 1..540: note = Description of Artificial Sequence: Synthetic coding sequence
  source 1..540: mol_type = other DNA
tgacaattccgggtgattgggcctaggcaccccatcagggccctcgtgggggatgaagtggagctgccctgtcgcatctctccaggcaagaatgcgacgggcatggaagttggctggtatcggccacctttctcccgtgtcgtgcatttgtacagaaacggaaaggaccaggatggtgaccaggccccagaataccgaggcaggacagaacttttgaaagacgccattggcgaggggaaggtaactctgcggataagaaatgtgcggtttagcgacgagggagggtttacctgttttttccgggaccacagctatcaggaggaggccgctatggagctgaaggtggaagaccctttctactgggtgtcccccggagtcctggtattgctcgcagtactgcctgttttactcctacagattactgtgggacttgtgtttctctgtcttcaatatcggctcagaggcaaactgcgagcagaaatagaaaacctacaccgaaccttcggccagttcctagaggagcttagaaatcccttttag

SEQ ID NO: 125125 - DNA, 642 bp, synthetic construct
  misc_feature 1..642: note = Description of Artificial Sequence: Synthetic coding sequence
  source 1..642: mol_type = other DNA
atggctagcctgtcccgaccaagccttccgtcttgtctgtgctcgtttcttttgctgttgttactacaggtgagttccagctacgcaggacagtttcgggtcatcggaccgagacacccgatccgggccctcgtcggagatgaagtggaactgccatgccgaatttccccaggtaaaaatgcgaccggaatggaagtgggatggtacaggccgccctttagccgagttgtccatctgtacaggaatgggaaggaccaggatggagatcaggcgccggagtatcggggacgcacggaacttctgaaggatgccattggagagggaaaagtgactctccgtatcaggaatgttaggttctctgatgaaggcggattcacctgtttttttcgcgaccactcctatcaggaagaggctgccatggagctgaaagtggaagatccattctattgggtctcccccggagtcctcgtgctactagcagttctacccgtactcctgcttcagatcacagtcggtctagtcttcctgtgtcttcagtatcggttgagaggcaaactgagagccgagatcgagaacctgcatcgaacctttggccaattcctcgaagagctgcttttccatctggaggcactgtctggatag

SEQ ID NO: 125126 - DNA, 759 bp, synthetic construct
  misc_feature 1..759: note = Description of Artificial Sequence: Synthetic coding sequence
  source 1..759: mol_type = other DNA
atggcttccctgtcgaggcccagcctgcccagttgtttgtgcagcttccttctcttacttctgctacaggtgagcagcagttatgccggtcagtttagagtaatcggcccccggcaccccatccgggctctggtgggagatgaggtggagttaccctgtcgaatttctcctggcaaaaatgccaccgggatggaagtaggctggtacagaccaccctttagtcgggtggtacatctgtacagaaacggtaaggaccaagatggcgaccaggcacccgagtaccgcggccgcacggagttactgaaggatgctatcggcgaggggaaggtgacacttaggattagaaatgtgaggttctccgatgaagggggatttacatgcttcttccgagaccactcttaccaggaggaggctgctatggaattgaaggtggaagaccccttttactgggtgtcacccggtgtgctcgtgcttttagcagtactgcctgtgctgctccttcaaattacagtgggattggtgtttttatgcctgcaatacagactgagaggcaaactgagagcagagatcgaaaacctccaccgaactttcgatccccacttcttgcgagttccttgttggaagatcaccctttttgtgatagtccccgtcctcgggcccctcgtagccctgatcatatgctacaactggttgcaccgtagattggctgggcagttcctggaggagctcctgtttcatctggaagcactgtcagggtag

SEQ ID NO: 125127 - DNA, 642 bp, synthetic construct
  misc_feature 1..642: note = Description of Artificial Sequence: Synthetic coding sequence
  source 1..642: mol_type = other DNA
atggcaagtttaagccgccctagtctcccgagctgcctgtgcagctttttgctgttactgctcctccaggtgtctagcagttacgccgggcagtttcgcgtcatcggccctcgacaccccattcgcgcactggtgggggacgaagtagagctgccctgcaggatctcccctggaaagaacgccaccggtatggaagtcggttggtataggcctcccttttcaagggtggtgcacctgtaccggaacggaaaggatcaggacggtgatcaggcacccgagtaccgcggtcgaaccgaattattgaaggacgcaataggagaaggcaaggtgacgctacggattcgcaacgtgagattttctgacgagggaggcttcacatgcttctttagggatcacagttaccaggaggaggctgcgatggagctgaaagtagaagaccccttctactgggtttcaccgggcgtgcttgttcttctcgccgtcctgcccgtgcttttgctccaaatcacggtgggactcgtgtttttatgtctccagtaccgcttgagagggaagctcagagcagaaatcgaaaacttacatcggacattcggccaattcctagaggagcttctgttccatctggaagcactgtcaggttag

SEQ ID NO: 125128 - DNA, 675 bp, synthetic construct
  misc_feature 1..675: note = Description of Artificial Sequence: Synthetic coding sequence
  source 1..675: mol_type = other DNA
atggcctccctgtcaaggcccagcctgcccagttgtctgtgcagttttttgctgctgctgctgctgcaggtctcttcgtcatatgcagggcagttccgagtcattggtcctcggcaccccatcagggctctggtgggtgatgaggtagagcttccatgtagaattagtcccggcaagaatgcaactgggatggaggtggggtggtatcgtccgcccttctcaagggtggttcatctctatcgcaacggaaaagaccaggatggcgatcaggctccggagtataggggccgcacagaactgctcaaggacgctatcggggagggtaaggttacactgcgcatcagaaacgttcggttcagtgatgaaggtgggtttacatgcttttttagagaccatagttatcaagaggaggcagccatggagctgaaggttgaggaccccttttattgggtgtccccaggagtccttgtcctcctcgccgtactgccagtgctactactccagattaccgtcggattggtatttctgtgtctacagtatcgccttaggggaaagctgcgagctgaaatagaaaaccttcaccgtaccttcgagtccttcggtgtgctgggcccccaagtgaaggagccgaaaaagaccggccagttcctggaggaattgagaaacccattttag

SEQ ID NO: 125129 - DNA, 615 bp, synthetic construct
  misc_feature 1..615: note = Description of Artificial Sequence: Synthetic coding sequence
  source 1..615: mol_type = other DNA
agtttgtcgcgtccatcactgccctcctgtctctgcagctttctgctactgctgctgcttcaagtgtcttcctcctacgctgggcaatttcgcgtcattggcccacgacatccaatcagagctctcgtgggggatgaggtagaactgccctgccgcatatcacctgggaaaaatgctactgggatggaggtcggttggtaccgccctccctttagtagggtcgtccatctgtacagaaatggtaaggaccaggatggagatcaggcacccgagtaccgtggcagaactgaacttctgaaagacgccatcggggagggaaaggtgacactgcgcattagaaacgtgcgcttctccgatgaagggggattcacctgtttcttccgggaccactcttaccaagaggaggcagccatggaactgaaagtggaggaccctttctactgggtttccccaggagtgttggtcctgctggcagtcttaccagtcctgctgcttcaaataacggttggactcgtgttcctgtgcctccaataccgcctgcgcggaaaattgagagcggagatagagaacctccaccgtacatttgttttccaccttgaggctctgtctggctag

SEQ ID NO: 125130 - DNA, 675 bp, synthetic construct
  misc_feature 1..675: note = Description of Artificial Sequence: Synthetic coding sequence
  source 1..675: mol_type = other DNA
atggcaagtttatccagaccatccctgccatcttgcctatgcagtttcttactactgctcctgctgcaggtaagttcttcctacgcgggtcaattcagagtgatagggcctcgccatccaatccgggccctggtcggagacgaagtggagctcccgtgccgcattagcccagggaagaatgcaaccgggatggaagtgggctggtaccgaccccccttctccagggtagtgcacctttaccgcaatggaaaagatcaggacggtgatcaggccccagagtatagggggcgcaccgagctactgaaggatgctattggggagggaaaggtgactctgaggatcagaaacgttagattctcggatgagggaggctttacatgcttcttcagagaccacagttaccaggaggaagctgctatggagctaaaagtggaagatccgttttattgggtttccccaggagtgctcgtgctgttagctgtgctgcctgtccttctactgcagattaccgtcggtctcgtgttcctgtgcttacagtaccgcctacgcggcaagcttagggcggagatagagaacctgcacagaacgttcgaaagcttcggtgtgttaggtccgcaagtgaaggagcctaagaagacaggacagttcctcgaagagctgcggaaccccttttag

SEQ ID NO: 125131 - DNA, 759 bp, synthetic construct
  misc_feature 1..759: note = Description of Artificial Sequence: Synthetic coding sequence
  source 1..759: mol_type = other DNA
atggcaagcctatccaggcctagtctgcccagctgcctctgcagcttccttctgttactcctgcttcaggtttcttcgagctatgccggacagtttagggtgatcggtcctaggcaccctatcagagctctggttggcgatgaagtagaactaccatgcaggatctcaccgggaaagaacgcaacaggtatggaagtggggtggtacaggccaccgttctccagagtggtacacctgtatcgaaacgggaaggaccaggacggggaccaggcccccgaataccgtggtcggactgaactcttaaaagacgcgatcggtgaaggaaaggtgacactgcgaataaggaacgtgaggttttccgacgaaggaggcttcacatgtttttttagagaccactcataccaggaagaggcagccatggagttaaaggttgaagatccattctactgggtctctcctggtgtgctggtgctgctcgcggttctgcccgttctgctcctccagatcacagtggggctggtgttcttatgccttcagtacagacttcggggcaaactgagagcagagattgaaaacctacaccgaacgttcgaccctcacttcctacgggttccctgttggaaaattaccttgtttgtaatcgttccagttctggggccccttgtggccctgatcatctgttacaactggctgcacaggcgccttgccggccagtttcttgaggaacttctcttccatctggaggccctgagtggctag

SEQ ID NO: 125132 - DNA, 744 bp, synthetic construct
  misc_feature 1..744: note = Description of Artificial Sequence: Synthetic coding sequence
  source 1..744: mol_type = other DNA
atggccagcctctcccgcccatcgctcccttcttgcttgtgtagttttctcctgctgttattactccaggtgagctcaagttacgccgggcaattcagagtgattggaccccgacaccctatcagggcactcgtgggtgacgaggtcgaactaccttgcagaatttctcctgggaaaaacgcaacagggatggaagtcgggtggtatcgtcccccattctctcgagtggtccatctataccgcaatggaaaagaccaggatggcgatcaggcgcctgaataccgtgggaggacagaactactgaaggatgccatcggcgagggcaaagtcaccctcaggatccggaatgtgaggttcagcgatgaggggggctttacgtgtttcttccgcgaccattcctaccaggaggaagccgcgatggaactgaaggtggaggacccattttactgggtgagccctggggttctggtgctccttgcggtactgcctgttctcctcttgcaaattacagtgggcttagtgtttctgtgtttgcagtatcgcctccgtgggaagctgcgagcagaaatcgagaatttgcataggacatttgatccacacttcttgcgagtgccatgctggaagatcaccctattcgtcatcgtgcctgtgctcggcccactggtggcactgatcatatgttataactggctgcaccggaggctggccggtcagttcttggaggagctgcgcaatcccttttag

SEQ ID NO: 125133 - DNA, 615 bp, synthetic construct
  misc_feature 1..615: note = Description of Artificial Sequence: Synthetic coding sequence
  source 1..615: mol_type = other DNA
agcctaagcaggccatctcttccaagttgcctgtgctcattcctgctcctgcttctgctgcaggtatctagttcctacgccggtcagttccgcgtgatcggccctcgacaccccatcagggctctcgtcggggatgaagtggagcttccctgtaggatcagtcctggaaaaaatgccaccggaatggaggttggctggtatcggcctcctttcagtagggtggtgcacctgtaccgcaacggaaaagaccaggacggggatcaggctcctgagtaccgcggccgaacagaactccttaaagatgctatcggagagggcaaagtaaccctgcgaatacgcaacgttaggttcagtgatgagggcggcttcacctgcttttttagagaccattcttaccaggaagaggccgctatggagctgaaggtggaggaccctttttattgggttagccctggggtccttgtacttcttgctgtcctgccagtgctgctcctgcagatcacagtaggtctggtcttcctgtgccttcaataccgtctccgaggaaagctacgggctgaaattgagaatttacatcgaaccttcgtctttcacctggaagctctgagcggatag

SEQ ID NO: 125134 - DNA, 888 bp, synthetic construct
  misc_feature 1..888: note = Description of Artificial Sequence: Synthetic coding sequence
  source 1..888: mol_type = other DNA
atggccagcctcagtcgtcccagcttaccctcctgcttatgctccttcttgttgctgttgttgttgcaggtgagttcctcttacgccggtcagttccgcgtcattggaccaagacacccaatcagggcgcttgtgggcgacgaggttgagctgccttgtaggatttcccccggcaagaatgctacgggtatggaggttggctggtatcgtcctcctttttcccgcgtcgtgcacctctatcgaaacggcaaggatcaggatggggatcaggccccagaatatcgcggtcggacagagctccttaaagatgccattggcgaggggaaagtaactcttcgtataagaaacgtgaggtttagcgatgaaggcggctttacatgttttttccgcgaccacagttatcaggaggaagcagcgatggagttaaaggtggaggatccattttactgggtgtccccaggtgtgctggtcctcttggcagtgctgcccgtgctgcttcttcagataacagtgggccttgtgtttctttgtctccagtacagactgcgcgggaaactccgggctgaaatcgaaaacctgcataggacttttgatccccactttttaagggtgccctgctggaagataacactcttcgtcattgtacctgtgttggggcccctagtcgccctcatcatttgctataattggctgcatcgcagattagccggccagtttctggaggagctcagaaagttctcaagcttgtgctataaacaacgcatcaaatcgcaggaacgcgagacggaagctacacgcggccggggaggtctacttagggaccacatcccacgtggtaaggaggagctggaaagtctcggaggagggaagactccgcccgggcgctag

SEQ ID NO: 125135 - DNA, 759 bp, synthetic construct
  misc_feature 1..759: note = Description of Artificial Sequence: Synthetic coding sequence
  source 1..759: mol_type = other DNA
atggcctctctgtccaggccatcgttgccatcatgcctctgctccttcctcctgctactgctcctgcaggtctcctcgagctatgctgggcagttccgggttataggacctaggcatcccatcagagctcttgtcggcgacgaagtcgagcttccatgcagaatttcgcccggaaaaaacgccaccgggatggaagtgggttggtatcgcccgcccttctctcgggtggtgcacctgtaccggaatgggaaagatcaggacggcgaccaggctcccgagtatcgtgggcggacggaactgctcaaggatgccataggcgaaggaaaggtaactctgagaatccgcaatgttaggttcagtgacgagggggggttcacttgctttttccgcgaccattcataccaggaggaagccgcaatggagttgaaagtagaggaccctttttattgggtgagcccgggagtgctggtgctgttagccgtgctccctgtgcttctgctccagatcactttgggactcgtattcctttgtctgcagtaccggctgcgtggaaaactgcgagcagagattgaaaacctccatagaactttcgatccgcatttccttcgtgtcccttgttggaaaattaccttattcgtgatcgttccggtacttggccctctggtagctttaatcatctgttataattggttgcatcgccgcctggccgggcagttcctggaagaactgttgttccacctggaagctctttcaggctag

SEQ ID NO: 125136 - DNA, 540 bp, synthetic construct
  misc_feature 1..540: note = Description of Artificial Sequence: Synthetic coding sequence
  source 1..540: mol_type = other DNA
tgacagttccgcgttatcgggccccgccatccaattcgtgccctggtcggggatgaagtcgagcttccctgcaggatcagtccaggaaagaatgcaacagggatggaagtgggttggtacaggccccccttctcacgggtggtccacctgtaccgtaatggtaaagaccaggacggcgatcaggcccccgaatacaggggccgcacagaactgcttaaagacgctatcggagagggaaaagtgacattaaggataagaaatgtgcggtttagcgacgagggcggcttcacatgtttctttcgagaccatagttatcaagaggaggcagcaatggagctgaaggtggaggatcccttttattgggtgtcccccggggttcttgtgttgttggccgtcttgccagtgctgcttttgcagattactgtaggactggtttttctgtgcctgcagtacagactccgaggtaagctccgcgccgagatcgaaaacctacatcgcacttttggtcaattcctggaagagctgagaaacccgttctag

SEQ ID NO: 125137 - DNA, 396 bp, synthetic construct
  misc_feature 1..396: note = Description of Artificial Sequence: Synthetic coding sequence
  source 1..396: mol_type = other DNA
atggccagcctgagccgaccaagtttgccatcctgtttgtgttcattcctgctgctcctgctcttgcaggtctcgagttcatacgccgatcccttttattgggtctcccccggagtgctggttctgcttgcagtgctgccagtcctgcttttgcagatcaccgtaggccttgtatttctatgcctgcagtacaggctgcgcggtaagcttcgcgcagagatcgagaacctgcaccgcacttttgatccccatttcctgagagtgccctgttggaagatcacactgtttgtaatagtccccgtgctcggcccactcgttgcccttattatctgctataattggctgcacagacgcctggcaggtcagttcttggaagagttacgcaatcccttttag

SEQ ID NO: 125138 - DNA, 744 bp, synthetic construct
  misc_feature 1..744: note = Description of Artificial Sequence: Synthetic coding sequence
  source 1..744: mol_type = other DNA
atggcaagcctgtcacgccctagcctcccttcgtgtctgtgctctttcctgcttctgctgctgttgcaggtcagctcgtcttatgccggccaattccgggttattggaccccgtcatccaatcagggccctcgtaggcgatgaggtggaactcccctgcagaatttcacctggcaaaaacgctaccgggatggaggtggggtggtataggccccctttctcaagggtcgttcacctctatagaaatggcaaggaccaggacggtgatcaggcaccagagtatagaggccggaccgagttactgaaggacgccattggcgagggaaaagttaccttgcggattcggaacgttcgcttctcagacgaggggggtttcacatgcttcttccgtgaccactcttatcaggaggaagctgctatggaactgaaggtcgaggatccgttttactgggtaagtccgggcgtgctggtgttgctggcggtcctgcccgtgctgctactgcagattacccttggtctggtgttcttatgtcttcagtaccgcctgcgtgggaagctacgcgctgagatcgagaacctgcatcgaacttttgaccctcattttctcagagtgccatgctggaagataacattattcgttatcgtacctgtgctgggcccattagtagccctgataatttgttataattggctccacagaagattagccggtcaattcctggaagagctgcgaaacccgttctag

SEQ ID NO: 125139 - DNA, 642 bp, synthetic construct
  misc_feature 1..642: note = Description of Artificial Sequence: Synthetic coding sequence
  source 1..642: mol_type = other DNA
atggcatccctgtcacgtccaagtttgccctcttgcctgtgttccttcctgcttttactgctactccaggtgtcttccagctatgccggacagtttcgggtaatagggcctcgtcatcccatccgcgccctcgtgggtgacgaagtagagctgccgtgccgtatttcgcccggaaagaacgctaccggcatggaggtggggtggtaccgccctccattcagccgggtggtacatttatatcgaaacggcaaagatcaggacggagaccaagctccagagtaccgagggcggactgagctacttaaggatgccatcggggagggaaaagtgacactccggatccggaacgtgcgtttttccgacgaggggggattcacatgcttctttcgggatcatagctatcaggaagaggcagcgatggagctgaaagtggaagaccctttctattgggtgtctcccggagtcttagtcttgctggcagtgctgcctgtgctgctcctgcagatcaccctcggactggtgttcttgtgtctgcagtatcgtctgcgcggcaaactcagggcagaaattgaaaatctccaccggacatttgggcagtttttggaagagctgctgttccatttggaagcactgtcaggctag

SEQ ID NO: 125140 - DNA, 615 bp, synthetic construct
  misc_feature 1..615: note = Description of Artificial Sequence: Synthetic coding sequence
  source 1..615: mol_type = other DNA
tcactgtctaggccatctcttcccagctgtctttgtagcttcctgctgctacttcttctgcaagtgtcttcaagttatgccggccagtttcgtgttataggccctcgccacccaatacgagcgttggtaggggatgaggtcgaactcccatgcagaatttcccccggaaaaaacgcaacggggatggaagtcggctggtaccgaccgcctttttcaagagtggtgcacctgtaccggaacggcaaagatcaggacggcgatcaggctcctgagtatagggggcggaccgagctgctgaaagatgctatcggtgaggggaaggtgacacttcgcatcaggaatgttagattctcggacgagggcggatttacctgcttcttccgggatcatagctaccaggaggaggccgccatggagctcaaggtggaagacccattctactgggtgagcccaggagtgctggtgctccttgccgtgcttccagtgctcctgctccaaattacagtggggttggtttttctttgtctgcagtatcgattgcgtggtaagctgcgggcagagatcgaaaaccttcaccggactttcgtgtttcatctggaggccttaagcggttag

SEQ ID NO: 125141 - DNA, 690 bp, synthetic construct
  misc_feature 1..690: note = Description of Artificial Sequence: Synthetic coding sequence
  source 1..690: mol_type = other DNA
atggcgtctctgagccggccatcacttccctcgtgcctgtgctctttcctgctgctgctgctgctccaggtgtcgtcatcctacgccgggcaattcagagttatcggaccccgacatccaatcagggcacttgtgggggatgaagtggaactcccttgcagaatttcgcccggcaagaacgctacaggcatggaggtagggtggtaccgtccacccttttctcgggtagtgcacctctatcgcaatggtaaggaccaggacggagaccaggcccccgagtaccgggggagaacagagcttcttaaggacgccataggggaggggaaggttaccctgcggattcgcaacgtacgattctccgacgagggcggttttacttgcttcttccgcgaccactcttaccaagaggaagccgctatggaacttaaagtggaggatccattctattgggtctcgcctggtgtgctagtgctcctggcagtcctgcccgttctcctacttcagataaccgtgggcctagttttcctgtgcctgcagtacaggctccggggcaagttacgcgccgaaatcgagaacttgcacagaacattcgagtcctttggggtgctcgggccccaggtgaaggagcctaagaagacaggccaatttctcgaggagctgttattccacctggaggctctgagtgggtag

SEQ ID NO: 125142 - DNA, 615 bp, synthetic construct
  misc_feature 1..615: note = Description of Artificial Sequence: Synthetic coding sequence
  source 1..615: mol_type = other DNA
tctctgtctaggccttccctcccttcctgtctctgctcatttctgctgctcctcctcctgcaggtctcatccagctacgccggccagttcagggtgatcggaccaagacatcctattcgcgcacttgttggagatgaggttgaactcccctgcaggattagtccgggaaaaaatgcaaccggaatggaggtggggtggtatcgcccacctttttctagagtggtgcacctgtatagaaatggaaaggaccaggatggggaccaggcccctgagtacagaggaagaactgagctgctgaaggacgcaatcggagaagggaaggtgaccttgaggatacgaaatgtgagattctcagacgaaggtggcttcacttgttttttccgggaccactcttaccaggaagaggcagctatggaactgaaagtcgaagacccattttattgggtttcccccggggttcttgtgcttctggccgttctccccgtcctccttctccagattaccgtgggccttgtgtttctgtgtcttcagtaccgtctccggggcaagttaagagccgaaatcgagaacctccatcggacttttgttttccatctcgaggccctttcaggatag

SEQ ID NO: 125143 - DNA, 690 bp, synthetic construct
  misc_feature 1..690: note = Description of Artificial Sequence: Synthetic coding sequence
  source 1..690: mol_type = other DNA
atggcgtcactctctcgcccatctctcccctcgtgtctgtgctcctttctcctgctgcttcttctacaggttagctcctcctatgcgggtcaattccgggtcattggaccaaggcatccaattcgtgctttggtgggagacgaggtggagctgccctgtaggatctctcccggcaaaaacgcaactggcatggaggttggctggtatcgtccacctttttcgcgagtcgtgcatttgtatcggaatggcaaggaccaggatggagaccaggccccagagtaccgcgggcggactgaactgctgaaggacgcaataggggaggggaaggtgactctgcgcatacgtaacgtgcggttctcagacgaaggcggattcacgtgtttcttccgtgaccattcttatcaagaggaagcagctatggagttaaaagtcgaagacccattctactgggtttctccaggcgtgcttgtactgctagccgtgctacccgtgctgcttctgcagataactctaggtctagtgtttctgtgtctccagtaccgcctgcgagggaagctccgagcagaaattgagaaccttcacaggaccttcgaatcatttggtgttctcggtcctcaggtgaaggaaccgaagaagactggacagttcctcgaagaactgctatttcacttggaagctctctccgggtag

SEQ ID NO: 125144 - DNA, 690 bp, synthetic construct
  misc_feature 1..690: note = Description of Artificial Sequence: Synthetic coding sequence
  source 1..690: mol_type = other DNA
atggcttccttgagccgaccctcactgccatcttgcctgtgctctttcctcctgctgctgctcctgcaggtgagcagctcctatgcggggcaatttcgggtgatcggtccacgtcacccaattagggcattagtgggggacgaggtagaactcccctgtagaatctcgcctgggaagaacgcaacaggcatggaggtgggatggtaccggccccctttcagccgcgtggtccatctgtataggaatggcaaagaccaagatggagatcaagctccggagtacaggggccggaccgagctcctcaaggatgcaatcggcgaggggaaagttaccctgcgtatacgcaacgttagatttagtgatgagggggggttcacctgttttttccgggatcactcttaccaagaggaagcagccatggaattaaaagtggaggaccccttttattgggtgtcacccggcgtcttggtgttgttggcagtgctgcccgtcttactgctgcagatcacagtcggactgatcttcctttgccttcagtaccgcctgagaggtaagctgagagccgaaatcgaaaacctgcatagaaccttcgagtcttttggtgtcctgggtccacaggtcaaggagccaaaaaagacaggccagtttttggaagaattgctctttcacttggaggcactcagcgggtag

SEQ ID NO: 125145 - DNA, 516 bp, synthetic construct
  misc_feature 1..516: note = Description of Artificial Sequence: Synthetic coding sequence
  source 1..516: mol_type = other DNA
atggcttcactcagcaggccttcactgccctcatgtctttgcagcttcctgctgttgctgctgctacaggtgtcatcgagctacgctggtcagttccgcgtcatcggaccccgccaccctatccgcgccctcgtcggtgacgaggtcgagctgccttgccgcatttctcctggaaaaaacgccacgggcatggaggttgggtggtacaggcccccgttttcaagagtggtgcatctttaccgtaacggtaaagaccaggacggtgatcaggcacccgagtacaggggtcgcacggagcttcttaaggacgcaatcggagaagggaaggtcactctgcggattaggaatgtaaggttcagcgatgagggcggctttacttgtttcttccgcgaccactcatatcaggaagaagcggctatggaactcaaagtggaagtctcccatagtgtaacccaggattggcttcagtggcacgatcacggatctctgcaacctcctcctccacgcctcaagtag

SEQ ID NO: 125146 - DNA, 534 bp, synthetic construct
  misc_feature 1..534: note = Description of Artificial Sequence: Synthetic coding sequence
  source 1..534: mol_type = other DNA
atgtctcatatctcctgggaagagaggtatagaaacggcaaagaccaggatggcgatcaagcaccggagtaccgtggacgaacagagctccttaaggacgccatcggcgagggtaaagtgacacttcggattcgcaacgttagattctccgacgaaggcggttttacctgtttttttcgcgaccactcttatcaggaagaggccgccatggagttaaaggtggaggacccattttattgggtgtcacctggagtcctggtacttctggccgtgttaccggtgttactcctgcagataacagtcggcctggtctttctctgcctccagtatagactaagaggtaagctccgtgctgagatagaaaatttacaccgcacattcgatccccacttcctgagggtaccttgctggaaaatcactctgtttgttattgtacccgttctcggcccgctggtggcattgattatctgttacaattggctgcaccggagactggccggccagtttttagaggaattacgtaaccctttttag

SEQ ID NO: 125147 - DNA, 174 bp, synthetic construct
  misc_feature 1..174: note = Description of Artificial Sequence: Synthetic coding sequence
  source 1..174: mol_type = other DNA
atggcgtccttaagccggccaagtctgcctagctgcctatgtagcttcctactgctgctcctgctgcaggtgagctcctcatacgcgggcctggtggcagtggcgagatcctggctcattgccgcatccacatcacaagctcaggtcatactcctcacgcagcctttggagtag

SEQ ID NO: 125148 - DNA, 627 bp, synthetic construct
  misc_feature 1..627: note = Description of Artificial Sequence: Synthetic coding sequence
  source 1..627: mol_type = other DNA
atggcctctctgagcagaccatcgctgccttcctgtctgtgcagcttcctgctgctattactgttgcaagtctccagtagttacgctggccagttcagagtgattggcccccggcacccaatccgcgctcttgtaggggacgaggtggaattaccatgccgaatctccccagggaaaaatgctaccggcatggaggtcgggtggtaccgacctccctttagtagagtggtccatctttaccggaacggtaaggaccaggatggtgatcaggcacctgaatatagaggcagaaccgagctgctgaaggatgcgatcggagaagggaaggtcacgttaagaataaggaatgtgaggttttcagacgagggagggttcacctgcttcttccgcgaccatagctatcaggaggaggctgccatggaattgaaggtagaggacccgttttactgggtctcccccggcgtccttgtactgctggctgtgcttcctgtgctcttgctgcaaattacagtggggctcgtgtttttatgccttcagtacagactgcgtggaaaactgagagccgaaatcgagaacctccaccgcactttcggacagtttctcgaggaactgcggaatccattctag

SEQ ID NO: 125149 - DNA, 516 bp, synthetic construct
  misc_feature 1..516: note = Description of Artificial Sequence: Synthetic coding sequence
  source 1..516: mol_type = other DNA
atggcatcactgtcgaggccgtccttgccgagctgtctgtgctcattcctcctcctgttgctgctgcaggtgagtagtagttacgctggccaattcagggtgatcggtccccggcatcccattagggctttggtgggcgacgaagtggaactgccctgtcgcatcagtccgggaaagaatgccacagggatggaagtgggttggtatcggccaccatttagtcgggtggtccacctttaccgcaatggaaaagaccaagacggcgatcaggccccagagtatagaggcaggacagaactcctgaaggacgcgattggagagggcaaggtgaccctacgcatcaggaatgtgcggtttagtgatgaaggcggcttcacctgcttcttcagagaccactcctatcaggaggaggcggctatggagctgaaggtggaggtatctcacagcgtgacccaggattggctgcagtggcacgatcacggctcgttgcagccgccccccccccggctgaaatag

SEQ ID NO: 125150 - DNA, 516 bp, synthetic construct
  misc_feature 1..516: note = Description of Artificial Sequence: Synthetic coding sequence
  source 1..516: mol_type = other DNA
atggctagcctatcccgcccaagtctgccgagttgtctctgcagtttcctcttactgctgctgctccaggtaagctcctcttatgccgggcagtttagagttattgggccacgccaccccattcgggccctagtgggggacgaggtggaactgccgtgtcggatatctcccggaaagaatgcaacaggcatggaagtagggtggtaccgccctccgttcagcagggtcgtccacttataccggaatggcaaagatcaagatggggaccaggctccagagtacagagggcgcaccgagctgctcaaggatgcaattggtgaaggcaaggtgacccttaggatccgcaatgttcgattttctgacgaaggaggtttcacttgctttttcagagatcattcctatcaggaagaggctgctatggagctgaaagttgaggtgagccatagtgtcactcaggactggctccagtggcacgaccatggttcactgcagcctccacccccacgcctgaaatag

SEQ ID NO: 125151 - DNA, 621 bp, synthetic construct
  misc_feature 1..621: note = Description of Artificial Sequence: Synthetic coding sequence
  source 1..621: mol_type = other DNA
atggcctcactgtctaggcccagcttgccatcatgcctttgctcttttctgctgttattgctgttgcaagtgtcctcgagttatgcaggccaatttagagtcatagggccacggcatcccatcagagccctggtgggcgacgaagtagagctaccatgccgtattagtcccggaaaaaatgccaccggcatggaagtgggctggtaccgaccccccttctcacgagtggtccatctttacagaaacggcaaggaccaggatggggatcaagctccagagtaccgggggaggacagagctgctcaaggatgctatcggcgaagggaaggtgaccttaaggataaggaacgtccgtttttccgatgagggcggctttacctgcttctttcgtgatcacagttatcaggaggaagctgctatggaattgaaggtcgaggatcccttctattgggtgtcacctggagtgctcgtgctactggccgtcttgccagtgcttctcttacagattaccgttggtcttgttttcctgtgtctgcagtatcgactgagggggaagctgagggcagagatcgagaatctacacagaacctttgtgtttcacctcgaggccctatctggctag

SEQ ID NO: 125152 - DNA, 627 bp, synthetic construct
  misc_feature 1..627: note = Description of Artificial Sequence: Synthetic coding sequence
  source 1..627: mol_type = other DNA
atggcttcactcagcaggccctcacttccaagttgcttgtgctctttccttctgctgctactcttgcaggtgtcgtcatcctacgcaggacagtttcgtgtaatcggccccaggcacccgatcagggccctggtaggagatgaggttgagctcccatgcaggatttcacctggtaaaaacgctacgggcatggaggtcggttggtatcggccacccttctcaagggtggtgcatctgtaccgaaacgggaaggaccaggacggcgaccaagcacccgaataccgcgggcgtactgagctactcaaagacgccattggggaaggcaaagtcacgctacgcattcgtaacgtgaggtttagtgatgagggcgggttcacctgtttcttcagggatcatagttaccaggaagaagccgccatggaactgaaggtcgaagatccattctactgggtaagtcctggcgtactggtgctgttggccgtactgccagtgttgctgctccaaatcaccgttggactggtgttcctctgccttcagtataggctgcgtggcaagctgagagccgagatcgagaatctgcaccggacattcggacaattcctcgaggagctgagaaatcctttttag

SEQ ID NO: 125153 - DNA, 621 bp, synthetic construct
  misc_feature 1..621: note = Description of Artificial Sequence: Synthetic coding sequence
  source 1..621: mol_type = other DNA
atggcatctctctcccgcccctcgctaccctcctgcctctgctcatttctgttgctgctattactccaagtatcaagttcctatgccggacagtttcgtgtgatcggcccaagacatcctatacgcgcgcttgtcggggacgaagtagaactgccatgtcgtatatcacccgggaagaatgccaccggcatggaggtgggctggtatcgcccaccattttcaagagtggtgcatttatatcgaaacggcaaggaccaggatggcgatcaggctcccgaatatcgcggtagaacagagctgcttaaggacgctatcggggaagggaaagtgaccctccggatcaggaacgtgaggtttagcgacgagggtggcttcacttgttttttccgagatcacagctaccaagaggaagccgccatggagttgaaggtcgaggaccctttttattgggtttctcctggggtgctggttctgctggctgtgcttcccgtccttctccttcagatcacagtaggcctcgtttttttgtgccttcagtacagattacggggtaagctccgggcagaaatagagaacctccaccgtacctttgtgtttcatctagaagccctttccggatag

SEQ ID NO: 125154 - DNA, 534 bp, synthetic construct
  misc_feature 1..534: note = Description of Artificial Sequence: Synthetic coding sequence
  source 1..534: mol_type = other DNA
atgagccatatttcttgggaagagaggtaccgaaatggtaaagatcaggatggtgaccaggcacctgagtacaggggacgaacagagctgcttaaggacgcaatcggcgaggggaaggtgaccttgaggataaggaacgtgcgattctcagatgaaggaggctttacatgtttctttcgcgaccactcataccaagaggaagccgccatggagctgaaagtcgaggacccgttttattgggtgtcacccggcgtgctcgtcctgcttgccgtgctgcctgtgcttcttctgcaaattacagtgggactagtcttcctgtgcctgcagtacagacttagggggaagctacgagctgagatcgaaaatttgcatcgcacctttgaccctcacttcttgcgcgtcccctgttggaagattaccctgttcgtgatcgtaccggtgttaggcccacttgtagccttaataatttgctacaattggttgcataggaggctcgcgggacagttcctcgaggaactaaggaacccattctag

SEQ ID NO: 125155 - DNA, 621 bp, synthetic construct
  misc_feature 1..621: note = Description of Artificial Sequence: Synthetic coding sequence
  source 1..621: mol_type = other DNA
atggcttccctgtctcgcccaagcctcccgagttgtctctgtagcttcctgctgctgctgttgctgcaggtgtcgagtagctatgctggtcagttcagagtgataggcccccgccatcccatcagagcattagtcggcgacgaggtagagcttccttgtagaatcagccctggaaaaaacgcaactggtatggaggttggctggtaccgcccccccttctcccgggttgtacatctgtaccgtaacggcaaggaccaggatggagatcaggctcctgagtatcgaggaagaacagagcttttgaaggacgccatcggagaggggaaagtcaccttgcgtattcgcaacgtccgcttctcagatgaaggtggttttacctgttttttccgggaccattcttatcaggaagaggccgccatggagctaaaggtcgaggacccattttactgggtctcccctggagttctggttctgctagctgtgcttccggtgcttcttctccagatcactgtggggcttgtatttctgtgtctccaataccgcctgcgggggaaattacgtgctgagattgaaaaccttcatcgcacctttgtgttccatttagaggccctgtccggatag

SEQ ID NO: 125156 - DNA, 621 bp, synthetic construct
  misc_feature 1..621: note = Description of Artificial Sequence: Synthetic coding sequence
  source 1..621: mol_type = other DNA
atggcctcgctcagtcggccctcactccccagttgcctgtgctctttcctgttgctactgcttctccaggtaagctcaagctacgcagggcaatttcgggtcataggtcctagacaccctatccgagccctcgtcggtgacgaggtggagttgccttgccgcatcagccccggcaaaaacgctaccggaatggaagtagggtggtatcggccaccgttttcccgagtggtccatctctatagaaatggaaaagaccaggatggtgaccaagctccagagtacagagggcggaccgaactgctcaaggacgcgattggcgaaggtaaggtgaccctgaggatacggaacgttaggttcagcgacgaaggcggcttcacatgcttcttccgagaccacagctatcaagaagaagcagcaatggagttgaaggtagaggatccgttttactgggtgtctcctggcgtgctcgtgcttctggcagttctgcccgtgctcctgcttcaaatcacggtgggactggtatttctgtgcctgcagtatcgcctgcggggcaaactgagagccgagattgagaacttgcacagaacattcgtatttcacctggaagcactgagcggttag

SEQ ID NO: 125157 - DNA, 534 bp, synthetic construct
  misc_feature 1..534: note = Description of Artificial Sequence: Synthetic coding sequence
  source 1..534: mol_type = other DNA
atgagtcacataagctgggaagaaagatataggaatggcaaggatcaggacggtgaccaggctcctgagtacaggggtaggacagaactgctaaaagacgccattggcgaaggaaaggtcaccttacgtatccgcaacgtgaggttcagtgatgaaggagggttcacctgtttcttcagagaccattcctatcaggaagaggctgccatggagttaaaagtggaggatccattttactgggtctctcccggagtgctcgtcctgctagcagtgcttcccgtgcttcttctgcagattaccgttggccttgtcttcttgtgcctgcagtacagactgcgtgggaaacttcgagctgaaatcgagaatctgcaccgaaccttcgacccacactttctgcgagtgccttgttggaagatcactttatttgtcatagtccccgtactgggacccctggtcgctctgatcatttgctataactggctgcacagaagattagctggacagttcctcgaggaactgaggaacccattttag

SEQ ID NO: 125158 - DNA, 621 bp, synthetic construct
  misc_feature 1..621: note = Description of Artificial Sequence: Synthetic coding sequence
  source 1..621: mol_type = other DNA
atggcttctttatccaggccatccttgcctagttgtctgtgttccttcctcttactcctgctcctgcaagtaagttctagctatgccgggcaatttagggtgataggccctcgtcacccgatccgcgccctggtcggtgatgaagtcgagttgccttgcagaatatctcctggcaaaaatgcaactggaatggaagtcggatggtaccgccccccattttcaagggtggtacacctgtaccgcaatggcaaggaccaggatggcgaccaggccccggaataccgtggtagaacagaattgctaaaggacgccataggggaaggcaaggtaacactgcggatacggaatgtgagattttctgatgaggggggtttcacgtgctttttccgtgaccactcttatcaagaagaagctgctatggaactgaaggtcgaagatcccttctactgggtgtcacctggcgttctggtgctactggcagtgttgcccgtgcttctgctgcagatcacagtcggcctcgtgtttctttgtcttcagtacagactgcggggaaagctgcgggctgaaattgaaaatttgcacagaacattcgtgtttcacctggaggcactcagcggctag

SEQ ID NO: 125159 - DNA, 174 bp, synthetic construct
  misc_feature 1..174: note = Description of Artificial Sequence: Synthetic coding sequence
  source 1..174: mol_type = other DNA
atggcctcgctatcgaggcctagcctgccaagctgtctctgctctttcttgcttttgctgttactacaggtctcttccagttacgccgggctggttgctgtggcccgttcttggttgatcgctgccagtacctctcaggctcaggtgatccttctgacacaaccactcgaatag

SEQ ID NO: 125160 - DNA, 621 bp, synthetic construct
  misc_feature 1..621: note = Description of Artificial Sequence: Synthetic coding sequence
  source 1..621: mol_type = other DNA
atggcttccctgagcaggccttcccttccatcttgtctgtgctcattcctccttctgctgttgctgcaggtgtccagcagttatgcaggccaattcagagtaattggcccgagacatcctatccgggccctggtaggcgatgaggtagagctgccctgtaggatcagcccaggcaagaacgccactggaatggaagtcggatggtaccgtcccccgttttcaagggttgtgcacctgtatcgaaatggaaaggatcaggacggagaccaggctccagaatatagaggcaggaccgagctcctgaaagacgccataggcgaaggaaaagtcacattgaggatcagaaacgtgaggttttctgacgagggcggatttacttgctttttcagagatcacagttaccaggaggaagccgctatggagctgaaagtcgaagaccccttttactgggtgagtccgggcgtcctggtgctgctcgcagttcttccagttttactgctgcagatcactgttggattagtgtttctgtgcctccaatatagactgagagggaagctgcgagctgagatcgaaaacctgcataggaccttcgtgttccatctggaagcattgtccggatag

SEQ ID NO: 125161 - DNA, 516 bp, synthetic construct
  misc_feature 1..516: note = Description of Artificial Sequence: Synthetic coding sequence
  source 1..516: mol_type = other DNA
atggctagcttgtcccggccgtccctcccgtcctgcctgtgcagctttcttcttttactactgctgcaggtttccagttcgtacgctggccagttccgcgttattggcccgcggcacccaatccgagcactggtgggcgacgaggtagagctcccatgtaggatcagtcccggcaaaaacgccactgggatggaagtcggctggtatcggccacccttttcacgggtggtgcatttatataggaatggcaaagaccaggacggtgatcaggctcccgagtacaggggccggacagagcttcttaaggacgcaattggagagggcaaagttacactgaggataagaaacgtgcgcttttccgatgagggcgggtttacctgtttttttagagaccactcctaccaggaggaagcagctatggagctcaaggtggaggtgtcacactccgtcacacaagactggctgcagtggcacgatcacgggtctctgcagccaccccctcctcgtctgaaatag

SEQ ID NO: 125162 - DNA, 621 bp, synthetic construct
  misc_feature 1..621: note = Description of Artificial Sequence: Synthetic coding sequence
  source 1..621: mol_type = other DNA
atggcttctcttagtagacccagtctgccatcatgcttgtgtagcttcctattactgttgttgttgcaggtatccagcagctacgccggacaattccgggtgattggacctaggcacccaataagggcccttgtaggagatgaggtcgaacttccctgccggatctctcccgggaagaacgccaccggcatggaggttggctggtataggccaccattcagtcgcgttgtgcatctgtatcgaaacggcaaagatcaggatggcgaccaagccccggagtatcgaggccggacagaacttctgaaggatgcaataggcgagggtaaggtcaccctgcgcattagaaacgtgcggttttctgacgaaggcggattcacctgcttttttcgcgatcattcataccaggaggaggccgctatggaacttaaagtcgaggacccgttctactgggtgagccccggcgtgctagttctgcttgcagtcctgccagtcctcctgctccagattacccttggactcgtcttcttgtgccttcagtatcgtctcaggggcaagctgcgtgccgagatcgagaacctacacagaacatttgtatttcatttagaggccctgagcggatag

SEQ ID NO: 125163 - DNA, 516 bp, synthetic construct
  misc_feature 1..516: note = Description of Artificial Sequence: Synthetic coding sequence
  source 1..516: mol_type = other DNA
atggcttccctttcccggccttcattaccctcttgcctgtgttcctttttgctcctacttctactgcaggtgagctcctcctatgccggccagttccgcgttatcgggcctcgacacccaattagagccctagttggcgacgaggtggaactgccgtgtcggattagtccaggcaaaaatgccacgggaatggaggtgggctggtacaggccgcccttttctcgggtggtgcatctgtaccgcaacggtaaggaccaggacggggaccaggccccagaatacagaggtcggaccgagctgttgaaagatgcaatcggtgagggaaaggtgacactgcgaatcagaaatgtccgcttctctgatgagggcggatttacttgtttttttcgagatcattcgtaccaggaagaggcggcaatggagcttaaagtggaggtgagtcacagtgtgactcaggattggttgcagtggcacgaccacggatccctgcaaccacctccgccacgccttaaatag

SEQ ID NO: 125164 - DNA, 516 bp, synthetic construct
  misc_feature 1..516: note = Description of Artificial Sequence: Synthetic coding sequence
  source 1..516: mol_type = other DNA
atggccagccttagtaggccttcccttcctagttgcctgtgttccttcctgctgctactgctgctgcaggtcagtagctcatatgcgggccagtttcgtgtgataggcccaagacaccccatccgggcgctcgtgggagatgaagtggagctgccctgtagaatttcacccggcaaaaatgccacgggaatggaggtgggctggtaccggcccccattcagccgtgtggtgcacttgtataggaatgggaaggatcaggatggggatcaggcccccgagtatcgcgggagaacagagcttctcaaggacgcgattggtgagggtaaagtgactctcagaatacgtaacgtcagattctctgatgagggcggcttcacatgtttctttagggaccactcttaccaagaggaggccgcgatggagcttaaggtagaggtttctcatagcgtgacccaggattggctccagtggcacgatcacggtagcctgcagcctccaccaccgcgtctgaagtag

SEQ ID NO: 125165 - DNA, 627 bp, synthetic construct
  misc_feature 1..627: note = Description of Artificial Sequence: Synthetic coding sequence
  source 1..627: mol_type = other DNA
atggccagtctgtctcgcccatctttgccttcctgcctctgttcctttctcctgcttttattacttcaagtgtcatcaagttatgcaggccagttccgcgtgatcggccccagacatcccattagggccctggtcggcgatgaagtagagctgccgtgccgcatttctcccgggaaaaacgccactggcatggaggtggggtggtatcgtccgccgttcagccgtgtcgtgcacctgtaccgcaacgggaaagaccaggatggcgatcaggcacccgagtacagggggcggacagagctgctcaaagacgctatcggtgaagggaaggtgactcttcggatacgcaatgtgaggttcagcgacgaggggggctttacctgtttctttcgagaccactcttaccaggaagaggccgctatggaattaaaggtggaagacccattttattgggttagccctggcgttctggtgttgttggctgttcttcctgtcttgctgctgcagatcactgttgggctggtttttctttgcctccagtatagactgagggggaagcttagagccgaaattgagaatttgcatagaacttttgggcagttcctggaagagcttcggaaccctttctag

SEQ ID NO: 125166 - DNA, 174 bp, synthetic construct
  misc_feature 1..174: note = Description of Artificial Sequence: Synthetic coding sequence
  source 1..174: mol_type = other DNA
atggcctcactgtcacgcccatctcttccctcctgcctctgttcttttcttctgttactgctgcttcaggtatctagctcctatgcgggccttgtggccgtggcgaggagttggctgattgctgcctctactagccaggctcaggtgattctactcacacagccactcgaatag

SEQ ID NO: 125167 - DNA, 627 bp, synthetic construct
  misc_feature 1..627: note = Description of Artificial Sequence: Synthetic coding sequence
  source 1..627: mol_type = other DNA
atggcttccttatcacggccgtccctgcctagctgcttgtgtagcttcctacttcttctgcttctgcaggtcagctcctcctatgctgggcagtttcgggtaatcggaccaagacatccaatccgagctctagtgggtgacgaggttgagttaccctgccgcatttctcccggcaagaacgctactggcatggaagtgggctggtatcggccccccttttcaagagttgtgcacctgtatcgaaacggaaaggatcaagacggagaccaggcgcctgagtatcgaggccggactgagcttcttaaagatgctatcggtgagggcaaggttacactcagaattaggaacgttcggttttccgatgaagggggatttacctgcttttttagagaccatagttatcaggaggaagcagctatggagttgaaagtcgaagatcccttctactgggtgtcacctggagtactggtcttactcgctgttctccccgtgctgctgctgcagatcactgttggtctggttttcctgtgtctgcaataccggttgaggggaaagctgcgggccgaaatcgagaacctgcaccgcacatttggacaattcctcgaggaacttaggaatcctttctag

SEQ ID NO: 125168 - DNA, 174 bp, synthetic construct
  misc_feature 1..174: note = Description of Artificial Sequence: Synthetic coding sequence
  source 1..174: mol_type = other DNA
atggcttctctgagtcgaccatcactgccctcttgcctttgtagcttcctgctgcttctgctccttcaggtgtcatccagctacgctggactcgtcgcagtggccagatcatggctgatagcggcaagcacctcccaggcccaagtaattctattgacccagcctctggaatag

SEQ ID NO: 125169 - DNA, 534 bp, synthetic construct
  misc_feature 1..534: note = Description of Artificial Sequence: Synthetic coding sequence
  source 1..534: mol_type = other DNA
atgtctcacattagttgggaagagaggtatcgcaacggcaaagaccaggacggcgatcaggcaccagagtacagggggcgcaccgagcttctgaaggatgccataggagagggcaaggtgacgctgagaattaggaacgtgcgcttttccgacgaaggtggcttcacttgcttctttcgggaccacagctatcaggaggaagccgccatggaacttaaggtggaggaccccttttactgggtatccccaggcgtgcttgtcctcctcgcggtgctgcccgtgctgcttttgcagattacagtcggcttagtgtttctttgccttcagtatagacttcggggaaagttgcgggcggagattgagaacttacatcggacttttgatccgcactttctaagggtgccgtgctggaagattaccctgttcgtgatcgtgccagtactcgggcccctggttgcactcataatctgctacaactggcttcacagacgtttagcgggccaattcctagaagagctgcgaaatcccttttag

SEQ ID NO: 125170 - DNA, 516 bp, synthetic construct
  misc_feature 1..516: note = Description of Artificial Sequence: Synthetic coding sequence
  source 1..516: mol_type = other DNA
atggcaagtctctcacgcccatccctgcctagctgcttatgtagttttctgttactgctgcttcttcaggtctcgtccagttatgctggacagtttagagtgatcggcccaaggcatcccatccgcgccctggtgggcgacgaggtggagctgccctgccgtatttctccaggcaagaatgcgacaggcatggaggtgggatggtatcgaccgcccttttccagagtggttcacttatacagaaatggtaaggatcaggacggagatcaggcacccgagtaccgaggccggactgaactgttgaaggacgccatcggtgaggggaaggtcaccttgaggattcggaatgtccggttcagtgatgaggggggtttcacgtgtttctttagggaccacagctatcaggaagaagccgccatggagctcaaagtcgaggtcagtcattctgtgacccaggattggttgcagtggcatgatcatggctctctccaaccgccgccccccagactcaagtag

SEQ ID NO: 125171 - DNA, 534 bp, synthetic construct
  misc_feature 1..534: note = Description of Artificial Sequence: Synthetic coding sequence
  source 1..534: mol_type = other DNA
atgagtcatatctcttgggaagaacgttaccggaatggtaaggaccaggatggcgatcaggcaccagagtataggggtaggacggagcttttgaaagacgcgatcggagaaggcaaggtcactctcagaattcggaatgtgcggttcagtgacgaaggaggattcacctgctttttccgcgatcattcataccaggaggaagccgccatggagctgaaagtcgaagacccattctattgggtgtccccgggcgtgctggtgcttctggccgtcctacccgttctgctgcttcagatcacactcggattagtgttcctttgcttgcagtatcggctgcgaggcaaactcagggccgagattgaaaatctgcatcgaactttcgacccccactttctccgcgtgccatgttggaaaattactcttttcgtcattgtccccgtgctcggacccctggtcgccttgatcatatgttataattggctacataggaggctagctggccaattcctggaggagcttaggaatcctttctag

SEQ ID NO: 125172 - DNA, 627 bp, synthetic construct
  misc_feature 1..627: note = Description of Artificial Sequence: Synthetic coding sequence
  source 1..627: mol_type = other DNA
atggcctccttgtcgcgcccatctctgccgtcatgtctctgttccttcctcctgcttcttctgctccaggtgtcctcgtcgtacgctggacagttccgtgtcatcggaccacggcaccctatcagggctctggtgggcgatgaagtggagctcccatgtaggataagtcctggcaagaacgcaactggaatggaggttggctggtataggcccccatttagccgtgtcgtgcatctctacagaaacggtaaagatcaagatggcgatcaggctccagagtaccgggggagaactgaacttttgaaagatgccatcggagaaggaaaggtgacgctgcggattcgtaacgtgcgattctcagacgagggtggcttcacctgttttttccgggaccatagttatcaggaagaagctgccatggagctcaaggttgaagacccattttattgggttagccctggcgttctggtgttgctggctgtgctgcctgtcctgcttctgcagatcaccgtgggactcgtatttctgtgtttacagtaccggctcagaggtaaactacgagctgagatagagaatctccatcgtacattcggtcaatttctcgaagagcttaggaaccctttttag

SEQ ID NO: 125173 - DNA, 174 bp, synthetic construct
  misc_feature 1..174: note = Description of Artificial Sequence: Synthetic coding sequence
  source 1..174: mol_type = other DNA
atggctagcctgtccaggccttccttaccaagttgcctgtgcagcttcttgcttttgctattgctgcaggtctccagcagctatgccggcctggtcgccgtagctcggagctggctgatagctgcaagcaccagtcaggcccaggtgatcctcttaactcagcccttagagtag

SEQ ID NO: 125174 - DNA, 174 bp, synthetic construct
  misc_feature 1..174: note = Description of Artificial Sequence: Synthetic coding sequence
  source 1..174: mol_type = other DNA
atggcctctctcagccggccctcgctgccttcctgcttgtgtagctttctacttctgttactgctgcaggtgagctcctcctacgccggcctcgtagccgtagcccgcagttggctcatcgccgcctctacaagccaggcgcaggtcatcttactgacacaacccctggagtag

SEQ ID NO: 125175 - DNA, 534 bp, synthetic construct
  misc_feature 1..534: note = Description of Artificial Sequence: Synthetic coding sequence
  source 1..534: mol_type = other DNA
atgtctcacatctcctgggaagagcggtatcgcaacggcaaagatcaagatggggaccaagcacccgaataccggggtcgcacagagctcctaaaagatgcaatcggtgaaggtaaagtgactctgcgcatccgcaatgtgcggttctcggatgagggtgggtttacctgcttcttccgcgaccactcatatcaagaggaagcagctatggagctgaaggtcgaagaccccttctactgggttagtcctggcgttttagtgctgcttgcagttttgcccgtgctgctgctgcaaataaccgtcggtctggttttcttatgtctccagtacagactgcggggcaaactcagagcggaaattgagaaccttcatcggaccttcgacccccattttctacgcgtcccttgttggaagattacattgtttgtaatcgttcccgttctggggccactggtggctcttataatctgttacaattggctacataggcgcctggccggtcagttcctggaagagctgcgaaacccattttag

SEQ ID NO: 125176 - DNA, 516 bp, synthetic construct
  misc_feature 1..516: note = Description of Artificial Sequence: Synthetic coding sequence
  source 1..516: mol_type = other DNA
atggcaagcctgagccgcccgagtctgccgtcttgcctttgctccttcctactactgctgcttctgcaggtgtctagctcttatgccggtcagttcagagtgattggacctaggcaccccattcgtgccctggtgggggatgaggttgagctgccctgtcgcatttctcccgggaagaacgccacaggaatggaggtgggttggtacagaccccctttctctagagttgtgcacctgtaccggaatggcaaggaccaagacggcgaccaggcccctgagtacagaggcaggacggagctgctcaaagacgctatcggcgagggaaaagtgacactgcggatccgaaacgtccggttttccgatgagggcggctttacctgtttctttagggaccacagctatcaagaagaggcagcgatggaactaaaagtcgaggtgagccacagtgttacacaagattggctgcagtggcacgatcacggatcccttcaaccgccgcctcccaggttgaagtag

SEQ ID NO: 125177 - DNA, 534 bp, synthetic construct
  misc_feature 1..534: note = Description of Artificial Sequence: Synthetic coding sequence
  source 1..534: mol_type = other DNA
atgagccacatctcatgggaggagcgctatcgcaacggcaaggatcaggatggcgaccaggcccccgagtacaggggaagaactgaactgctgaaagatgcaattggagaaggcaaggtcaccctgcgcatccggaacgtgcggttcagcgacgaggggggtttcacatgcttctttcgcgaccactcataccaggaagaggccgcaatggagctgaaagtggaggaccccttctattgggtctcccccggggtcttggttcttcttgccgtcctccctgtgctgttgcttcagattactgtcgggctagtgtttttatgtctgcagtacagattgcggggcaaactgcgagctgagatagagaacctacataggacatttgacccccattttctgcgagtgccctgttggaagataacgctgtttgttatagttcccgtcctaggccccctcgtggcattgatcatctgctacaactggctccacaggcgattagccgggcagttcttggaggagctaagaaatccgttttag

SEQ ID NO: 125178 - DNA, 174 bp, synthetic construct
  misc_feature 1..174: note = Description of Artificial Sequence: Synthetic coding sequence
  source 1..174: mol_type = other DNA
atggcctctctgagcaggccaagcctccctagctgcctgtgttcttttctgctgctgctgctgctccaggttagctccagttatgccggtcttgtggccgttgctaggtcttggctgatagctgcaagcacatctcaggctcaggtcatcttgctgacccaaccactagagtag

SEQ ID NO: 125179 - DNA, 627 bp, synthetic construct
  misc_feature 1..627: note = Description of Artificial Sequence: Synthetic coding sequence
  source 1..627: mol_type = other DNA
atggcctccctgtcaagaccttctttgcccagctgcctgtgctcattccttcttctattacttcttcaggtgtcaagcagctatgctgggcaatttagagtgataggaccacgacaccccattcgggcccttgttggtgacgaagtcgagctgccttgcagaatctcacccggtaagaatgcaacgggaatggaggtgggctggtacagacccccgttctctcgcgtggtacacctgtatcgcaatggcaaggaccaggatggcgaccaagctccggagtatagaggaagaacagagctgcttaaggatgcaattggcgaaggaaaggtaacattgcgtatacggaatgtgcgcttctccgatgagggtggattcacctgttttttcagagaccactcttatcaggaggaggctgccatggagctgaaggtcgaagatcccttctactgggtttcgccaggagtgctagtacttctcgcagttctgccggttctgcttctgcagatcacagtgggcctggtctttttgtgcttacagtaccggcttcgtgggaagctgcgagctgaaattgaaaatctccatcgcacctttgggcaattcctagaggaactacgcaaccctttttag

SEQ ID NO: 125180 - DNA, 327 bp, synthetic construct
  misc_feature 1..327: note = Description of Artificial Sequence: Synthetic coding sequence
  source 1..327: mol_type = other DNA
atggcttctctatcccggcctagcctaccgtcctgcctctgctcatttctgttactgttgctgttgcaggtgagtagtagctacgcggatcccttctactgggtctctccaggggtactggtcctgcttgccgtgcttccggttctattgttacagattacggttggtttgatttttctgtgtctgcagtacaggctccgaggcaagctcagggcagagatcgaaaaccttcaccgcacctttgaatcatttggtgtcctcgggccccaggtgaaggaaccgaagaagactggccagtttctggaagagctcaggaatcctttctag

SEQ ID NO: 125181 - DNA, 753 bp, synthetic construct
  misc_feature 1..753: note = Description of Artificial Sequence: Synthetic coding sequence
  source 1..753: mol_type = other DNA
atggctcccggcgcaccctcatcctcacccagcccgatactggccgtgctactgttctcctccttggtcctgagccccgcccaggccatagtggtgtacactgaccgggaagtccacggcgcagttgggagcagagtcactctgcattgtagcttctggtcttctgaatgggtttcagacgacatttcatttacttggagataccagcctgagggagggcgcgacgctatcagcattttccattacgccaagggacaaccctatattgatgaagtgggcacatttaaagagcgcatacaatgggtgggagatccacggtggaaggatgggtctatagttattcacaatcttgattactccgacaatggcacctttacttgtgacgtgaagaacccacctgatatagttggaaagacaagccaggtgacattatatgttttcgaaaaggtcccgactagatacggagtcgtcctgggggcagtgattggtggcgtgttgggtgtcgtgttgctgcttctgctgctcttttacgttgtgcggtattgctggctgagaagacaagcagcccttcaacgaagacttagcgcaatggagaagggtaaactccataaaccaggtaaagatgcgagcaagcgaggccgccaaacaccagtcctgtaccaatgctggactacagccgaggcccccaagttgagtgtgagacggcgccctcggggctggggttctctggctcgcatccgcaattccggttag

SEQ ID NO: 125182 - DNA, 777 bp, synthetic construct
  misc_feature 1..777: note = Description of Artificial Sequence: Synthetic coding sequence
  source 1..777: mol_type = other DNA
atgcttagggctcccgccccagcccctgctatggcacccggggcaccttccagcagcccgtccccgattctcgccgtgctcctgttcagctctctggttctgtctcccgcccaagcgattgtcgtgtataccgacagggaggtacacggggctgtgggttccagagttacactacactgttcattttggtcatctgagtgggtgagtgacgatatctctttcacatggcgataccagcccgagggagggagggatgcaatatccatcttccactatgcgaaggggcagccctacattgatgaggtgggcacattcaaagaaaggattcagtgggtaggggatccccggtggaaagacggatcaattgtcatccacaacctcgactattccgacaatgggactttcacctgcgacgtcaaaaatccccccgacatcgtcggaaaaacttcgcaagtgacattatatgttttcgagaaagtcccgactaggtacggagtggtgctgggagcagtgataggaggtgtacttggagtggtgctgcttctcctgctgctgttttatgtggtcagatattgctggctgcggcggcaggccgccctacagcgccggctgagcgctatggaaaagggtaaactccacaagcccggcaaagacgcctcaaaaaggggccgtcaaacaccagtgctgtatgccatgcttgatcactctagatctacaaaagctgtatcagagaagaaagcgaaggggttgggggagtcccgcaaggataaaaagtag

SEQ ID NO: 125183 - DNA, 747 bp, synthetic construct
  misc_feature 1..747: note = Description of Artificial Sequence: Synthetic coding sequence
  source 1..747: mol_type = other DNA
atggcccctggcgcaccctcttctagccctagtcccattctagcggtcctgctgtttagctcactcgtgctcagccccgctcaagcaattgtggtctatacagatcgcgaagtccatggcgcggtgggttccagggtgactctccattgctcgttctggagtagcgagtgggtgagcgacgacatctccttcacgtggcggtaccaacccgagggaggtcgtgacgctattagcatatttcactatgccaagggacagccttacattgatgaagtgggtacctttaaggagcggattcagtgggttggagacccaagatggaaagatggaagcatagtgattcacaacttggattatagtgataatggtacctttacatgcgatgtcaagaatccccctgacatcgtgggcaaaacctcacaggtgacactttacgtgtttgagaaggtccctacccggtacggagttgtgctgggtgccgtcattggtggcgtattgggagtggtgcttcttcttctcctgctgttttacgttgtacgttactgttggctgagacggcaggcagcactccaaaggaggctgtccgctatggagaagggcaagctacataagcccgggaaagacgcaagcaagcggggaaggcaaactccggtgctgtacgccatgctggatcactcaagaagtactaaagcagttagcgagaaaaaggcgaaggggcttggcgagtccagaaaagataaaaagtag

SEQ ID NO: 125184 - DNA, 747 bp, synthetic construct
  misc_feature 1..747: note = Description of Artificial Sequence: Synthetic coding sequence
  source 1..747: mol_type = other DNA
atggcaccgggggccccttcttcttccccctctcccatacttgctgtcctgctcttctcaagcctggtcctgagcccagcacaggcgatcgtcgtttataccgaccgcgaggtacacggtgccgtcggctccagagtcactctgcactgttcgttctggtcctcagaatgggttagcgatgacatcagtttcacctggcgctaccagcccgagggtggcagagacgccatcagcatattccactacgccaaaggtcagccttatattgacgaggtcggtacttttaaggagagaatccagtgggtcggcgatcccagatggaaggacggttccatagttattcataatctggattactcagacaacggcacattcacttgcgatgttaaaaatccgcccgatatcgtcggaaagaccagccaggtgaccctgtatgtcttcgagaaagtgccaacgagatacggggtggtcctgggggctgttattggcggcgtgctcggcgtcgttctccttttgctgctgctgttctatgttgtgaggtactgctggctgcggcgccaggcagccctgcagcgccgcctttccgcaatggagaaaggtaagttacacaaaccgggcaaagatgctagtaagaggggacggcagacaccggtcctctatgctatgctcgaccattcgcggagcacaaaggctgtgagcgagaagaaggcgaagggccttggtgagtcccggaaagacaagaagtag

SEQ ID NO: 125185 - DNA, 648 bp, synthetic construct
  misc_feature 1..648: note = Description of Artificial Sequence: Synthetic coding sequence
  source 1..648: mol_type = other DNA
atgtatgggaagtcctcaaccagagcagttctgctcctcctcggcatccagctgaccgcactatggccaatagcagccgtggagatttatactagtcgggtgctggaggcggttaatgggaccgatgcccgattgaagtgcacgttttcttcgttcgcaccagttggtgacgccctgactgtgacctggaattttcggcccctggatggtggacccgaacagtttgtgttttattaccacatcgatcctttccagcctatgagtggccgattcaaggatagggtatcttgggacggtaatccagagagatacgacgccagcatattactgtggaagctccagtttgacgacaacgggacctacacgtgccaggttaagaaccctccagatgtcgacggcgtgattggggaaataaggttgtctgtggtccatacagtgcgcttctcggagatccattttctagctctagcaattgggtccgcttgtgctctgatgattatcattgtcatagtggtcgttctcttccagcactacaggaaaaagcggtgggccgagcgcgcccataaggtcgtcgagattaagagcaaggaggaggagagattgaaccaagaaaaaaaagtaagtgtatatctggaagacactgactag

SEQ ID NO: 125186 - DNA, 648 bp, synthetic construct
  misc_feature 1..648: note = Description of Artificial Sequence: Synthetic coding sequence
  source 1..648: mol_type = other DNA
atgtatgggaagtcatccactcgggcagtgctcctgctgctgggaattcagttgaccgccctgtggcctattgccgccgttgagatttataccagcagagtgctagaggctgtgaacggcaccgatgcaaggttgaagtgtaccttttcatcatttgcccctgtcggggatgctttgacagtcacctggaacttcaggccgttggacggcgggcctgagcagtttgtcttctattatcatatagatccgtttcagccaatgtctggtcggttcaaggatagagtgagttgggatggcaatccagagcggtatgatgcatccattttactgtggaaactgcagttcgacgacaatggcacctacacctgtcaggtgaagaatccgcctgatgtggatggcgtgattggagagataagattgtccgtcgtgcacaccgtgcgcttctctgaaatacactttctggctctggcgataggctcggcatgtgcactaatgataatcatcgtgattgtcgtggtgctgttccagcactaccgcaagaaacgctgggctgagagagctcacaaggtggtggagattaaatccaaagaagaagagcgcctgaaccaagaaaagaaggtttctgtctacctagaggacacagattag

SEQ ID NO: 125187 - DNA, 708 bp, synthetic construct
  misc_feature 1..708: note = Description of Artificial Sequence: Synthetic coding sequence
  source 1..708: mol_type = other DNA
atgcagcaacgtggtgctgccgggagcagaggttgcgcgctgttccccctgttaggcgtgctttttttccagggcgtctatatagtgttctctctggaaatcagggctgacgcccatgtgcgaggctacgtcggggagaagatcaaattaaaatgtacgttcaaatccacttcagatgtgactgataagctgactatagactggacataccgccctccttcctcgtctcatacagtaagcatttttcactaccagtcttttcagtatccgacgactgcagggacattccgtgaccgcatctcttgggttggcaacgtctataaaggagatgcctctattagtatctctaatcctactattaaggataacgggactttttcatgcgcggtgaaaaatccaccagacgtacatcataacatacctatgacagagttaaccgttacagaacggggtttcggtacaatgctgtcttccgtggcccttttgagtattctagtttttgtgccctcagctgtcgttgtcgccctgctcctggtccgcatgggcaggaaagccgccggactgaagaaacggtcccggtccggctacaagaagtcctcgatagaggtttctgacgataccgaccaagaggaagaggaggcctgtatggcgaggttgtgcgtcagatgtgctgagtgcctggactctgactacgaggagacctactag

SEQ ID NO: 125188 - DNA, 672 bp, synthetic construct
  misc_feature 1..672: note = Description of Artificial Sequence: Synthetic coding sequence
  source 1..672: mol_type = other DNA
atgcagcagaggggagcggcgggaagccgcggctgcgccctgttcccactcttaggagtattgtttttccaggacgcccacgttcgaggatacgtgggtgagaaaattaaactcaaatgcacattcaagtcaacgagcgatgtgaccgacaagctgacaattgattggacatacagaccacccagtagcagccacactgtttccatcttccattaccagagtttccagtaccctacgacggccggcacatttcgggatcgcatctcatgggtgggtaatgtttacaagggggatgccagcatttccatcagcaatccaactataaaagacaacggaactttcagctgtgccgtgaaaaaccccccagacgtacaccacaatatccccatgactgaactgaccgtcactgagcgggggtttggtaccatgttgagcagcgtggctctccttagtattctggtcttcgtgccgtccgctgtggttgtggccttgttactggtcaggatggggcggaaagcagctggtctaaagaagcgctcccgcagtggatacaaaaaatctagcattgaagtttccgacgatactgaccaggaggaagaagaagcttgcatggcccgcttatgtgtgagatgtgctgagtgtctggacagtgattacgaggaaacctattag

SEQ ID NO: 125189 - DNA, 3366 bp, synthetic construct
  misc_feature 1..3366: note = Description of Artificial Sequence: Synthetic coding sequence
  source 1..3366: mol_type = other DNA
atgtcgctggagaacgaagacaagcgcgcaaggacccgtagcaaagccttgagaggaccgcccgagaccaccgccgcagacctaagctgtccaactcccgggtgtactggcagtggccacgttagaggtaaatactccagacatcgtagcctacagagctgcccgctagctaaaaagcgcaagttggaaggagctgaggccgagcacctggtttcgaagagaaagtctcaccctctaaaactggcgcttgacgagggatatggtgttgattccgacgggagtgaagacaccgaggtaaaggacgcttctgtgagtgacgagtccgagggcaccctcgagggtgcggaggccgagacatcaggtcaggacgagatacacaggccagagactgcggagggccgcagcccagtgaaatcacacttcggctcaaacccaatcggaagcgcaactgcctcatctaaggggagctattctagttatcaggggatcatagccacatccctgctgaacctcgggcagatcgcggaggaaaccctcgtggaggaggacctcgggcaggctgcaaagcccggacctggcattgttcacctgttgcaggaggccgctgaaggcgctgcctctgaagagggtgagaagggtctgttcattcagccggaggatgccgaggaagtggtcgaggttactacagagcggtctcaggatctgtgtccacagtccctcgaggacgcagcttcagaagagtccagcaaacaaaagggaattctaagccatgaggaggaggatgaggaggaggaggaagaggaagaggaggaagaagaggacgaggaggaggaggaagaagaagaggaagaggaggaagaggaggaggaggaagaagaagaagaagaagaggaggaggaagaagaggaagaggaggaggccgcgcccgatgtgatctttcaggaggacacctcacacacgagcgcccagaaggcccctgaattgaggggtccagagtcccccagtccaaagccagaatatagtgtgatagtagaagtaagatccgacgacgacaaggatgaggatacccatagtaggaagtccactgtgacagatgagtctgagatgcaggatatgatgaccagggggaatttggggctgctcgagcaggcaatcgctctcaaagctgagcaggtccgcaccgtgtgcgagcccggctgcccacctgctgaacagtcacagctgggccttggcgagcccggaaaagctgctaagccgctggatactgtgcggaaatcctattactcaaaagacccatcaagggccgagaaacgagaaataaaatgtccaacccccggatgtgacggaacaggtcacgtcaccggactatacccgcaccatagatcattatccggctgtccccataaggacagaattcccccggagatattagctatgcatgagaatgtgctcaaatgtcccacaccaggctgcacaggacagggacacgttaacagcaaccgaaatactcacagatctctgtctgggtgtcccatcgctgccgctgaaaagttagctaagtcccacgagaaacagcagccccaaaccggggaccctagtaagtcatcctctaattcagacaggatcttaagacccatgtgctttgtcaaacagctcgaagtcccaccgtacggatcgtaccgcccgaacgttgcccctgccaccccacgggccaatctggccaaagagcttgagaagttttctaaggtgacatttgattatgcctcattcgacgctcaagtgttcggaaagaggatgctggcacctaaaatccagacatctgaaacatcacctaaagcctttcagtgtttcgactattctcaagacgcggaagctgctcatatggctgcaaccgcaatcctgaacctgagcactcgctgctgggagatgccggagaacctctccactaagccccaagatctccctagcaagtccgtggacattgaagtggacgagaacggaacgttggatctgtcgatgcacaaacaccgcaagagagagaacgcatttccttcttctagtagttgctcttcaagcccgggcgtgaaatcccctgacgcctcacaacgacattcatcaacatcagcaccctctagtagcatgacttcaccacagagttctcaggcatcacggcaggatgaatgggatcgtcctctggattacaccaagccttctcggctgagggaagaggaaccggaagagtcggaacccgcggcccactccttcgccagcagcgaggcagatgaccaggaagtttccgaggaaaacttcgaggaacggaaataccccggtgaggtcactctcactaatttcaaactgaagttcctctccaaagacattaagaaagagctgctgacttgccctacgcctggctgcgacggctccggccatatcacaggcaactatgcctcccacaggagtctctctgggtgcccactggctgacaagtccctgaggaacctgatggccgcacactccgccgacctcaaatgccctacaccaggatgcgacggtagcggacacataacaggcaactacgcgtctcataggagcctgtcaggatgtccaagagccaaaaagagcggtgtgaaggtggcccctaccaaagacgacaaagaagatcctgagctgatgaagtgccccgttccaggttgtgtcggcctggggcacatttctgggaaatatgccagtcatagaagtgcttctggttgtccacttgcggcccgcaggcaaaaggaggggagtctgaacggcagcagcttctcctggaaaagccttaaaaacgaagggccaacttgtcccacacccggctgcgatggttctggccacgcaaacggcagttttttgacgcaccggagtctgagtggatgtcccagggccacgttcgccggtaagaagggcaaactgagcggggacgaagtgctatccccaaaatttaagacatcagacgtgctggaaaacgacgaggagattaagcagctgaatcaggaaattcgcgatttgaatgaatccaacagtgagatggaagcagccatggtgcagctccaatcacaaatctcatcaatggagaagaatttgaagaatatagaagaagagaataagctcattgaggagcagaacgaggccttatttttggagctgagtggtttgagtcaggccctgatccaatcgctggcaaatattagactaccacatatggagcccatttgtgagcagaatttcgatgcttacgtttccactctaactgacatgtacagcaaccaagaccctgagaataaggatctactggaaagcattaagcaagctgtgcgcgggattcaggtttag
